United States Patent Application Publication US 2017/0114356 A1 - sequence listing, part 119

SEQ ID NO: 218688 - DNA, 5275 bp, Zea Mays
ggtacttccgcggtcgacggcaatgggggctgtgcgctgtggtggtggtcgtggagtcaggaggtggaagaggtagtacaagttagcgcggagccatgaggttttaattgcaatcggcgcacttgtctctttaatggccactgcttccaacgcctctgtcccggcttccacgcgttcgcagtgagggctagggtttccccgcgtcccgtcgccgtcgccgtcgctctgcaaggtggagagggtgctgcactgctgctgccgtcggtggcggttggaggctggagctcgttcgtcgctgtcgcttccccggcattactggttgtcttgaagaagaagatgatggtgggctcttcccgccaccagctgctgcagaggaaggggaagtccgtggctgacaagggcgccgccgccgccgccgccactgtggcggcagagaaggtggtggtcgcggtgagggcagccacgagggagatctccaagacggccatcatctgggcgctcacgcatgtcgtgcagccaggcggaagcatcatacttcttgtcgtcatcccggcacacagctctggcagaaagttctggggctttccgctgttcgctggagactgtgcaagtggccataagtctatgttggatcagaaatgtgatttatcagagttgtgttctcaaatgttgaagaaaattgatgtgtatgacatagacaagataaatgtgaggtataagcttgtttccggctctccttctggtgttgtagctgctgagtgcaagcaagcacaggcaagctgggttgtgctagacaaggatttgaagcatgaggagaagcgttgtgtggaggagcttcagtgcaacattgttgttatgaagcgatctcagcctaaagtccttcgacttaatcttgtgggatctcctgataaagagtctaaagcaacatgtgcagttccacctgtgctagatggttctaccagtaaaattgcaactgatgttaaggaagcacggagttcaattcgaggacctgttgtaaccccaaatagcagcccagacctggagacacctttcggaagtactgaagcgggaacttcctctgtctcgagttcagaccctgggacatctccgttttctgcttctgaaacaaatggttctctgaagaaagaggtgcaacaaacaaaggataaaattcagcattcagatgctaatatttctgattcagacagtgaaacattgagccctccagcaaatttctcacttcagccatggatgtctgatattctacagggaccagcatcgtcaagatcacttggaaaagttccacgaaaaaatcgcactgcaactgcagatgttttgttggaaaagttttccaagctggatctcctgaatgaaattaatgctatgagaagcaggtcagacttaaacttccgaggagatgtcagggatgttgttttgttggcaaggaatgcacctcctggaccacctccgctttgttcaatatgtcagcacaaggcacctgtttttggaaagcctcctcgctggtttagttatgctgaactggaacttgcaactggtggtttctcacaagcaaacttcttagctgaaggtggatttgggtctgttcatcgaggtgtccttcctgatggccaggctattgctgttaagcaacacaagcttgctagttcccagggtgatgttgagttctgctcagaggtggaagttcttagttgtgcacaacatcgaaatgttgtaatgctgataggtttttgcgttgaggacagaaggcgtttattggtttacgagtacatctgcaatagatctttggattcacatctctatggtcataatcgagaaacattggagtggactgcacgacaaaagattgcagttggtgctgctcgtgggctgcggtaccttcacgaggaatgtagggttggctgcataatccatcgtgacatgagaccaaacaacatccttgtcacacatgatttcgaaccactggttggagatttcggcctggcgcgatggcaacccgatggagacatgggcgttgaaacaagagttatcggcacattcggctatctggctcctgaatatgcacagagtgggcaaataacagagaaggctgatgtatactctttcggggttgtgttagtggaacttgtcactgggcggaaggctgttgacattaaccgaccaaagggtcagcagttactaactgaatgggcacgcccattcttggaggagtatgcaattgacgagctcatagacccacgactcggagagcgctactctgaaaatgaggtgtactgcatgctgcacgcggcaaacttgtgcataagacgcgacccacattcaaggcctcgcatgtcccatgttcttcgcattcttgagggtgacatggtcgtggaatctggtggttctgttactggcagtagtgattctgggagcagaagctggaggatgctgaacgaacagcaacattgccaggagtacagtagcccggctcaacaagagtcgcaaagggcaggcgaggggaaacgctcctacagtgccttgagggcctcttgggaccgagacaagcagagtatctccaacagatattagtgccgtctcataatgcagtgcagctgagattgtttagtcctgtattattccttcgccctacctcccggtctcaattttttttggcttgctcttttgtcttcacttcgtagcaatttgtaggccgaaagcttttgctgatacattgccctggtgtatagtagaaatgggtaatttcctatattacaaagccggttggaaaacggcgttgattaaggtatccacgtcacctcatttgatatcagccgtatgatctagatctactggatacgagccatcttgctcccacctgccgccagccgcctccacataaatatttttttcctgaatctccacactaccagagtcttccagcggcttcctctccctcctcagattcctctcctcgcgttctccctcgctaccacgcttgcgtgaatgccctcaccgcctctccccgtgctcgcccaaatcaccgcctctccctccctgtcgcccctgcgccacggtggttcacgcctttgaagtcacctcactcatcctgccgatgcagtcacccacaccgcctcctcccctccgctcaagccgcaccgcgatagctacacgccgcgacatcagctgccagcagcgccccccctaacaacgtcgcggcgtcctcgtgggctaaccccctccatcacttcttctcgccgggagctccatccaccttctccagcacccccacccccgctcaaatggtgtcagaaggtacgggaaccaatgggtttgaaggctgttcttatggaatataatgagctagccattaaaccacggaagggctgagagaaaattgggaggtggaagagatgcgctcaccaatcatctctgcgagagaaagcagtgccacatgggcccagcaatagcagcgtcacatggtggtggccatcgtcacgtcgagctagagatgtcaatgggtaattccccatcgggttatagcatcccagacccatccccatcatgtttgatacatccccatacccatacccatacccatcatgggtacaaaactcatcccatacccatctccattcgggtttcgggtccccaatgggtccccatccccaattaaggaataactaggtactaacatctagcacaaactatccagatttcatacatcaccacatcggcaagcactcatccacgaactattgtccattcatccattcatcagaagagaaatcagtacttgggaccaatataagaaatggagtctgccgggtttgatggccgactcggcctcaactcattcatacaaacaggacatgtgtacgcatatgaaataaccatgggtaatcgggttcggattattgcttcccaaacccatacccgtttacccaatgggtggagattttgtcccatatccatacccatggggacaatttttgtcccatacccgtaccctaataggggaattccccatgggttatcgggtatcgggtccccattgacatctctacgtcgagctctccctctccaccaactaacagttcctgacagtggagcagaaattcattaagagcatatagggattcacaagtggtacatgtattctgcctatctttatttcttagtattatataaactacatactgtatttggagatgcattgtttattctctgcaatcggttaaccctggactgcttgcaactatccccagttacgaaatagtgcttcttttctgtcataacttttcaggcgtccatagtaaatgaaattggtgcatatatttgagttgactaacaatgcgataactaacatgtgatttgtcgattttcctttttactgctagattttgagcccaacaatctcgctgccaccgatactcctggttcgtatatttggttactcaaaacatgagatgatcctctgaagtagaaagggaaacactgaatacgctcttgctgaaatattctatagaaagacacaattccattttggcagatgcaagtgaaagatctacagggaagaaattggggtagcatataaccgccgcaagggaaaatatggtgtagcagatgaggatataatcttatatggtcaatgtgtttgaattggtccaaccattgatattgcttcacggttgctagacttgagagtcgcggttttgcatagtcctatattttatctgcactaagagtaatatatacagccaagcagacgtttggtttaacatttacaaggtatgtttggtacttttgtttttttggaattaatggttgtccgatgcttgtcattcatatgagttctaatatcatgcccccttaaagtactcatcatcaaaagtttccatgtgaatgttttaaatgtatatttaaagggttggaagacatcagactgttattcaaacaggatcttaagtgtcgtgaaagactacaagtgaggttcaacttggcaaattatttttccagtaactaaggagcaacaattttatgtattttagcttgacatatgaatctaggtacttacatttttggaatcgggcaaacagtgatagtttgaatcacatgttttgccaaaaggaattattagaactgttcaaagttggaaaaaatacatatttatgttttcttatgcatggataaattgctctgttcatatataaaaaaataactgtagtattattgcttatattgattttaaatgatgaccttattagatgtgccatcg

SEQ ID NO: 218689 - DNA, 4932 bp, Zea Mays
cccagcccaacactttgaactggggaaacggccgcctccttttttaacgcaatcatctctaccgggcgtgttgctcgcctttttgcttccgctccgcctgccaagcaggcccggcgtccaactctggtggcaactgccagggcagcccggcattactggttgtcttgaagaagaagatgatggtgggctcttcccgccaccagctgctgcagaggaaggggaagtccgtggctgacaagggcgccgccgccgccgccgccactgtggcggcagagaaggtggtggtcgcggtgagggcagccacgagggagatctccaagacggccatcatctgggcgctcacgcatgtcgtgcagccaggcggaagcatcatacttcttgtcgtcatcccggcacacagctctggcagaaagttctggggctttccgctgttcgctggagactgtgcaagtggccataagtctatgttggatcagaaatgtgatttatcagagttgtgttctcaaatgttgaagaaaattgatgtgtatgacatagacaagataaatgtgaggtataagcttgtttccggctctccttctggtgttgtagctgctgagtgcaagcaagcacaggcaagctgggttgtgctagacaaggatttgaagcatgaggagaagcgttgtgtggaggagcttcagtgcaacattgttgttatgaagcgatctcagcctaaagtccttcgacttaatcttgtgggatctcctgataaagagtctaaagcaacatgtgcagttccacctgtgctagatggttctaccagtaaaattgcaactgatgttaaggaagcacggagttcaattcgaggacctgttgtaaccccaaatagcagcccagacctggagacacctttcggaagtactgaagcgggaacttcctctgtctcgagttcagaccctgggacatctccgttttctgcttctgaaacaaatggttctctgaagaaagaggtgcaacaaacaaaggataaaattcagcattcagatgctaatatttctgattcagacagtgaaacattgagccctccagcaaatttctcacttcagccatggatgtctgatattctacagggaccagcatcgtcaagatcacttggaaaagttccacgaaaaaatcgcactgcaactgcagatgttttgttggaaaagttttccaagctggatctcctgaatgaaattaatgctatgagaagcaggtcagacttaaacttccgaggagatgtcagggatgttgttttgttggcaaggaatgcacctcctggaccacctccgctttgttcaatatgtcagcacaaggcacctgtttttggaaagcctcctcgctggtttagttatgctgaactggaacttgcaactggtggtttctcacaagcaaacttcttagctgaaggtggatttgggtctgttcatcgaggtgtccttcctgatggccaggctattgctgttaagcaacacaagcttgctagttcccagggtgatgttgagttctgctcagaggtggaagttcttagttgtgcacaacatcgaaatgttgtaatgctgataggtttttgcgttgaggacagaaggcgtttattggtttacgagtacatctgcaatagatctttggattcacatctctatggtcataatcgagaaacattggagtggactgcacgacaaaagattgcagttggtgctgctcgtgggctgcggtaccttcacgaggaatgtagggttggctgcataatccatcgtgacatgagaccaaacaacatccttgtcacacatgatttcgaaccactggttggagatttcggcctggcgcgatggcaacccgatggagacatgggcgttgaaacaagagttatcggcacattcggctatctggctcctgaatatgcacagagtgggcaaataacagagaaggctgatgtatactctttcggggttgtgttagtggaacttgtcactgggcggaaggctgttgacattaaccgaccaaagggtcagcagttactaactgaatgggcacgcccattcttggaggagtatgcaattgacgagctcatagacccacgactcggagagcgctactctgaaaatgaggtgtactgcatgctgcacgcggcaaacttgtgcataagacgcgacccacattcaaggcctcgcatgtcccatgttcttcgcattcttgagggtgacatggtcgtggaatctggtggttctgttactggcagtagtgattctgggagcagaagctggaggatgctgaacgaacagcaacattgccaggagtacagtagcccggctcaacaagagtcgcaaagggcaggcgaggggaaacgctcctacagtgccttgagggcctcttgggaccgagacaagcagagtatctccaacagatattagtgccgtctcataatgcagtgcagctgagattgtttagtcctgtattattccttcgccctacctcccggtctcaattttttttggcttgctcttttgtcttcacttcgtagcaatttgtaggccgaaagcttttgctgatacattgccctggtgtatagtagaaatgggtaatttcctatattacaaagccggttggaaaacggcgttgattaaggtatccacgtcacctcatttgatatcagccgtatgatctagatctactggatacgagccatcttgctcccacctgccgccagccgcctccacataaatatttttttcctgaatctccacactaccagagtcttccagcggcttcctctccctcctcagattcctctcctcgcgttctccctcgctaccacgcttgcgtgaatgccctcaccgcctctccccgtgctcgcccaaatcaccgcctctccctccctgtcgcccctgcgccacggtggttcacgcctttgaagtcacctcactcatcctgccgatgcagtcacccacaccgcctcctcccctccgctcaagccgcaccgcgatagctacacgccgcgacatcagctgccagcagcgccccccctaacaacgtcgcggcgtcctcgtgggctaaccccctccatcacttcttctcgccgggagctccatccaccttctccagcacccccacccccgctcaaatggtgtcagaagggctgagagaaaattgggaggtggaagagatgcgctcaccaatcatctctgcgagagaaagcagtgcgcagccacatgggcccagcaatagcagcgtcacatggtggtggccatcgtcacgtcgagctagagatgtcaatgggtaattccccatcgggttatagcatcccagacccatccccatcatgtttgatacatccccatacccatacccatacccatcatgggtacaaaactcatcccatacccatctccattcgggtttcgggtccccaatgggtccccatccccaattaaggaataactaggtactaacatctagcacaaactatccagatttcatacatcaccacatcggcaagcactcatccacgaactattgtccattcatccattcatcagaagagaaatcagtacttgggaccaatataagaaatggagtctgccgggtttgatggccgactcggcctcaactcattcatacaaacaggacatgtgtacgcatatgaaataaccatgggtaatcgggttcggattattgcttcccaaacccatacccgtttacccaatgggtggagattttgtcccatatccatacccatggggacaatttttgtcccatacccgtaccctaataggggaattccccatgggttatcgggtatcgggtccccattgacatctctacgtcgagctctccctctccaccaactaacagttcctgacagtggagcagaaattcattaagagcatatagggattcacaagtgattttgagcccaacaatctcgctgccaccgatactcctggttcgtatatttggttactcaaaacatgagatgatcctctgaagtagaaagggaaacactgaatacgctcttgctgaaatattctatagaaagacacaattccattttggcagatgcaagtgaaagatctacagggaaggtatcttttgttcttatattttggttgcttaacaaataccttacgtagaaactataatcttctctctaatcatatcttagtggaaagtttattcttccattgaacatcccactgagtgtaatacatatgcagaaattggggtagcatataaccgccgcaagggaaaatatggtgtagcagatgaggatataatcttatatggtcaatgtgtttgaattggtccaaccattgatattgcttcacggttgctagacttgagagtcgcggttttgcatagtcctatattttatctgcactaagagtaatatatacagccaagcagacgtttggtttaacatttacaaggtatgtttggtacttttgtttttttggaattaatggttgtccgatgcttgtcattcatatgagttctaatatcatgcccccttaaagtactcatcatcaaaagtttccatgtgaatgttttaaatgtatatttaaagggttggaagacatcagactgttattcaaacaggatcttaagtgtcgtgaaagactacaagtgaggttcaacttggcaaattatttttccagtaactaaggagcaacaattttatgtattttagcttgacatatgaatctaggtacttacatttttggaatcgggcaaacagtgatagtttgaatcacatgttttgccaaaaggaattattagaactgttcaaagttggaaaaaatacatatttatgttttcttatgcatggataaattgctctgttcatatataaaaaaataactgtagtattattgcttatattgattttaaatgatgaccttattagatgtgccatcg

SEQ ID NO: 218690 - DNA, 3707 bp, Zea Mays
atggaggactacccggaggagctgcggacgccgccggtgtcgctagtgtccatcgtggggtgcccagagcttcacccctcgatctcgacggcactcagctcccagcagcctcccatgaacacactggccctcccggacttcgccaaggcctctattctggcccgcagcgttaagccccgcgaccctctcgcaccgccgcaaccccccgcgggaatcctcaagaaggactggctacttaagcaccgcacccgcgtcccggccgccgtcgccgcgctgttccgtgccgaccaggtctccggcgaccccgcccagtggctccaggcctgctccgatctcgaaaacctcaagtctgcaattcaggggaaaaacactaaatcagtggtggtccttgtgcaggctcaagctaatgatgagctgagtgaggatgtaattgttgccctgagaaaacgtgctgaaatcgattccaagcacttggttgtgctagttgagcacgatgaagcagaatggaacagatctctgaacaaattgaagaatgtctttgtggagttatgtgcagcattctataaagaggaagggcgaaggataaaggctcgcattgagaaaaagaactttgcttctgttgagctgagcatccggtactgtttcaaggttgctatttatgcggagttcagaagggattggccagaagcattgaagttctatgaggaaggtgttcgtgttttgcgtgagatgattggaacttcgacaaggttgcctccaacccaacgcctggttgagataaaagcagttgccgagcaatttcactttaagatatcaaccttgctacttcatgccgggaaagtggtagaagcaatcacatggttccgtaagcatatcaaaagctatgaacgggttgttggaacaccagaagttgcttttcttcactgggaatggtttagcaggcagttccttgtctttggtgagctgatcgaaacaacatccacaactattccagatacactatctcctcgatttggcactgcagacaacacattgactgagtgggaatttcagccagcatactactatcagttagcggcaacttacttgagggagaagaggtatgccatcgaatgctcgtcatcaatggctaaccttacaacagaagttaatggagtacctgagtcagtaatgccttctgtatatgttggccaatatgtgcgcttgtttgagcaaggagatacagttagtctactaccctatgctttgtcagaagctgaaaggtttcaagattcttatgagataatagcattgttcagaaaagcttatgaatcatttcagagcctaggtgctacaagaatggcttctgcctgtagcagtggaatggccatagaatattatgcagctgctgattttagcaacgcaaaacagctttttgatagtgttgctggtctataccgtcaagagggttggaccagtttgctctgggagaacctaggatacttgagagagtgctcaatgaaacttaattctcccaaggattttatcagctattccctagagatggctgcattaccattattttctggtagtggagaggaaaatcgagaaaacaaaattaagagtgggcctgcaggttcccctaccatttccaggagagagaatatacagcaggaagttattaatgttttggaaagaaaacagtcatcagaaggaacatatgatggatttaataatgcgatagaagaagttactcaccttgatattgatcagaggaagactcactcccttcatattcaaatttgcatggccaagttattcaagatacttcttctcttactctcttcaccaatagatggatgcggttgacacatgaagtaaaatcaggaaagagtggaaagctagaatgtttgtctgtgaaggcgacaataagcaaacaccttgtgatttgctgccatgctgaaagccctgcttccatggaagacttcccattatggaaatttgagaaccaagtggagacactgcccacaaaggacaccactcttgccttctctggacagaaacttattcaagttgacgagccagatgctcaagttgaccttgtcttaaattctgctggccctgctttagttggagagttatttactttaccagtgatcatagagtcaaaaggacatgcagtccattctggtgaactgaaaattaacctcattgatgctagaggtggtggtctgttgttgagtccgagggaagcagaagattctgaaagtcatcatgttgaacttcttggtgtctcaactgtgtctgaggataaagagtcaaaggaagaggctgatagcataagaaagatccagtattcatttggggttgtatctgttcccacattgagtgtgggtgattcctggtcatgcaaattagaaatcaaatggcatcgagcaaaatcagtcatgctttatgtttcacttggttactccctaggctcaagtgaagaagaagcattgcaccggcttaacgtccatagaagcttgcaaattgaagggcagatccccttattagttagtcatcagtttttgagatcatttaggcgagaaccgttgttgctatcagggatcaggtccttaggaagtgatgataaaaaatgttctcttgctatgaatgagtctaacatgctaattgtgactgcaagaaactgcactgaagtgcctttgtgtttgcattcaatgaccattcaacctgatggtgattcagagcagctgtgttcagtgcaacagatcagtggaatttccaatcgtcatgcaattgttgctcctagggaggaatataaaggaatattttcggtcaatccacgggctatcagtacaaacttcagactaggtgaaatttgcctgaattggtcaagagattcaagcctcggtgaggatcaagataggcttattatcatgaaagtacagttacctgaggtcaacattgaggagccgccgcttgttgtgggcatggagtgccctccctatgcaatcctcggcatccctttcactatctatgtgaagattcacaattcaacgtctttgcttcaggaaatcaagtactcccttgttgattctcagaatttcgttttttctggtgctcacaatcatgctgctttcattctaccgaaatcagagcacactgttagtcataagtttgtaccgcttggttctggctctcagcagttgccaaggatcacagtaacttcagtgcggtattctgctgcattgactccttcagcctcagcagcgactgtctttgtgtatcccagtgagcctaaattcaacttggaaactagccattcaacatccgatgaggtcgtgagttgagacctaagcagcctgaagtctcccctctcctgacacttagctcgacccgggcttcatgtgaggtaaggtatgctactggaaagaccaccagcttgacatttcatgttgattgttgaagaaacgaatcagattcctgtcggcgagaaggtcgctgtgcaaaagttttggcattatatttcgaggtttcgattttgtagcgcttctcgattaaccacatatgtgtaacttatgattacttcattgtttttggttcaatggtgcaacatacacaggaagataggctcttgtaaattaccatcccaccagtaaagtgggggaacaaaccagccccatgtcagtttttactctttgatgcttgccaactcgtcaatttgt

SEQ ID NO: 218691 - DNA, 4817 bp, Zea Mays
caagtgcatgcatacattgtgcgttcgcttccgtagtacagggcccccatgtgcgccttgccgccttgcctccactccacacaaccgtgtcagtacggcacccggacaagaggcaaacggcaaacccgatcggccgatccattctccaaccctagccgccggccgccgccacctacccggctaccccacgtttccagtccccactccctccgccggcgcatcctgcttccagcctccatcggcgcatcctgctcctggcctcccgccaccggcgcatccttgctcccggcctcctgccaccggccgcatccccagggccgcgagatcctgctcccgccaccggccgccgcaacctgccagcgtccagggcactcgcccccaccatccgccgccgccccccaccggcagtcgcaacctgccagcgtccagggctccaggcaagggccgccacgtgaccacgtctcgcaggtcagcaggtcccttgcctccttccatggcgcatgctggtaggagcggaaccggcgctcaagcacaaggtgccccgaggccgagcagtcatcaagttccctcaaagacaagtgctgtggctgcaggaggttcctcaagtgcacctacaccgacgagtgctgctgcaaatgcaatgccatcttcaagtgctcaagctccaccatcagaaggtcctgacacccttgctgacaagaaacgggcagcgggcggtggctctgtgtttaagccaccccctcccatggtagctgttgctgtgggttccatcgatgaagatgagaagccaggacctacagagaatgacgcgacaagcctctctacgacaattcgcagtaactcattgcgacgctaccgaggaagtggttccgatgataaaacatctttgaatgaatcaacagtcactgatgaggacgaaagggccccatcacccaaccatcaggatgagccccaccggcaagaggcccacatctctagaagctctcaaggttctcgtcctcatggcactcctcgtggttatggttactatgatgatagaggatcccatgataaacatggtgatcgtgagagatctgcatccattggctatagtaatagtggaaggcgaagataccatgatgatagagaatctcatactaggcgcgctgagcgtgagaggtctacatcaaatgaatatactaacaagagaagtcgacatgagcatagctcaagaagctcaagaacatctgcacgatctgattgggatgatggacgctgggaatgggaagatacacctcgtcgagattatcgtgataatcgtcctggctcccggagacaacatccaacacgatctcctatgctcgctgctgcatccccggatgcacgcctggtatctccttggttagacgggaatacaccacgtctagcagcgtccccgtgggataatgtatccccttcacctgctccaatacgtgcttctggttcctcaaaagggtcttcttattcacattccagtggaagatcacaccagcttaccttttcatcaactactagttctaatattattgatgctgatagaagcccctcaaatcctgataggaacagtgagataaccgaggaaatgatgcaggagatggactacaatgctgaccgtgcatggtatgactgcgaagaacacactaccatgtttgatggtgatcattctatgtatcttggagatgataattcctacaaaaagagggaagcagagatgccgaagaagctgactcgtagagatggtagcctgatgacccttgctcaaagcaaaaagatgtcacagatgactgctgataatgctcagtgggaggatagacaattgttgagatctggagctgttaaaggaacagaagtgcaaactgaatttgatgatgaggaggaacggaaagtaatacttcttgttcatgacacaaagccccccttcctggatgggagagttgttttcacaaaacaagcagaacctgtaatgcctctgaaggacccaacatctgatatggctattattgcacgcaaaggttctagtctggttagggaaatccgtgaaaagcaaagcatgaacaaatcaaggcaacgattttgggagcttgctggatctaagcttggcaatatcttgggtgttgagaaaacagctgaacaggttgatgcagatactgctgttgttggtgaccaaggtgagattaattttaaagaagaagcaaagttttcacaacatttgaaggataaagcagaagctgtcagtgattttgcaaaatcaaaatccctttctcaacaaaggcaatatcttcccatatttaccgtccgggatgatctgctacaggttgtgcgtgaaaatcaagtggttgtggttgttggtgaaactggttctgggaagactactcaactgactcagtatctgcatgaggatggatatactaccacaggagttgttggttgtacccaaccaaggcgtgtggctgccatgagtgttgctaagcgagtcagcgaggaaatggagactgatctgggagataaagtcggatatgccatacggtttgaggatgtcactggtccaaacactataataaagtatatgacagatggagtgcttctccgtgaaaccttgaaagatgctgacctcgacaaatatcgtgttgttgtcatggatgaagcacatgaaagatcactcaacactgatgttttgtttggtatactgaagaaggttgttgcacgtagacgggattttaaactaatcgttacatctgcaaccctaaatgctgacaagttctccaagttcttcggaggtgtgcctgtattccatattccgggtcggactttcccagttaacattatgttcagcaaaacaccatgtgaggactatgtggaagctgcagtgaagcaggccatgactatccacataaccagcggccttggtgatatcctaatcttcatgactgggcaggaagaaattgaggctacctgctatgcgcttgctgaacgcatggaacagttaatatcgtcatccaccaagactatccccaagctagagattctgcccatctactcacagttgcctgctgacttgcaagccaagatttttcagaaggctgaagagggcgctcgcaagtgtattgttgctaccaatattgctgagacctcattaacagttgatggtatcttctatgtcattgataccgggtatgggaagatgaaggtgtacaacccgcggatgggtatggacgccctccaggttttcccagtcagccgggcagctgccgaccagcgtgcaggtcgggcaggaagaactggccctggcacatgctacagattgttcacagaatcagcctaccagaatgagatgctccctaaccctgtgccagagatccaaaggactaacctggggaatgtggtgcttttactgaaatccctcagagttgaaaacttgctcgactttgactttatggacccaccgccccaggagaatatcctcaactcaatgtaccaactctgggtgttaggtgcattgaacaatgttggtggccttacagaaattggctggaagatggtggagttcccgttggatccaactctggcaaaaatgcttcttatgggggagcagctagagtgccttgatgaggtgctgaccattgtatccatgctatcagtgccgtcagtcttcttccggccaaaagaccgagcagaggagagtgacgcagcaagggagaaattctttgtcccagagtctgaccacctgacactcctgaacgtgtatcttcagtggaagtcgaatcagtatcgaggcgattggtgcaacgaccacttcctccatgtcaagggtctccgcaaggctcgtgaggtgagatctcagctgctggacatactgaaaaccctgaagatccccctgacatcatgccatatggaatgggacgtggtgaggaaggctatctgctctgcgtacttccacaattccgcccggttgaagggtattggggagtacgtcaactgccggaatgggatgccgtgccacctgcaccccagcagtgcgctatatggccttggctacactcctgactatgtcgtctaccatgagcttgtcctgaccaccaaggagtacatgcagtgcgtcaccgcagttgatccacagtggctagcggagatggggcccatgttcttctctgtgaaggagacagacacctctcttcttgaccacaagaagaggcagaaggaagagaagacggcgatggaggaggagatggagaagctgaggcggcagcaagcagaggccgcgcgcatggagaaggagaaggaacgggagaagagagctaagcagcagcaacaggttgctatgcccggcctgaagaagggtgcgacttatctgaggcccaagagaatgggtctgtagataagacctgatataacttaactgtctccggtgattttgttactaggctgagggaacttgtaatgtgtagcctgctcaagcagcatgtaaaacaacacgtcaatgtgaatgtatacaacatcgacatgtgaaaaaatgaaaagaaaaatagagtgttgtcgacatagagtttgattttttgctgagttagctcttaaaagtatgcagtcattatgtttgatatggtatgtcctcttaatgaaaaatatgattcttgaaggtctatgaattctgcaggcaagctaaattagctcttaaaacatttcaagaaacaacgtgaccctgaatggactcaaccaatcgtccattgctgattagagatgacaatgggtatccgaaacccgatgggtttttatcccattagggtacgagtttgggtcagttt

SEQ ID NO: 218692 - DNA, 4511 bp, Zea Mays
ccgccgccaattcagctcggcgattcgtttcggtgccgccgcagtcgagcggagcggagccaacctcctgcagtgccaggcgcgtccggggccgaggggcgacggccaaccgaacgggagagtgtcaagtcaagtgggcggattgcgggaaggaaggaaaacctcccgcgcgactcgcgcctccgccctcctcgtcctcgtcctcgtcctccattccaacccctgcgtttcggattctgttgcgccctctccagagcctcggcgagcggtggaaactctaggtggcggcgacggcgatggcgtcggcgagcaggggcaccggggtggcgccggcgggcgagcccggcagcccgagggcgtggggcggcgaggacgaggcgtgcagggcgaggaaagtgaagctgatgtgcagctacgggggccggatcgcgccgagacccggggacggggcgctgcggtacgtgggcggccagacgcggctcatctccgccccgcgcgccgcctccttcgcggacctgctgcggaaggtggaggcggtggacgaggcctcggcctcctctggcggcggggtggtcctcaggtaccagctccccggggatgacctcgactcgctcatctccgtgtccggcccggaggactacgacaacatgatggaggagtacgagaagctggccgccgcggcgcccgacggctccgccaagctccgggtcttcctcttcccggcctccggggccgacgcggggccccatctcgccgccgtggtggacgagtccgggcagcggtacatcgacgccatcaactgcgtctccacggaggccattgccacggccacggccatgcggcggaaggacggcgtcgccagcgccggctcctccgcgcacaactccgaggcggccgagtacagcggtctagtcgaaagtacgtcgccgcgggcggtgccgccgcctgcttccgttgcgactgagtattcgtattcaggtggagcgcattacctccgtgctttcccggagtcggttgggctcactgcagtctcggcgtcacctctggcgatgggcatcccggctcaaaaccccatcctggttaggacagagcagtcgacgttgccgcctcatcaggttgctgctgtttatgcagcagcaacacagcatcagccgcctcaagtgaccacttatgtgcaggagcagcagcagcagcagcctcaaggcacccattacgtaccacaacagcagcctcagtctgctgcttatgtgcagcagatgccgcagtcgtatatagagccgcagcaggtacactacatcaacgcccaacaatttggtgtgcatggggtgccacaatctgtcaactatgtgcctgtgcaaatgagccaattcatgcccaacattcctgtgacgggctctatggcgaccactgctgctcaagtgggaaagttgaagcccgcttccgcaggtgtagaacctgttccagagaccacgcagttcacaaggccagtgcaagctcaggttgatcagagttaccgggtggtgcacactccactgtcacagcttcctcctttgtcttctgtgcatctgcagacaaatgatgcgcagaggcagaaatttggtgcccaacaagcgatgacaagcgcagtaagcatgccagtggtgaccagctcaggcacaattcctgttgtggttagctcggccactgttccatcattgaggtatgatggttgcacaatgtgccaaaaagcattgccacatgcccattcggataatactatccgggagcagggaagttcttgtgcaatgggcaaccttgaggcagctccaatgttttacagcccacatcaaggcaccgcatccaacaaatctaatccaggtgcaagttcaggaacactcacgaactatgtggcagaaccaagagctgggaacacagcagtgatggcacaatttgattcgactcttcctgccagaaaacctgcagtccaggcgactgcatatgcggatacagttgtgccggttcaacccaccattattgctttcccagtgtctagtgcacctgctccaaaaggagtatttgtgggtcattctccttcggctggggctgaagatcatgtcaggtaccagcagcaaccattctcttatagcatgcaaccgccgctagttccagtgaatgtcccacaaggcattggtgccagtgcatacaaagattcaaatcatgcagcagtggaaccgcttagagaatatgcccgtgatcttcctcatgactatgctagagctattgatgctcgtatgcatgcagttcatttgggtcctattgcaccaccagaatctagtgtgcaaggaaatccttctattcctcatgttgtcattgatcatgccaaagttgggaagccacctgtaaataatgatgttacttctttctgcaaatctcaagctggagggtatcatatggggatcacaaatgcctttactgctcctgttttaacccaagaggacaacattgccaggcacagtgagcagccaccttgtgattttgatgttggtgcacaaaatgtccaacctgacataatccagcgaccaccactcaatctgcctgtccagagcaaccttagagttccgattgaaccacctgtttctaatgaaaagttcaccgttcaaccatctaactctggtgctcagcttcctgctgggcctcctctacagcatcctaaggaaatgcccaatcacttggatccttggaaagcagtgggcaatgcttctttagtgcctccaagaccaagcaagttaactaaggaacctgttgtttctggaggtcaatatgctgatggtcatatgcctgatatgaacacacatgctgccttactctttgaagaagacccaagtttaaaggatatccacacagttaaattgaacaaaggatttgggaaagctaatattaagcgacaattacaagatgttgctgaaggggtagcagcatcagttcttcagccatcctttcctgaaaaaccagctgcattctctggggatcacatcgattcacatggagcagtaattgatgtgaaagttcagggtgaagggaataatcagtcagacaaaacaagccaggggattcaagttttagatgacatcgataaacttcagataataaagaacagtgaccttgaggaattgcgtgaactgggttctggaaccattggtactgtgtaccatggaaagtggagaggctcagatgttgctataaagagaatcaacgagcgatgttttgctgggaaggcatctgagcaagagcgtatgacaagcttgcatctttgcaccatccaaacgtagtagcattgtacggtgttgttctagatggacctggtggatctgttgcaacggtaacggagtacatggctaatggctcactccgacaagcattgcaaagacatgaaaagatctttgatcggcgtagacgtctattaattgcaatggatgttgcttttggaatggaatatctccatgggaagaatatagtgcatttcgacttgaacagtgacaatctgcttgtcaacctaaggtatcctcaacgaccaatatgcaaggttggtgatttgggattatcaaaggtcaaatgccagacacttatctctggtggagtgagaggaacactaccttggatggcccctgagttgttgaatggcagcagcagcctcgtctctgaaaaggttgacgttttctcgtttggcatcgtgatgtgggagctactcacgggtgaagagccttacgccgaactgcactacggtgccattataggtgggatcgtgaataacacgctgcgacctccggtgcccgagtcctgtgacccccagtggaggtcactgatggagcagtgctggtcagccgaaccctcggcgaggccgagcttcaccgaggtaggcacgaatctgcgcgccatggcggccgctcctaccaaggcacaacaatcgaaatagacggttttagccttctgcctcctgcgccaccttctttttagcaggctgtttcagtcttcaaaccgaggaggtgccgtccctagcctagcctggctttttttttttgtacatgaataagttgaagaaagataggagaatgtcgtggcatgcttatagagtcgatggatggttgatgcttcctgtcttgcttttggaacgaatcgtggaaatatatagtacaacgtagtgtaaagattgagccgtgagcgtgtagatcaatcggtacgtgagggagttaaaggagtgtttggcgggcgagtgatgctcgtgcgctctcgtccataacggcccggtgttcgtcgtttattcctcggttacgtccgggatatcttttttgggttctttctggcccgtgttgatgtgccattgaatattgcccggtgccatggaaaagcggtgctgttctcagttctcaccaagaggtgcaggagaaaccagagtttaggctgtctccagcaacgttccctaaatttcgtcccctaaaggaatattctctgtactttacagaacactctaaaag

SEQ ID NO: 218693 - DNA, 4771 bp, Zea Mays
gccaggcccatgacacagtacgacggtggctgcgcggttggtcagtgagtcacggccaaagcaagcacgcctctcagacacgaaactgcagtgtgtaacttatctcctggaccgcccgaccgccgccaattcagctcggcgattcgtttcggtgccgccgcagtcgagcggagcggagccaacctcctgcagtgccaggcgcgtccggggccgaggggcgacggccaaccgaacgggagagtgtcaagtcaagtgggcggattgcgggaaggaaggaaaacctcccgcgcgactcgcgcctccgccctcctcgtcctcgtcctcgtcctccattccaacccctgcgtttcggattctgttgcgccctctccagagcctcggcgagcggtggaaactctaggtggcggcgacggcgatggcgtcggcgagcaggggcaccggggtggcgccggcgggcgagcccggcagcccgagggcgtggggcggcgaggacgaggcgtgcagggcgaggaaagtgaagctgatgtgcagctacgggggccggatcgcgccgagacccggggacggggcgctgcggtacgtgggcggccagacgcggctcatctccgccccgcgcgccgcctccttcgcggacctgctgcggaaggtggaggcggtggacgaggcctcggcctcctctggcggcggggtggtcctcaggtaccagctccccggggatgacctcgactcgctcatctccgtgtccggcccggaggactacgacaacatgatggaggagtacgagaagctggccgccgcggcgcccgacggctccgccaagctccgggtcttcctcttcccggcctccggggccgacgcggggccccatctcgccgccgtggtggacgagtccgggcagcggtacatcgacgccatcaactgcgtctccacggaggccattgccacggccacggccatgcggcggaaggacggcgtcgccagcgccggctcctccgcgcacaactccgaggcggccgagtacagcggtctagtcgaaagtacgtcgccgcgggcggtgccgccgcctgcttccgttgcgactgagtattcgtattcaggtggagcgcattacctccgtgctttcccggagtcggttgggctcactgcagtctcggcgtcacctctggcgatgggcatcccggctcaaaaccccatcctggttaggacagagcagtcgacgttgccgcctcatcaggttgctgctgtttatgcagcagcaacacagcatcagccgcctcaagtgaccacttatgtgcaggagcagcagcagcagcagcctcaaggcacccattacgtaccacaacagcagcctcagtctgctgcttatgtgcagcagatgccgcagtcgtatatagagccgcagcaggtacactacatcaacgcccaacaatttggtgtgcatggggtgccacaatctgtcaactatgtgcctgtgcaaatgagccaattcatgcccaacattcctgtgacgggctctatggcgaccactgctgctcaagtgggaaagttgaagcccgcttccgcaggtgtagaacctgttccagagaccacgcagttcacaaggccagtgcaagctcaggttgatcagagttaccgggtggtgcacactccactgtcacagcttcctcctttgtcttctgtgcatctgcagacaaatgatgcgcagaggcagaaatttggtgcccaacaagcgatgacaagcgcagtaagcatgccagtggtgaccagctcaggcacaattcctgttgtggttagctcggccactgttccatcattgaggtatgatggttgcacaatgtgccaaaaagcattgccacatgcccattcggataatactatccgggagcagggaagttcttgtgcaatgggcaaccttgaggcagctccaatgttttacagcccacatcaaggcaccgcatccaacaaatctaatccaggtgcaagttcaggaacactcacgaactatgtggcagaaccaagagctgggaacacagcagtgatggcacaatttgattcgactcttcctgccagaaaacctgcagtccaggcgactgcatatgcggatacagttgtgccggttcaacccaccattattgctttcccagtgtctagtgcacctgctccaaaaggagtatttgtgggtcattctccttcggctggggctgaagatcatgtcaggtaccagcagcaaccattctcttatagcatgcaaccgccgctagttccagtgaatgtcccacaaggcattggtgccagtgcatacaaagattcaaatcatgcagcagtggaaccgcttagagaatatgcccgtgatcttcctcatgactatgctagagctattgatgctcgtatgcatgcagttcatttgggtcctattgcaccaccagaatctagtgtgcaaggaaatccttctattcctcatgttgtcattgatcatgccaaagttgggaagccacctgtaaataatgatgttacttctttctgcaaatctcaagctggagggtatcatatggggatcacaaatgcctttactgctcctgttttaacccaagaggacaacattgccaggcacagtgagcagccaccttgtgattttgatgttggtgcacaaaatgtccaacctgacataatccagcgaccaccactcaatctgcctgtccagagcaaccttagagttccgattgaaccacctgtttctaatgaaaagttcaccgttcaaccatctaactctggtgctcagcttcctgctgggcctcctctacagcatcctaaggaaatgcccaatcacttggtttgtgctctccccaatcgtagcagtaaatttcaattgcaggctactgttggaattgatcgtgttgaagctacacaagaaccagcatacactgattcacttttctcaaatcaggatccttggaaagcagtgggcaatgcttctttagtgcctccaagaccaagcaagttaactaaggaacctgttgtttctggaggtcaatatgctgatggtcatatgcctgatatgaacacacatgctgccttactctttgaagaagacccaagtttaaaggatatccacacagttaaattgaacaaaggatttgggaaagctaatattaagcgacaattacaagatgttgctgaaggggtagcagcatcagttcttcagccatcctttcctgaaaaaccagctgcattctctggggatcacatcgattcacatggagcagtaattgatgtgaaagttcaggggattcaagttttagatgacatcgataaacttcagataataaagaacagtgaccttgaggaattgcgtgaactgggttctggaaccattggtactgtgtaccatggaaagtggagaggctcagatgttgctataaagagaatcaacgagcgatgttttgctgggaaggcatctgagcaagagcgtatggtatgaaatgttttcttttagattgaatccatcatgtgctatcttttcttttgtatgtagaggactgatttctggaatgaggcagacaagcttgcatctttgcaccatccaaacgtagtagcattgtacggtgttgttctagatggacctggtggatctgttgcaacggtaacggagtacatggctaatggctcactccgacaagcattgcaaagacatgaaaacaggatctttgatcggcgtagacgtctattaattgcaatggatgttgcttttggaatggaatatctccatgggaagaatatagtgcatttcgacttgaacagtgacaatctgcttgtcaacctaaggttggtgatttgggattatcaaaggtcaaatgccagacacttatctctggtggagtgagaggaacactaccttggatggcccctgagttgttgaatggcagcagcagcctcgtctctgaaaaggttgacgttttctcgtttggcatcgtgatgtgggagctactcacgggtgaagagccttacgccgaactgcactacggtgccattataggtgggatcgtgaataacacgctgcgacctccggtgcccgagtcctgtgacccccagtggaggtcactgatggagcagtgctggtcagccgaaccctcggcgaggccgagcttcaccgaggtaggcacgaatctgcgcgccatggcggccgctcctaccaaggcacaacaatcgaaatagacggttttagccttctgcctcctgcgccaccttctttttagcaggctgtttcagtcttcaaaccgaggaggtgccgtccctagcctagcctggctttttttttttgtacatgaataagttgaagaaagataggagaatgtcgtggcatgcttatagagtcgatggatggttgatgcttcctgtcttgcttttggaacgaatcgtggaaatatatagtacaacgtagtgtaaagattgagccgtgagcgtgtagatcaatcggtacgtgagggagttaaaggagtgtttggcgggcgagtgatgctcgtgcgctctcgtccataacggcccggtgttcgtcgtttattcctcggttacgtccgggatatcttttttgggttctttctggcccgtgttgatgtgccattgaatattgcccggtgccatggaaaagcggtgctgttctcagttctcaccaagaggtgcaggagaaaccagagtttaggctgtctccagcaacgttccctaaatttcgtcccctaaaggaatattctctgtactttacagaacactctaaaag

SEQ ID NO: 218694 - DNA, 4788 bp, Zea Mays
gtgaatcctgtcacttttgatcgattttgccagttttcatcgatttacccgtggatagcggtttttttttacccaaaacggtttgataatcgttggtcgagcaacgttcgtgccaatcgaaaccgagatcgccaggcccatgacacagtacgacggtggctgcgcggttggtcagtgagtcacggccaaagcaagcacgcctctcagacacgaaactgcagtgtgtaacttatctcctggaccgcccgaccgccgccaattcagctcggcgattcgtttcggtgccgccgcagtcgagcggagcggagccaacctcctgcagtgccaggcgcgtccggggccgaggggcgacggccaaccgaacgggagagtgtcaagtcaagtgggcggattgcgggaaggaaggaaaacctcccgcgcgactcgcgcctccgccctcctcgtcctcgtcctcgtcctccattccaacccctgcgtttcggattctgttgcgccctctccagagcctcggcgagcggtggaaactctaggtggcggcgacggcgatggcgtcggcgagcaggggcaccggggtggcgccggcgggcgagcccggcagcccgagggcgtggggcggcgaggacgaggcgtgcagggcgaggaaagtgaagctgatgtgcagctacgggggccggatcgcgccgagacccggggacggggcgctgcggtacgtgggcggccagacgcggctcatctccgccccgcgcgccgcctccttcgcggacctgctgcggaaggtggaggcggtggacgaggcctcggcctcctctggcggcggggtggtcctcaggtaccagctccccggggatgacctcgactcgctcatctccgtgtccggcccggaggactacgacaacatgatggaggagtacgagaagctggccgccgcggcgcccgacggctccgccaagctccgggtcttcctcttcccggcctccggggccgacgcggggccccatctcgccgccgtggtggacgagtccgggcagcggtacatcgacgccatcaactgcgtctccacggaggccattgccacggccacggccatgcggcggaaggacggcgtcgccagcgccggctcctccgcgcacaactccgaggcggccgagtacagcggtctagtcgaaagtacgtcgccgcgggcggtgccgccgcctgcttccgttgcgactgagtattcgtattcaggtggagcgcattacctccgtgctttcccggagtcggttgggctcactgcagtctcggcgtcacctctggcgatgggcatcccggctcaaaaccccatcctggttaggacagagcagtcgacgttgccgcctcatcaggttgctgctgtttatgcagcagcaacacagcatcagccgcctcaagtgaccacttatgtgcaggagcagcagcagcagcagcctcaaggcacccattacgtaccacaacagcagcctcagtctgctgcttatgtgcagcagatgccgcagtcgtatatagagccgcagcaggtacactacatcaacgcccaacaatttggtgtgcatggggtgccacaatctgtcaactatgtgcctgtgcaaatgagccaattcatgcccaacattcctgtgacgggctctatggcgaccactgctgctcaagtgggaaagttgaagcccgcttccgcaggtgtagaacctgttccagagaccacgcagttcacaaggccagtgcaagctcaggttgatcagagttaccgggtggtgcacactccactgtcacagcttcctcctttgtcttctgtgcatctgcagacaaatgatgcgcagaggcagaaatttggtgcccaacaagcgatgacaagcgcagtaagcatgccagtggtgaccagctcaggcacaattcctgttgtggttagctcggccactgttccatcattgaggtatgatggttgcacaatgtgccaaaaagcattgccacatgcccattcggataatactatccgggagcagggaagttcttgtgcaatgggcaaccttgaggcagctccaatgttttacagcccacatcaaggcaccgcatccaacaaatctaatccaggtgcaagttcaggaacactcacgaactatgtggcagaaccaagagctgggaacacagcagtgatggcacaatttgattcgactcttcctgccagaaaacctgcagtccaggcgactgcatatgcggatacagttgtgccggttcaacccaccattattgctttcccagtgtctagtgcacctgctccaaaaggagtatttgtgggtcattctccttcggctggggctgaagatcatgtcaggtaccagcagcaaccattctcttatagcatgcaaccgccgctagttccagtgaatgtcccacaaggcattggtgccagtgcatacaaagattcaaatcatgcagcagtggaaccgcttagagaatatgcccgtgatcttcctcatgactatgctagagctattgatgctcgtatgcatgcagttcatttgggtcctattgcaccaccagaatctagtgtgcaaggaaatccttctattcctcatgttgtcattgatcatgccaaagttgggaagccacctgtaaataatgatgttacttctttctgcaaatctcaagctggagggtatcatatggggatcacaaatgcctttactgctcctgttttaacccaagaggacaacattgccaggcacagtgagcagccaccttgtgattttgatgttggtgcacaaaatgtccaacctgacataatccagcgaccaccactcaatctgcctgtccagagcaaccttagagttccgattgaaccacctgtttctaatgaaaagttcaccgttcaaccatctaactctggtgctcagcttcctgctgggcctcctctacagcatcctaaggaaatgcccaatcacttggatccttggaaagcagtgggcaatgcttctttagtgcctccaagaccaagcaagttaactaaggaacctgttgtttctggaggtcaatatgctgatggtcatatgcctgatatgaacacacatgctgccttactctttgaagaagacccaagtttaaaggatatccacacagttaaattgaacaaaggatttgggaaagctaatattaagcgacaattacaagatgttgctgaaggggtagcagcatcagttcttcagccatcctttcctgaaaaaccagctgcattctctggggatcacatcgattcacatggagcagtaattgatgtgaaagttcagggtgaagggaataatcagtcagacaaaacaagccaggggattcaagttttagatgacatcgataaacttcagataataaagaacagtgaccttgaggaattgcgtgaactgggttctggaaccattggtactgtgtaccatggaaagtggagaggctcagatgttgctataaagagaatcaacgagcgatgttttgctgggaaggcatctgagcaagagcgtatgaggactgatttctggaatgaggcagacaagcttgcatctttgcaccatccaaacgtagtagcattgtacggtgttgttctagatggacctggtggatctgttgcaacggtaacggagtacatggctaatggctcactccgacaagcattgcaaagacatgaaaacaggatctttgatcggcgtagacgtctattaattgcaatggatgttgcttttggaatggaatatctccatgggaagaatatagtgcatttcgacttgaacagtgacaatctgcttgtcaacctaaggtatcctcaacgaccaatatgcaaggttggtgatttgggattatcaaaggtcaaatgccagacacttatctctggtggagtgagaggaacactaccttggatggcccctgagttgttgaatggcagcagcagcctcgtctctgaaaaggttgacgttttctcgtttggcatcgtgatgtgggagctactcacgggtgaagagccttacgccgaactgcactacggtgccattataggtgggatcgtgaataacacgctgcgacctccggtgcccgagtcctgtgacccccagtggaggtcactgatggagcagtgctggtcagccgaaccctcggcgaggccgagcttcaccgaggtaggcacgaatctgcgcgccatggcggccgctcctaccaaggcacaacaatcgaaatagacggttttagccttctgcctcctgcgccaccttctttttagcaggctgtttcagtcttcaaaccgaggaggtgccgtccctagcctagcctggctttttttttttgtacatgaataagttgaagaaagataggagaatgtcgtggcatgcttatagagtcgatggatggttgatgcttcctgtcttgcttttggaacgaatcgtggaaatatatagtacaacgtagtgtaaagattgagccgtgagcgtgtagatcaatcggtacgtgagggagttaaaggagtgtttggcgggcgagtgatgctcgtgcgctctcgtccataacggcccggtgttcgtcgtttattcctcggttacgtccgggatatcttttttgggttctttctggcccgtgttgatgtgccattgaatattgcccggtgccatggaaaagcggtgctgttctcagttctcaccaagaggtgcaggagaaaccagagtttaggctgtctccagcaacgttccctaaatttcgtcccctaaaggaatattctctgtactttacagaacactctaaaag

SEQ ID NO: 218695 - DNA, 4826 bp, Zea Mays
gttgtaatgtatgctgcatgttattttagtgaacataagttgtatgaatcgagcaaattataagtgaatcctgtcacttttgatcgattttgccagttttcatcgatttacccgtggatagcggtttttttttacccaaaacggtttgataatcgttggtcgagcaacgttcgtgccaatcgaaaccgagatcgccaggcccatgacacagtacgacggtggctgcgcggttggtcagtgagtcacggccaaagcaagcacgcctctcagacacgaaactgcagtgtgtaacttatctcctggaccgcccgaccgccgccaattcagctcggcgattcgtttcggtgccgccgcagtcgagcggagcggagccaacctcctgcagtgccaggcgcgtccggggccgaggggcgacggccaaccgaacgggagagtgtcaagtcaagtgggcggattgcgggaaggaaggaaaacctcccgcgcgactcgcgcctccgccctcctcgtcctcgtcctcgtcctccattccaacccctgcgtttcggattctgttgcgccctctccagagcctcggcgagcggtggaaactctaggtggcggcgacggcgatggcgtcggcgagcaggggcaccggggtggcgccggcgggcgagcccggcagcccgagggcgtggggcggcgaggacgaggcgtgcagggcgaggaaagtgaagctgatgtgcagctacgggggccggatcgcgccgagacccggggacggggcgctgcggtacgtgggcggccagacgcggctcatctccgccccgcgcgccgcctccttcgcggacctgctgcggaaggtggaggcggtggacgaggcctcggcctcctctggcggcggggtggtcctcaggtaccagctccccggggatgacctcgactcgctcatctccgtgtccggcccggaggactacgacaacatgatggaggagtacgagaagctggccgccgcggcgcccgacggctccgccaagctccgggtcttcctcttcccggcctccggggccgacgcggggccccatctcgccgccgtggtggacgagtccgggcagcggtacatcgacgccatcaactgcgtctccacggaggccattgccacggccacggccatgcggcggaaggacggcgtcgccagcgccggctcctccgcgcacaactccgaggcggccgagtacagcggtctagtcgaaagtacgtcgccgcgggcggtgccgccgcctgcttccgttgcgactgagtattcgtattcaggtggagcgcattacctccgtgctttcccggagtcggttgggctcactgcagtctcggcgtcacctctggcgatgggcatcccggctcaaaaccccatcctggttaggacagagcagtcgacgttgccgcctcatcaggttgctgctgtttatgcagcagcaacacagcatcagccgcctcaagtgaccacttatgtgcaggagcagcagcagcagcagcctcaaggcacccattacgtaccacaacagcagcctcagtctgctgcttatgtgcagcagatgccgcagtcgtatatagagccgcagcaggtacactacatcaacgcccaacaatttggtgtgcatggggtgccacaatctgtcaactatgtgcctgtgcaaatgagccaattcatgcccaacattcctgtgacgggctctatggcgaccactgctgctcaagtgggaaagttgaagcccgcttccgcaggtgtagaacctgttccagagaccacgcagttcacaaggccagtgcaagctcaggttgatcagagttaccgggtggtgcacactccactgtcacagcttcctcctttgtcttctgtgcatctgcagacaaatgatgcgcagaggcagaaatttggtgcccaacaagcgatgacaagcgcagtaagcatgccagtggtgaccagctcaggcacaattcctgttgtggttagctcggccactgttccatcattgaggtatgatggttgcacaatgtgccaaaaagcattgccacatgcccattcggataatactatccgggagcagggaagttcttgtgcaatgggcaaccttgaggcagctccaatgttttacagcccacatcaaggcaccgcatccaacaaatctaatccaggtgcaagttcaggaacactcacgaactatgtggcagaaccaagagctgggaacacagcagtgatggcacaatttgattcgactcttcctgccagaaaacctgcagtccaggcgactgcatatgcggatacagttgtgccggttcaacccaccattattgctttcccagtgtctagtgcacctgctccaaaaggagtatttgtgggtcattctccttcggctggggctgaagatcatgtcaggtaccagcagcaaccattctcttatagcatgcaaccgccgctagttccagtgaatgtcccacaaggcattggtgccagtgcatacaaagattcaaatcatgcagcagtggaaccgcttagagaatatgcccgtgatcttcctcatgactatgctagagctattgatgctcgtatgcatgcagttcatttgggtcctattgcaccaccagaatctagtgtgcaaggaaatccttctattcctcatgttgtcattgatcatgccaaagttgggaagccacctgtaaataatgatgttacttctttctgcaaatctcaagctggagggtatcatatggggatcacaaatgcctttactgctcctgttttaacccaagaggacaacattgccaggcacagtgagcagccaccttgtgattttgatgttggtgcacaaaatgtccaacctgacataatccagcgaccaccactcaatctgcctgtccagagcaaccttagagttccgattgaaccacctgtttctaatgaaaagttcaccgttcaaccatctaactctggtgctcagcttcctgctgggcctcctctacagcatcctaaggaaatgcccaatcacttggatccttggaaagcagtgggcaatgcttctttagtgcctccaagaccaagcaagttaactaaggaacctgttgtttctggaggtcaatatgctgatggtcatatgcctgatatgaacacacatgctgccttactctttgaagaagacccaagtttaaaggatatccacacagttaaattgaacaaaggatttgggaaagctaatattaagcgacaattacaagatgttgctgaaggggtagcagcatcagttcttcagccatcctttcctgaaaaaccagctgcattctctggggatcacatcgattcacatggagcagtaattgatgtgaaagttcagggtgaagggaataatcagtcagacaaaacaagccaggggattcaagttttagatgacatcgataaacttcagataataaagaacagtgaccttgaggaattgcgtgaactgggttctggaaccattggtactgtgtaccatggaaagtggagaggctcagatgttgctataaagagaatcaacgagcgatgttttgctgggaaggcatctgagcaagagcgtatgaggactgatttctggaatgaggcagacaagcttgcatctttgcaccatccaaacgtagtagcattgtacggtgttgttctagatggacctggtggatctgttgcaacggtaacggagtacatggctaatggctcactccgacaagcattgcaaagacatgaaaacaggatctttgatcggcgtagacgtctattaattgcaatggatgttgcttttggaatggaatatctccatgggaagaatatagtgcatttcgacttgaacagtgacaatctgcttgtcaacctaaggttggtgatttgggattatcaaaggtcaaatgccagacacttatctctggtggagtgagaggaacactaccttggatggcccctgagttgttgaatggcagcagcagcctcgtctctgaaaaggttgacgttttctcgtttggcatcgtgatgtgggagctactcacgggtgaagagccttacgccgaactgcactacggtgccattataggtgggatcgtgaataacacgctgcgacctccggtgcccgagtcctgtgacccccagtggaggtcactgatggagcagtgctggtcagccgaaccctcggcgaggccgagcttcaccgaggtaggcacgaatctgcgcgccatggcggccgctcctaccaaggcacaacaatcgaaatagacggttttagccttctgcctcctgcgccaccttctttttagcaggctgtttcagtcttcaaaccgaggaggtgccgtccctagcctagcctggctttttttttttgtacatgaataagttgaagaaagataggagaatgtcgtggcatgcttatagagtcgatggatggttgatgcttcctgtcttgcttttggaacgaatcgtggaaatatatagtacaacgtagtgtaaagattgagccgtgagcgtgtagatcaatcggtacgtgagggagttaaaggagtgtttggcgggcgagtgatgctcgtgcgctctcgtccataacggcccggtgttcgtcgtttattcctcggttacgtccgggatatcttttttgggttctttctggcccgtgttgatgtgccattgaatattgcccggtgccatggaaaagcggtgctgttctcagttctcaccaagaggtgcaggagaaaccagagtttaggctgtctccagcaacgttccctaaatttcgtcccctaaaggaatattctctgtactttacagaacactctaaaag

SEQ ID NO: 218696 - DNA, 2407 bp, Zea Mays
ccggacctccctggttgcgggttgcggcgcctgcctcctccgcccatgcgacgcgcgcccgcgcaaactacccgccttcgcagtcgtccgcgcgggaaacgtgaagctaatccaactccaacatttcctcccgatgcgctgtgctgtgctgtactccttcgcagggagctctcgaaacccaaaccctagctctgacccaccgcgattccccatttgatttctcgtacccatgggtggatccgctgatcccgaggcgccgtcgccgtctccgacgaagccatcgccctcgtcggctgacgggaagccgccgaggcggtgcgtgcagtcgaaactctcgtgggggcttgtcaaaccagccggcggcggccgcgaaggtggaggaaaaggaggcggcggtgaagcaggaagaggagatgccgaggctgttcctcctgtgcctgcggccggggaggcggcggcgacggaagttagagaggggctggagaaggggaagaagaagagaaagccgcggaaatcagaggatggcaagaagggctcttcaagcaaacagaaacaatggcaggatcaatcgaacaaagatggagtcattttggttgatgaaagccctcagaaaaagcaacgtaaaggtagaaagcaagatgcaatactgaaggagcctaatgctagcagaaagcgttgcaagacatcggaagctcctgatggtcctggaagctgtcagcaattgcatatcagccagattgaagccagctcgcctgcagcagcgccagtaataattgacgttgatttgatgagtacgccttctaaagcaggacatgctaattcaatcgatcaggatatatcaccgttgaaagttgacctaaggtcagaggcgaagatagctgcagaggaaattcgaaggttatcatctggaaagaaaattcaccctttctttcattctcggaaattgaacaaatgtgctagccaagatcaagatgtcatcaatattgaaaacatgcatgggctttgtgattctgaaagggatccaccattttatcctattcatgttgtgtaccaatcagaggccagcatgccaatccactggagtaattggataatcactgatatgtcatcatttgacactgatactgccgttcctcttaaaaaatctgtgtcatactttgagggcttggttaagccactgacaatagaaactaattgcaagaggcattctaatcaattgtcagatccgattcttgctgagtgtacaacttcaggaatgccttttccaagtttttctggcaagcaaagtgaacacagctgtttttcagatgcgatcaacgtggacacacagaacttgttgaggcctggtgctagttgccaagcttctcttcttgatctgaatgtagagccagaagatccacagaatggttgtcagcctgcctgttacctatggactgacaagtaccgacctgaaactgtggcccaggtatgtggaaatagtgagcacgtaaagtttcttgctgaatggcttaaaagctgggatgaaaaaggccacaagattggagttgctaacggggacactaatgataactcatatcaagatatatctgattcagattattcagagagtgcttctgattgtgaaaatacacttctaatcactggacctgttgggtgtggaaaatcagctgcagtttttgcatgcgccagagaacaaggcttcaatgtgatagaggtaaatacatctgacatgagaaatggagcttatgtaaggcagaagtttgaggaagcaactaaatcacatggccttgaaaaatggtcacaggaggaggttatcaatccactaagggatgattccttggatccagattcaggaactcctgataggactgaataccaatgtttgatgtcctgtgctacaagagtaatgattgactgtgatcaacagaaatcacctgtaggatactactcaggtttgaaggcctgtgatgaacctcctaaacaagttgctaacaagacactcatactatttgaggatgtggatactgtctttgatgaggatcgtgggtttatttcaactattcttaagatggcagagactacaaaatggccaatcatactaactagcaacaagaaggatccgtctttgccgaatctcttggatcaacttgttttggatttcaaatacccatcgacctcagagctactttcacacgttgccatgatttgtaaatctgagggagtgaatgtcactgttcctcagttaaaacatgtaattgatgtttgtctaggtgacattaggagggtggtgatgtttttgcagttttggtaccaagggcatcaattcacagacctttcagcatgtaaaacttactatgatggtacatgatgaagtggaagatgctggttgtttatgggtattgtgctc

SEQ ID NO: 218697 - DNA, 4199 bp, Zea Mays
gttgcgggttgcggcgcctgcctcctccgcccatgcgacgcgcgcccgcgcaaactacccgccttcgcagtcgtccgcgcgggaaacgtgaagctaatccaactccaacatttcctcccgatgcgctgtgctgtgctgtactccttcgcagggagctctcgaaacccaaaccctagctctgacccaccgcgattccccatttgatttctcgtacccatgggtggatccgctgatcccgaggcgccgtcgccgtctccgacgaagccatcgccctcgtcggctgacgggaagccgccgaggcggtgcgtgcagtcgaaactctcgtgggggcttgtcaaaccagccggcggcggccgcgaaggtggaggaaaaggaggcggcggtgaagcaggaagaggagatgccgaggctgttcctcctgtgcctgcggccggggaggcggcggcgacggaagttagagaggggctggagaaggggaagaagaagagaaagccgcggaaatcagaggatggcaagaagggctcttcaagcaaacagaaacaatggcaggatcaatcgaacaaagatggagtcattttggttgatgaaagccctcagaaaaagcaacgtaaaggtagaaagcaagatgcaatactgaaggagcctaatgctagcagaaagcgttgcaagacatcggaagctcctgatggtcctggaagctgtcagcaattgcatatcagccagattgaagccagctcgcctgcagcagcgccagtaataattgacgttgatttgatgagtacgccttctaaagcaggacatgctaattcaatcgatcaggatatatcaccgttgaaagttgacctaaggtcagaggcgaagatagctgcagaggaaattcgaaggttatcatctggaaagaaaattcaccctttctttcattctcggaaattgaacaaatgtgctagccaagatcaagatgtcatcaatattgaaaacatgcatgggctttgtgattctgaaagggatccaccattttatcctattcatgttgtgtaccaatcagaggccagcatgccaatccactggagtaattggataatcactgatatgtcatcatttgacactgatactgccgttcctcttaaaaaatctgtgtcatactttgagggcttggttaagccactgacaatagaaactaattgcaagaggcattctaatcaattgtcagatccgattcttgctgagtgtacaacttcaggaatgccttttccaagtttttctggcaagcaaagtgaacacagctgtttttcagatgcgatcaacgtggacacacagaacttgttgaggcctggtgctagttgccaagcttctcttcttgatctgaatgtagagccagaagatccacagaatggttgtcagcctgcctgttacctatggactgacaagtaccgacctgaaactgtggcccaggtatgtggaaatagtgagcacgtaaagtttcttgctgaatggcttaaaagctgggatgaaaaaggccacaagattggagttgctaacggggacactaatgataactcatatcaagatatatctgattcagattattcagagagtgcttctgattgtgaaaatacacttctaatcactggacctgttgggtgtggaaaatcagctgcagtttttgcatgcgccagagaacaaggcttcaatgtgatagaggtaaatacatctgacatgagaaatggagcttatgtaaggcagaagtttgaggaagcaactaaatcacatggccttgaaaaatggtcacaggaggaggttatcaatccactaagggatgattccttggatccagattcaggaactcctgataggactgaataccaatgtttgatgtcctgtgctacaagagtaatgattgactgtgatcaacagaaatcacctgtaggatactactcaggtttgaaggcctgtgatgaacctcctaaacaagttgctaacaagacactcatactatttgaggatgtggatactgtctttgatgaggatcgtgggtttatttcaactattcttaagatggcagagactacaaaatggccaatcatactaactagcaacaagaaggatccgtctttgccgaatctcttggatcaacttgttttggatttcaaatacccatcgacctcagagctactttcacacgttgccatgatttgtaaatctgagggagtgaatgtcactgttcctcagttaaaacatgtaattgatgtttgtctaggtgacattaggagggtggtgatgtttttgcagttttggtaccaagggcatcaattcacagagaggccaaaggaatgtttgtgtggtcctttctcacttgatttagatgcagtacattctacagtgccaaaaatgttgccatgggagttcccttgtaagttatctgaaacattatgcatggaggtagacaaaactatccttttggctgaagaaaagaaaaaacagatggaaatatcagatcttgaaggcctgcagttacatgtaacagcacctttgatcaagggaagaacttctaaaacaagaagggctaagaaatccaaattaaagcgtgctcactcgactgagcataatgatatttcaccttctgatgtaggtactgaaaaacataacatatttactgttactgaagttggtttcttcccacaaccttcagaggtgcctcctatgcatgggcaagggatttctgatcagttccattttcccgttgaatcacgagagacatgtgaaattgctgattctttccaaaatccacctgaaagcaacatgtatgggtccatttcacaagtttgtgatacatttatgtcacaggacgtgtcatgtgtacccgagtcatccttaattttggacggcacatctgcatccataagtggtgatgaatttttgtcaagggcagtgtccaatggtttttctgccttttgtgagggtacatacactacctccagaatggtattagaagacagtgactgtgtgaagaatctaatggctgaacgacaaaaagatgttgaagatgtagttggtgagacaagtgagacttatatggaatcatttcggagaaatgaacaggcaagctgttcagctgctgggtttcaattaatggatgaatgtagtcgtgctgaaagcatctggctgctctctggcaaaaaatctaatgactcttgcaaggtggaactagtacaggacacttggaacaggctacggagttgtcgtcttgaatttaccagtgaggctaatcacaacagagcaacttctggagctttgaagcttgtctcagaagtgtctgatttaatatcagaatcagatcttatgcttttccgttgctaccctcttactaaggatacgttggatccgtctttaactccttgtgatgagccagttgattcttcttggtacagcaatcaggttgagatgggatctgtatatgcccagcatgctcttcgtattttatcgaggaattcccaaaaaatagatggtggttctgtcgatttgtcacaagagttgtttgccagtacagctgctgtatcctttggtaaaattacctgttcaggattcaggaatgattatggatctacggacctttctcatatgaaaaatccaactacctgtatttttaaaagaagggagcggcatgttcatctttgtgaaaccctgtctccagtggttcctccaaagttgttgcagtcattgagaggccctgcttttgttgattatttgtcttcaatcagccagatttccaaattagaaaacttgcgactctctgaaaataaagtcataaacaagcgaagaaggtcccgtcaggcaagacattacttgagttctggcgcacttcaactttcacatgaggatgttgtattattagaagaaagcggctgtttcagtagcagacgcgagagggttgaggttgtagagcaagcaccagtcagtacataagttaatgaactggtgctgatcatgagcggcagcattttgattttttttattagaaggcaatgtgactgggttggccgagccatttttatagttgcgtccgtgatcacggagcccggcggtggaggaaccggaatgtgtgcagttgattgctgtatctgttagataactagacattttaaagtttatttaaattttaaaattatttatagcaatcatgaatatggattaatcttagt

SEQ ID NO: 218698 - DNA, 4298 bp, Zea Mays
gcgcctgcctcctccgcccatgcgacgcgcgcccgcgcaaactacccgccttcgcagtcgtccgcgcgggaaacgtgaagctaatccaactccaacatttcctcccgatgcgctgtgctgtgctgtactccttcgcagggagctctcgaaacccaaaccctagctctgacccaccgcgattccccatttgatttctcgtacccatgggtggatccgctgatcccgaggcgccgtcgccgtctccgacgaagccatcgccctcgtcggctgacgggaagccgccgaggcggtgcgtgcagtcgaaactctcgtgggggcttgtcaaaccagccggcggcggccgcgaaggtggaggaaaaggaggcggcggtgaagcaggaagaggagatgccgaggctgttcctcctgtgcctgcggccggggaggcggcggcgacggaagttagagaggggctggagaaggggaagaagaagagaaagccgcggaaatcagaggatggcaagaagggctcttcaagcaaacagaaacaatggcaggatcaatcgaacaaagatggagtcattttggttgatgaaagccctcagaaaaagcaacgtaaaggtagaaagcaagatgcaatactgaaggagcctaatgctagcagaaagcgttgcaagacatcggaagctcctgatggtcctggaagctgtcagcaattgcatatcagccagattgaagccagctcgcctgcagcagcgccagtaataattgacgttgatttgatgagtacgccttctaaagcaggacatgctaattcaatcgatcaggatatatcaccgttgaaagttgacctaaggtcagaggcgaagatagctgcagaggaaattcgaaggttatcatctggaaagaaaattcaccctttctttcattctcggaaattgaacaaatgtgctagccaagatcaagatgtcatcaatattgaaaacatgcatgggctttgtgattctgaaagggatccaccattttatcctattcatgttgtgtaccaatcagaggccagcatgccaatccactggagtaattggataatcactgatatgtcatcatttgacactgatactgccgttcctcttaaaaaatctgtgtcatactttgagggcttggttaagccactgacaatagaaactaattgcaagaggcattctaatcaattgtcagatccgattcttgctgagtgtacaacttcaggaatgccttttccaagtttttctggcaagcaaagtgaacacagctgtttttcagatgcgatcaacgtggacacacagaacttgttgaggcctggtgctagttgccaagcttctcttcttgatctgaatgtagagccagaagatccacagaatggttgtcagcctgcctgttacctatggactgacaagtaccgacctgaaactgtggcccaggtatgtggaaatagtgagcacgtaaagtttcttgctgaatggcttaaaagctgggatgaaaaaggccacaagattggagttgctaacggggacactaatgataactcatatcaagatatatctgattcagattattcagagagtgcttctgattgtgaaaatacacttctaatcactggacctgttgggtgtggaaaatcagctgcagtttttgcatgcgccagagaacaaggcttcaatgtgatagaggtaaatacatctgacatgagaaatggagcttatgtaaggcagaagtttgaggaagcaactaaatcacatggccttgaaaaatggtcacaggaggaggttatcaatccactaagggatgattccttggatccagattcaggaactcctgataggactgaataccaatgtttgatgtcctgtgctacaagagtaatgattgactgtgatcaacagaaatcacctgtaggatactactcaggtttgaaggcctgtgatgaacctcctaaacaagttgctaacaagacactcatactatttgaggatgtggatactgtctttgatgaggatcgtgggtttatttcaactattcttaagatggcagagactacaaaatggccaatcatactaactagcaacagatccgtctttgccgaatctcttggatcaacttgttttggatttcaaatacccatcgacctcagagctactttcacacgttgccatgatttgtaaatctgagggagtgaatgtcactgttcctcagttaaaacatgtaattgatgtttgtctaggtgacattaggagggtggtgatgtttttgcagttttggtaccaagggcatcaattcacagagaggccaaaggaatgtttgtgtggtcctttctcacttgatttagatgcagtacattctacagtgccaaaaatgttgccatgggagttcccttgtaagttatctgaaacattatgcatggaggtagacaaaactatccttttggctgaagaaaagaaaaaacagatggaaatatcagatcttgaaggcctgcagttacatgtaacagcacctttgatcaagggaagaacttctaaaacaagaagggctaagaaatccaaattaaagcgtgctcactcgactgagcataatgatatttcaccttgtaagaatgaacttgatgatttccatgatcttccagatatatctcttccatctgataaacaaataaaaagaaatcggcatcgttcgctgctattatctgagtccgatgatgatccagctgatgtaggtactgaaaaacataacatatttactgttactgaagttggtttcttcccacaaccttcagaggtgcctcctatgcatgggcaagggatttctgatcagttccattttcccgttgaatcacgagagacatgtgaaattgctgattctttccaaaatccacctgaaagcaacatgtatgggtccatttcacaagtttgtgatacatttatgtcacaggacgtgtcatgtgtacccgagtcatccttaattttggacggcacatctgcatccataagtggtgatgaatttttgtcaagggcagtgtccaatggtttttctgccttttgtgagggtacatacactacctccagaatggtattagaagacagtgactgtgtgaagaatctaatggctgaacgacaaaaagatgttgaagatgtagttggtgagacaagtgagacttatatggaatcatttcggagaaatgaacaggcaagctgttcagctgctgggtttcaattaatggatgaatgtagtcgtgctgaaagcatctggctgctctctggcaaaaaatctaatgactcttgcaaggtggaactagtacaggacacttggaacaggctacggagttgtcgtcttgaatttaccagtgaggctaatcacaacagagcaacttctggagctttgaagcttgtctcagaagtgtctgatttaatatcagaatcagatcttatgcttttccgttgctaccctcttactaaggatacgttggatccgtctttaactccttgtgatgagccagttgattcttcttggtacagcaatcaggttgagatgggatctgtatatgcccagcatgctcttcgtattttatcgaggaattcccaaaaaatagatggtggttctgtcgatttgtcacaagagttgtttgccagtacagctgctgtatcctttggtaaaattacctgttcaggattcaggaatgattatggatctacggacctttctcatatgaaaaatccaactacctgtatttttaaaagaagggagcggcatgttcatctttgtgaaaccctgtctccagtggttcctccaaagttgttgcagtcattgagaggccctgcttttgttgattatttgtcttcaatcagccagatttccaaattagaaaacttgcgactctctgaaaataaagtcataaacaagcgaagaaggtcccgtcaggcaagacattacttgagttctggcgcacttcaactttcacatgaggatgttgtattattagaagaaagcggctgtttcagtagcagacgcgagagggttgaggttgtagagcaagcaccagtcagtacataagttaatgaactggtgctgatcatgagcggcagcattttgattttttttattagaaggcaatgtgactgggttggccgagccatttttatagttgcgtccgtgatcacggagcccggcggtggaggaaccggaatgtgtgcagttgattgctgtatctgttagataactagacattttaaagtttatttaaattttaaaattatttatagcaatcatgaatatggattaatcttagt

SEQ ID NO: 218699 - DNA, 1956 bp, Zea Mays
atgggtggcctggttgaagtcaggtgccggtgcagggacctggtgatgaggcaagtgacgccatggcctcctgaagtgtccggctcttcaagcaaacagaaacaatggcaggatcaatcgaacaaagatggagtcattttggttgatgaaagccctcagaaaaagcaacgtaaaggtagaaagcaagatgcaatactgaaggagcctaatgctagcagaaagcgttgcaagacatcggaagctcctgatggtcctggaagctgtcagcaattgcatatcagccagattgaagccagctcgcctgcagcagcgccagtaataattgacgttgatttgatgagtacgccttctaaagcaggacatgctaattcaatcgatcaggatatatcaccgttgaaagttgacctaaggtcagaggcgaagatagctgcagaggaaattcgaaggttatcatctggaaagaaaattcaccctttctttcattctcggaaattgaacaaatgtgctagccaagatcaagatgtcatcaatattgaaaacatgcatgggctttgtgattctgaaagggatccaccattttatcctattcatgttgtgtaccaatcagaggccagcatgccaatccactggagtaattggataatcactgatatgtcatcatttgacactgatactgccgttcctcttaaaaaatctgtgtcatactttgagggcttggttaagccactgacaatagaaactaattgcaagaggcattctaatcaattgtcagatccgattcttgctgagtgtacaacttcaggaatgccttttccaagtttttctggcaagcaaagtgaacacagctgtttttcagatgcgatcaacgtggacacacagaacttgttgaggcctggtgctagttgccaagcttctcttcttgatctgaatgtagagccagaagatccacagaatggttgtcagcctgcctgttacctatggactgacaagtaccgacctgaaactgtggcccaggtatgtggaaatagtgagcacgtaaagtttcttgctgaatggcttaaaagctgggatgaaaaaggccacaagattggagttgctaacggggacactaatgataactcatatcaagatatatctgattcagattattcagagagtgcttctgattgtgaaaatacacttctaatcactggacctgttgggtgtggaaaatcagctgcagtttttgcatgcgccagagaacaaggcttcaatgtgatagaggtaaatacatctgacatgagaaatggagcttatgtaaggcagaagtttgaggaagcaactaaatcacatggccttgaaaaatggtcacaggaggaggttatcaatccactaagggatgattccttggatccagattcaggaactcctgataggactgaataccaatgtttgatgtcctgtgctacaagagtaatgattgactgtgatcaacagaaatcacctgtaggatactactcaggtttgaaggcctgtgatgaacctcctaaacaagttgctaacaagacactcatactatttgaggatgtggatactgtctttgatgaggatcgtgggtttatttcaactattcttaagatggcagagactacaaaatggccaatcatactaactagcaacaagaaggatccgtctttgccgaatctcttggatcaacttgttttggatttcaaatacccatcgacctcagagctactttcacacgttgccatgatttgtaaatctgagggagtgaatgtcactgttcctcagttaaaacatgtaattgatgtttgtctaggtgacattaggagggtggtgatgtttttgcagttttggtaccaagggcatcaattcacagacctttcagcatgtaaaacttactatgatggtacatgatgaagtggaagatgctggttgtttatgggtattgtgctc

SEQ ID NO: 218700 - DNA, 3761 bp, Zea Mays
atgggtggcctggttgaagtcaggtgccggtgcagggacctggtgatgaggcaagtgacgccatggcctcctgaagtgtccggctcttcaagcaaacagaaacaatggcaggatcaatcgaacaaagatggagtcattttggttgatgaaagccctcagaaaaagcaacgtaaaggtagaaagcaagatgcaatactgaaggagcctaatgctagcagaaagcgttgcaagacatcggaagctcctgatggtcctggaagctgtcagcaattgcatatcagccagattgaagccagctcgcctgcagcagcgccagtaataattgacgttgatttgatgagtacgccttctaaagcaggacatgctaattcaatcgatcaggatatatcaccgttgaaagttgacctaaggtcagaggcgaagatagctgcagaggaaattcgaaggttatcatctggaaagaaaattcaccctttctttcattctcggaaattgaacaaatgtgctagccaagatcaagatgtcatcaatattgaaaacatgcatgggctttgtgattctgaaagggatccaccattttatcctattcatgttgtgtaccaatcagaggccagcatgccaatccactggagtaattggataatcactgatatgtcatcatttgacactgatactgccgttcctcttaaaaaatctgtgtcatactttgagggcttggttaagccactgacaatagaaactaattgcaagaggcattctaatcaattgtcagatccgattcttgctgagtgtacaacttcaggaatgccttttccaagtttttctggcaagcaaagtgaacacagctgtttttcagatgcgatcaacgtggacacacagaacttgttgaggcctggtgctagttgccaagcttctcttcttgatctgaatgtagagccagaagatccacagaatggttgtcagcctgcctgttacctatggactgacaagtaccgacctgaaactgtggcccaggtatgtggaaatagtgagcacgtaaagtttcttgctgaatggcttaaaagctgggatgaaaaaggccacaagattggagttgctaacggggacactaatgataactcatatcaagatatatctgattcagattattcagagagtgcttctgattgtgaaaatacacttctaatcactggacctgttgggtgtggaaaatcagctgcagtttttgcatgcgccagagaacaaggcttcaatgtgatagaggtaaatacatctgacatgagaaatggagcttatgtaaggcagaagtttgaggaagcaactaaatcacatggccttgaaaaatggtcacaggaggaggttatcaatccactaagggatgattccttggatccagattcaggaactcctgataggactgaataccaatgtttgatgtcctgtgctacaagagtaatgattgactgtgatcaacagaaatcacctgtaggatactactcaggtttgaaggcctgtgatgaacctcctaaacaagttgctaacaagacactcatactatttgaggatgtggatactgtctttgatgaggatcgtgggtttatttcaactattcttaagatggcagagactacaaaatggccaatcatactaactagcaacaagaaggatccgtctttgccgaatctcttggatcaacttgttttggatttcaaatacccatcgacctcagagctactttcacacgttgccatgatttgtaaatctgagggagtgaatgtcactgttcctcagttaaaacatgtaattgatgtttgtctaggtgacattaggagggtggtgatgtttttgcagttttggtaccaagggcatcaattcacagagaggccaaaggaatgtttgtgtggtcctttctcacttgatttagatgcagtacattctacagtgccaaaaatgttgccatgggagttcccttgtaagttatctgaaacattatgcatggaggtagacaaaactatccttttggctgaagaaaagaaaaaacagatggaaatatcagatcttgaaggcctgcagttacatgtaacagcacctttgatcaagggaagaacttctaaaacaagaagggctaagaaatccaaattaaagcgtgctcactcgactgagcataatgatatttcaccttctgatgtaggtactgaaaaacataacatatttactgttactgaagttggtttcttcccacaaccttcagaggtgcctcctatgcatgggcaagggatttctgatcagttccattttcccgttgaatcacgagagacatgtgaaattgctgattctttccaaaatccacctgaaagcaacatgtatgggtccatttcacaagtttgtgatacatttatgtcacaggacgtgtcatgtgtacccgagtcatccttaattttggacggcacatctgcatccataagtggtgatgaatttttgtcaagggcagtgtccaatggtttttctgccttttgtgagggtacatacactacctccagaatggtattagaagacagtgactgtgtgaagaatctaatggctgaacgacaaaaagatgttgaagatgtagttggtgagacaagtgagacttatatggaatcatttcggagaaatgaacaggcaagctgttcagctgctgggtttcaattaatggatgaatgtagtcgtgctgaaagcatctggctgctctctggcaaaaaatctaatgactcttgcaaggtggaactagtacaggacacttggaacaggctacggagttgtcgtcttgaatttaccagtgaggctaatcacaacagagcaacttctggagctttgaagcttgtctcagaagtgtctgatttaatatcagaatcagatcttatgcttttccgttgctaccctcttactaaggatacgttggatccgtctttaactccttgtgatgagccagttgattcttcttggtacagcaatcaggttgagatgggatctgtatatgcccagcatgctcttcgtattttatcgaggaattcccaaaaaatagatggtggttctgtcgatttgtcacaagagttgtttgccagtacagctgctgtatcctttggtaaaattacctgttcaggattcaggaatgattatggatctacggacctttctcatatgaaaaatccaactacctgtatttttaaaagaagggagcggcatgttcatctttgtgaaaccctgtctccagtggttcctccaaagttgttgcagtcattgagaggccctgcttttgttgattatttgtcttcaatcagccagatttccaaattagaaaacttgcgactctctgaaaataaagtcataaacaagcgaagaaggtcccgtcaggcaagacattacttgagttctggcgcacttcaactttcacatgaggatgttgtattattagaagaaagcggctgtttcagtagcagacgcgagagggttgaggttgtagagcaagcaccagtcagtacataagttaatgaactggtgctgatcatgagcggcagcattttgattttttttattagaaggcaatgtgactgggttggccgagccatttttatagttgcgtccgtgatcacggagcccggcggtggaggaaccggaatgtgtgcagttgattgctgtatctgttagataactagacattttaaagtttatttaaattttaaaattatttatagcaatcatgaatatggattaatcttagt

SEQ ID NO: 218701 - DNA, 3575 bp, Zea Mays
atgggtggcctggttgaagtcaggtgccggtgcagggacctggtgatgaggcaagtgacgccatggcctcctgaagtgtccggctcttcaagcaaacagaaacaatggcaggatcaatcgaacaaagatggagtcattttggttgatgaaagccctcagaaaaagcaacgtaaaggtagaaagcaagatgcaatactgaaggagcctaatgctagcagaaagcgttgcaagacatcggaagctcctgatggtcctggaagctgtcagcaattgcatatcagccagattgaagccagctcgcctgcagcagcgccagtaataattgacgttgatttgatgagtacgccttctaaagcaggacatgctaattcaatcgatcaggatatatcaccgttgaaagttgacctaaggtcagaggcgaagatagctgcagaggaaattcgaaggttatcatctggaaagaaaattcaccctttctttcattctcggaaattgaacaaatgtgctagccaagatcaagatgtcatcaatattgaaaacatgcatgggctttgtgattctgaaagggatccaccattttatcctattcatgttgtgtaccaatcagagatcaacgtggacacacagaacttgttgaggcctggtgctagttgccaagcttctcttcttgatctgaatgtagagccagaagatccacagaatggttgtcagcctgcctgttacctatggactgacaagtaccgacctgaaactgtggcccaggtatgtggaaatagtgagcacgtaaagtttcttgctgaatggcttaaaagctgggatgaaaaaggccacaagattggagttgctaacggggacactaatgataactcatatcaagatatatctgattcagattattcagagagtgcttctgattgtgaaaatacacttctaatcactggacctgttgggtgtggaaaatcagctgcagtttttgcatgcgccagagaacaaggcttcaatgtgatagaggtaaatacatctgacatgagaaatggagcttatgtaaggcagaagtttgaggaagcaactaaatcacatggccttgaaaaatggtcacaggaggaggttatcaatccactaagggatgattccttggatccagattcaggaactcctgataggactgaataccaatgtttgatgtcctgtgctacaagagtaatgattgactgtgatcaacagaaatcacctgtaggatactactcaggtttgaaggcctgtgatgaacctcctaaacaagttgctaacaagacactcatactatttgaggatgtggatactgtctttgatgaggatcgtgggtttatttcaactattcttaagatggcagagactacaaaatggccaatcatactaactagcaacaagaaggatccgtctttgccgaatctcttggatcaacttgttttggatttcaaatacccatcgacctcagagctactttcacacgttgccatgatttgtaaatctgagggagtgaatgtcactgttcctcagttaaaacatgtaattgatgtttgtctaggtgacattaggagggtggtgatgtttttgcagttttggtaccaagggcatcaattcacagtacattctacagtgccaaaaatgttgccatgggagttcccttgtaagttatctgaaacattatgcatggaggtagacaaaactatccttttggctgaagaaaagaaaaaacagatggaaatatcagatcttgaaggcctgcagttacatgtaacagcacctttgatcaagggaagaacttctaaaacaagaagggctaagaaatccaaattaaagcgtgctcactcgactgagcataatgatatttcaccttgtaagaatgaacttgatgatttccatgatcttccagatatatctcttccatctgataaacaaataaaaagaaatcggcatcgttcgctgctattatctgagtccgatgatgatccagctgatgtaggtactgaaaaacataacatatttactgttactgaagttggtttcttcccacaaccttcagaggtgcctcctatgcatgggcaagggatttctgatcagttccattttcccgttgaatcacgagagacatgtgaaattgctgattctttccaaaatccacctgaaagcaacatgtatgggtccatttcacaagtttgtgatacatttatgtcacaggacgtgtcatgtgtacccgagtcatccttaattttggacggcacatctgcatccataagtggtgatgaatttttgtcaagggcagtgtccaatggtttttctgccttttgtgagggtacatacactacctccagaatggtattagaagacagtgactgtgtgaagaatctaatggctgaacgacaaaaagatgttgaagatgtagttggtgagacaagtgagacttatatggaatcatttcggagaaatgaacaggcaagctgttcagctgctgggtttcaattaatggatgaatgtagtcgtgctgaaagcatctggctgctctctggcaaaaaatctaatgactcttgcaaggtggaactagtacaggacacttggaacaggctacggagttgtcgtcttgaatttaccagtgaggctaatcacaacagagcaacttctggagctttgaagcttgtctcagaagtgtctgatttaatatcagaatcagatcttatgcttttccgttgctaccctcttactaaggatacgttggatccgtctttaactccttgtgatgagccagttgattcttcttggtacagcaatcaggttgagatgggatctgtatatgcccagcatgctcttcgtattttatcgaggaattcccaaaaaatagatggtggttctgtcgatttgtcacaagagttgtttgccagtacagctgctgtatcctttggtaaaattacctgttcaggattcaggaatgattatggatctacggacctttctcatatgaaaaatccaactacctgtatttttaaaagaagggagcggcatgttcatctttgtgaaaccctgtctccagtggttcctccaaagttgttgcagtcattgagaggccctgcttttgttgattatttgtcttcaatcagccagatttccaaattagaaaacttgcgactctctgaaaataaagtcataaacaagcgaagaaggtcccgtcaggcaagacattacttgagttctggcgcacttcaactttcacatgaggatgttgtattattagaagaaagcggctgtttcagtagcagacgcgagagggttgaggttgtagagcaagcaccagtcagtacataagttaatgaactggtgctgatcatgagcggcagcattttgattttttttattagaaggcaatgtgactgggttggccgagccatttttatagttgcgtccgtgatcacggagcccggcggtggaggaaccggaatgtgtgcagttgattgctgtatctgttagataactagacattttaaagtttatttaaattttaaaattatttatagcaatcatgaatatggattaatcttagt

SEQ ID NO: 218702 - DNA, 3811 bp, Zea Mays
atgggtggcctggttgaagtcaggtgccggtgcagggacctggtgatgaggcaagtgacgccatggcctcctgaagtgtccggctcttcaagcaaacagaaacaatggcaggatcaatcgaacaaagatggagtcattttggttgatgaaagccctcagaaaaagcaacgtaaaggtagaaagcaagatgcaatactgaaggagcctaatgctagcagaaagcgttgcaagacatcggaagctcctgatggtcctggaagctgtcagcaattgcatatcagccagattgaagccagctcgcctgcagcagcgccagtaataattgacgttgatttgatgagtacgccttctaaagcaggacatgctaattcaatcgatcaggatatatcaccgttgaaagttgacctaaggtcagaggcgaagatagctgcagaggaaattcgaaggttatcatctggaaagaaaattcaccctttctttcattctcggaaattgaacaaatgtgctagccaagatcaagatgtcatcaatattgaaaacatgcatgggctttgtgattctgaaagggatccaccattttatcctattcatgttgtgtaccaatcagaggccagcatgccaatccactggagtaattggataatcactgatatgtcatcatttgacactgatactgccgttcctcttaaaaaatctgtgtcatactttgagggcttggttaagccactgacaatagaaactaattgcaagaggcattctaatcaattgtcagatccgattcttgctgagtgtacaacttcaggaatgccttttccaagtttttctggcaagcaaagtgaacacagctgtttttcagatgcgatcaacgtggacacacagaacttgttgaggcctggtgctagttgccaagcttctcttcttgatctgaatgtagagccagaagatccacagaatggttgtcagcctgcctgttacctatggactgacaagtaccgacctgaaactgtggcccaggtatgtggaaatagtgagcacgtaaagtttcttgctgaatggcttaaaagctgggatgaaaaaggccacaagattggagttgctaacggggacactaatgataactcatatcaagatatatctgattcagattattcagagagtgcttctgattgtgaaaatacacttctaatcactggacctgttgggtgtggaaaatcagctgcagtttttgcatgcgccagagaacaaggcttcaatgtgatagaggtaaatacatctgacatgagaaatggagcttatgtaaggcagaagtttgaggaagcaactaaatcacatggccttgaaaaatggtcacaggaggaggttatcaatccactaagggatgattccttggatccagattcaggaactcctgataggactgaataccaatgtttgatgtcctgtgctacaagagtaatgattgactgtgatcaacagaaatcacctgtaggatactactcaggtttgaaggcctgtgatgaacctcctaaacaagttgctaacaagacactcatactatttgaggatgtggatactgtctttgatgaggatcgtgggtttatttcaactattcttaagatggcagagactacaaaatggccaatcatactaactagcaacaagaaggatccgtctttgccgaatctcttggatcaacttgttttggatttcaaatacccatcgacctcagagctactttcacacgttgccatggtgacattaggagggtggtgatgtttttgcagttttggtaccaagggcatcaattcacagagaggccaaaggaatgtttgtgtggtcctttctcacttgatttagatgcagtacattctacagtgccaaaaatgttgccatgggagttcccttgtaagttatctgaaacattatgcatggaggtagacaaaactatccttttggctgaagaaaagaaaaaacagatggaaatatcagatcttgaaggcctgcagttacatgtaacagcacctttgatcaagggaagaacttctaaaacaagaagggctaagaaatccaaattaaagcgtgctcactcgactgagcataatgatatttcaccttgtaagaatgaacttgatgatttccatgatcttccagatatatctcttccatctgataaacaaataaaaagaaatcggcatcgttcgctgctattatctgagtccgatgatgatccagctgatgtaggtactgaaaaacataacatatttactgttactgaagttggtttcttcccacaaccttcagaggtgcctcctatgcatgggcaagggatttctgatcagttccattttcccgttgaatcacgagagacatgtgaaattgctgattctttccaaaatccacctgaaagcaacatgtatgggtccatttcacaagtttgtgatacatttatgtcacaggacgtgtcatgtgtacccgagtcatccttaattttggacggcacatctgcatccataagtggtgatgaatttttgtcaagggcagtgtccaatggtttttctgccttttgtgagggtacatacactacctccagaatggtattagaagacagtgactgtgtgaagaatctaatggctgaacgacaaaaagatgttgaagatgtagttggtgagacaagtgagacttatatggaatcatttcggagaaatgaacaggcaagctgttcagctgctgggtttcaattaatggatgaatgtagtcgtgctgaaagcatctggctgctctctggcaaaaaatctaatgactcttgcaaggtggaactagtacaggacacttggaacaggctacggagttgtcgtcttgaatttaccagtgaggctaatcacaacagagcaacttctggagctttgaagcttgtctcagaagtgtctgatttaatatcagaatcagatcttatgcttttccgttgctaccctcttactaaggatacgttggatccgtctttaactccttgtgatgagccagttgattcttcttggtacagcaatcaggttgagatgggatctgtatatgcccagcatgctcttcgtattttatcgaggaattcccaaaaaatagatggtggttctgtcgatttgtcacaagagttgtttgccagtacagctgctgtatcctttggtaaaattacctgttcaggattcaggaatgattatggatctacggacctttctcatatgaaaaatccaactacctgtatttttaaaagaagggagcggcatgttcatctttgtgaaaccctgtctccagtggttcctccaaagttgttgcagtcattgagaggccctgcttttgttgattatttgtcttcaatcagccagatttccaaattagaaaacttgcgactctctgaaaataaagtcataaacaagcgaagaaggtcccgtcaggcaagacattacttgagttctggcgcacttcaactttcacatgaggatgttgtattattagaagaaagcggctgtttcagtagcagacgcgagagggttgaggttgtagagcaagcaccagtcagtacataagttaatgaactggtgctgatcatgagcggcagcattttgattttttttattagaaggcaatgtgactgggttggccgagccatttttatagttgcgtccgtgatcacggagcccggcggtggaggaaccggaatgtgtgcagttgattgctgtatctgttagataactagacattttaaagtttatttaaattttaaaattatttatagcaatcatgaatatggattaatcttagt

SEQ ID NO: 218703 - DNA, 2511 bp, Zea Mays
agtccgttttcaaccctactacgcctcggaatcagaggaaccgaacggtggaagagtacgcctcggaatcagaggagcagcgaggaagctgaaggaggggcgaatctaagcccaattgaagcatgagggcgtcgattaatcgtcccccgacgccgagcgcggaggaggatcgggacaagcagccttctctcggagagatcattaacatcaagttggtagagactggggagaaggagaagctaatggagctactccgcgagcgactcgctgagtgcggctggagggatgagatgaaggcactctgcagtaataaacacatgcatccaatgatgctgagcaagtgcttcacattcctaaggttctgatatttgcattagcatatgaattgtttgcacttcttgagaatgcatgatgttttttccccaacttctcagtggtcctctcaatttaaatgcctttgacgattacaactgaatgcatgtgaaaggcacacattaatatgtcacaaccccaaacattgttctatctttctcaaatatgtgcagctaaattctgaagcaaaagtgtgatatcctggcccaaaccttaatagggttgatagaatactcaacaagttgcatcttcttttttgaaagtctatctcgaaagaacctctctttaagagtgcttggcccagagtaatcttgagatgggtgatcgactgagaagttttctctgatgcgcatgaatgaggacaaagtgcacataaaagactcatgttggtctgtgtggatgatctatggtcttagagagctgtcaggagtaagtatcgttggttcgagagtgaacggggcattacaaatggtattagagccgactctcgcggtttcatggtcgtgtggcgctaggggttcggccatatgatgcatggcgcttgtgggcttagaatggtcacatggcatgacatatgatgacactagacatacatacatgaccaagaggggaggttactggcttggggttgaccgacgaagacgtcggttttctaagaggtggtggattgtgatatcctggtcaaagcttaataggattgatagaatactcataacaaaaaggtgcatcttttttttcaggagcctatctcgaaagaacctctggattaagtgtgcttggcccactaactggaaagtcttctcgggtgtgcgtgagtgaggacaaagtgcgcacaaagtactctttttgtctgtgcggatggtctatgatcgtagagggctgccaggagtaagtatcgccggttcgggagtagatggggtgttacaataagtagtttcttcatttcctcgtgaagaaatgacctgaaggggttcatttgcttcctaataaattgggaatttttgtaaatcttatgcaactcaagttggtttatcatggaaactacttatggttagttctctcaaattttctggtaaataaataattgcaatgattttactagatggctattgcagctgcaattattgcaacccatgcaagtgtgcaatatttgcaatttgtttaaatttcgtgctttccttttcctgaaattatattattttcaaatgaacttgtgttgcaaaaacaggttgtgacttgtgagtaacccactaaacacttgcacgctaaaatcttcttactgacaggattcatctggttcatttgctttgttcaaattctatgctaaatgctcattgcagccaatcaaatttatctaattctgatgtcttcaaaaccctaggcattggagaccgttttgcagtttgacacttaactgtagctacctcaaactgcctcattagagcattctgaaatgtgtgttacattacacactccataggttgacaataaagatggcgtggttttaactggataatatgtatccttcccaatgcttatcattctctttcgacgcgtctctgttttgtccttttgtgtactgtgtagggcctatgcaaggaagaaaggaagaaataatgtgacagtagatgacctcattcatgttattactccgaaaggaagagcatccgtgcctgattcagtgaaggcagaactcctgcaacgcatccggtccttccttatgtctaccacacttcggtagtcatttgtcgcgacggttggagcctatatgtaccattgtaggatcattgggaagtcgatcttgttggggaccaaaggtgcaggaaagcagtgcgtaggggaatattgtgagcatgaaaagaaacagtgtgatcttcatgacactgtcgacatgttcctcgtcaggcgcaggcggttggcgtaatttcaggtgtaccaatagagttgtaagttgtaacccctgaatactgtattgttaaagcaaccttccaccttgtaatgctacattgtactataactgctcagcgctgatgcttaatttcacaattagaaaacagaaacgcaatcttgatatagatgataacacgcatgtgaaacctgaaaccctgactgggtcatcttcaattgttttctttttgg

SEQ ID NO: 218704 - DNA, 764 bp, Zea Mays
agtccgttttcaaccctactacgcctcggaatcagaggaaccgaacggtggaagagtacgcctcggaatcagaggagcagcgaggaagctgaaggaggggcgaatctaagcccaattgaagcatgagggcgtcgattaatcgtcccccgacgccgagcgcggaggaggatcgggacaagcagccttctctcggagagatcattaacatcaagggcctatgcaaggaagaaaggaagaaataatgtgacagtagatgacctcattcatgttattactccgaaaggaagagcatccgtgcctgattcagtgaaggcagaactcctgcaacgcatccggtccttccttatgtctaccacacttcggtagtcatttgtcgcgacggttggagcctatatgtaccattgtaggatcattgggaagtcgatcttgttggggaccaaaggtgcaggaaagcagtgcgtaggggaatattgtgagcatgaaaagaaacagtgtgatcttcatgacactgtcgacatgttcctcgtcaggcgcaggcggttggcgtaatttcaggtgtaccaatagagttgtaagttgtaacccctgaatactgtattgttaaagcaaccttccaccttgtaatgctacattgtactataactgctcagcgctgatgcttaatttcacaattagaaaacagaaacgcaatcttgatatagatgataacacgcatgtgaaacctgaaaccctgactgggtcatcttcaattgttttctttttgg

SEQ ID NO: 218705 - DNA, 3935 bp, Zea Mays
atggaccttgacgcggctgcagaggaggaggagcgccggcttgaggactacaatgaggcgcaggatgctaggtacttcctggggtttggtgacacccatggagatcctattgaggttgatactgttgccggctctcaaattggcactggaaccgaatccactagcccgtcagaagcagtccctaatcctgatcaggctgctaatgctagtggtagcaacatgaagaaaaggtccaagtgctgggatgactttgatgaattgactaagattgtgaatggtaagaaagtcaggagccacgttgtgcctgccgccagccccgacacctccagatgttgcctccatccatcctccgagcttaccgcctcgcccccgcccccaaaccctagaccccctacaatcacgaggaaggggagaacggccgaggaggatgctccgcaaggaaggggaggacggtcgaggatgacgttgttgctcgtcgctgagcatcttcgcgccctcagtgctgccaaggagccctctctatccctgatggcgtcccaaccgttggccgatcgtcggcgatgatgacccagcctccctctccacgtccctgctccccaactcatacaggtgttgtggcgccctcctctccactcccctatctattttgttgtttgatgtctactttcttcgccgctctggttgcggcacgattggtgcaccacctcctcgtgcgaggtgagggcaagcctgcacatgctcaactccatcgacaacctcaccttcatgccactctgggagcatgccgagtggcgatgtgacgacttggtggtctatcgtcgttgcccttcgccaggtgtcgatctcttcgtcagtgaagagcatccaccaggagcaattgaagccattggacattggttgcacaacttgataaagtgaagaatctgcttgcgtctgagtttgggagtctataaacatggggaagagaaaatattggtgcctttgcaattggtgaccctgctgcaactatttttttctaggaattcacaagagcaatatggtacaccaatgccacacattggacaaacaacagttgaagttgatcttttgaattatggtgtgatagaaggtgatgaatcatgtaaacatttctctgaactaaaagtcttacatccatggatgatcaaagatggcatgaatcttacaaaggaacagagattagagaaaattgagtcacaaaaacttgaaaaatatgaagccaaaggtgacaagagacatgacttgaaagatgatcaaagtgtacaggaagaatacataaatgcatattatgaggccttgaggaaaagttggaagaggaagaagcaaaaagcagaatgcagcatgaaggcaagatttttgtccctgatgctcaaagggaacgccaagttgacaataaatacaagcaggatgatgatgaagaaggcattgaataagtattccagctttcttatatggacagtaggaacccaaggtttgctgtgtaatccattatcaacagttgcactcacattagccttgtggcgattcttttcaaaacaggatgatttaaacccatatgttgttccaatggctatgggcatttaacgtcaactagagagtcccttggatatgactacaagtactatcatcaggaggattgttgctaaccatgaagcttacctgtgtattgtcagctttcaaactcgatgaaccaactgagaaagtactgcttatgaagctagagaagcatggaaggagtgttgctgaatcaaaggcaaaagaagaagctggaagagttttgatttgcatgaaggataggtcctcgacacagttcagcagagatgctggctctatgcccaagctgttgaagacgcttctaaagcactagagtattgtagcactgatggaaggccttcgatgaaatgtttccctgaaagttgcatactacatcgctgaagcactacaatattgtaacactgagggaaggcctttgtatcatgacctaaattcatatagggccctctttgatgaggtaattgttgctttggttttcacttttccttacaaccttcgaattatgtggctatgtctgaaaacttaatacttctacagttctcgggtcttcataccattccaatttgtgttagctaataaacaagtcaggctatgtctgaaaccagtatctaatagttctccgcccaacaaggaactgtgcaacataaaaacaaatcttaaacaagttacatgttctgaattttagaaactcaaactccactctaagggctaaccggctaaccgaacatgttatagaacaaactcagtcctaaattgtagacatattggaattctgcgtatgttttttccaacctatcttcaaactatacaagaattattatctaatataaacaatacattgacaataatgtacacaaaaatccatgtatttaatgtgtggacatggtatcatcatgtctgactaacccttttttactttcattgaatgaagttcgtacatgtatttgaggtattttttattttcttcctactataagccttgcttagatactgatctaagatcatctccaagggacagacaaaaaatcctagaggttctcacataagtacggtttagagaagggataaaccgaggaaagcctcccccacaaatacagaaaggctgcctcgaacctatgatttggtgactcagtgaaacaaacaactctcactactgcactaggcctgccattgtttacgagcatccccaagggccttacttaaattcactctctaaattttaatttggtgagccattttaataaaaatatgtttgataggttttttatcttctaacaatttttatgtatcttgtacgcactctagagaaccaacccactcactgctctttatttactgcatgctatttaggtctgctaagcaaaaaatgatattctttctcaatcttttgtcatgtttagataaatttggtggttttaggataaagtttgtgaagggcttcactttttttttctataattagaatttaactcaaaagttttcccttgaaattcaagttgattttgagaagtatgaagggatgattaaggtcatggagaaggtggtaatacagttaattctatggagctcactggaggagcactaccttttgccagttgcttgcaagaatgtaattggaatccgatgtgcttcatggcgcatcgtatcctccattgagtatagggaataaggttgtgtcaacatggaccgtgccactctcatcgagggctaccataacaagattgaagttgaactcaacaagatctgcgttggaatcctcaagctctttgcttcccaccttcccccctcattaatagttccaaagtccaaggtcttctacctcaagatgaagggtgattactacaggatattgctttggaggagttggcccccttatcctattaggctttggctgatgcttaacctctcaactctcctgatcttgctcgtggtctccccaaacaggcaaagccaacgaatgaaagggactcactcgcagcaacaaccaaaaagctgatcacgcattctccttttcacatttgttgcatttaattaattcatccaatagcataaattggcactccttttgtgttattgctctttggttggtcttattgttgttgttgtactgcttgccatgtgtattttatcataagtgttgttttggctaatccctaacgatgcaatacatttgagcaacaattcaattgttttgttttttgaacagttattctaaatacccaatgttcacagcatatttcacttcccatggttcactgttttgttgtattagtagctctaattctaaggtgtcaatgaatcttaggcgaaagaattgttcgtagtagtggtccagaacagacttcatactgtgatttacagac

SEQ ID NO: 218706 - DNA, 2928 bp, Zea Mays
atggaccttgacgcggctgcagaggaggaggagcgccggcttgaggactacaatgaggcgcaggatgctaggtacttcctggggtttggtgacacccatggagatcctattgaggttgatactgttgccggctctcaaattggcactggaaccgaatccactagcccgtcagaagcagtccctaatcctgatcaggctgctaatgctagtggtagcaacatgaagaaaaggtccaagtgctgggatgactttgatgaattgactaagattgtgaatggtaagaaagtcaggagccacgttgtgcctgccgccagccccgacacctccagatgttgcctccatccatcctccgagcttaccgcctcgcccccgcccccaaaccctagaccccctacaatcacgaggaaggggagaacggccgaggaggatgctccgcaaggaaggggaggacggtcgaggatgacgttgttgctcgtcgctgagcatcttcgcgccctcagtgctgccaaggagccctctctatccctgatggcgtcccaaccgttggtgttgtggcgccctcctctccactcccctatctattttgttgtttgatgtctactttcttcgccgctctggttgcggcacgattggtgcaccacctcctcgtgcgaggtgagggcaagcctgcacatgctcaactccatcgacaacctcaccttcatgccactctgggagcatgccgagtggcgatgtgacgacttggtggtctatcgtcgttgcccttcgccaggtgtcgatctcttcgtcagtgaagagcatccaccaggagcaattgaagccattggacattggttgcacaacttgataaagtgaagaatctgcttgcgtctgagtttgggagtctataaacatggggaagagaaaatattggtgcctttgcaattggtgaccctgctgcaactatttttttctaggaattcacaagagcaatatggtacaccaatgccacacattggacaaacaacagttgaagttgatcttttgaattatggtgtgatagaaggtgatgaatcatgtaaacatttctctgaactaaaagtcttacatccatggatgatcaaagatggcatgaatcttacaaaggaacagagattagagaaaattgagtcacaaaaacttgaaaaatatgaagccaaaggtgacaagagacatgacttgaaagatgatcaaagtgtacaggaagaatacataaatgcatattatgaggccttgaggaaaagttggaagaggaagaagcaaaaagcagaatgcagcatgaaggcaagatttttgtccctgatgctcaaagggaacgccaagttgacaataaatacaagcaggatgatgatgaagaaggcattgaataagtattccagctttcttatatggacagtaggaacccaaggtttgctgtgtaatccattatcaacagttgcactcacattagccttgtggcgattcttttcaaaacaggatgatttaaacccatatgttgttccaatggctatgggcatttaacgtcaactagagagtcccttggatatgactacaagtactatcatcaggaggattgttgctaaccatgaagcttacctgtgtattgtcagctttcaaactcgatgaaccaactgagaaagtactgcttatgaagctagagaagcatggaaggagtgttgctgaatcaaaggcaaaagaagaagctggaagagttttgatttgcatgaaggataggtcctcgacacagttcagcagagatgctggctctatgcccaaggtgtggacaggaaaggaggacataaaagccataactaaaactgttcgctcagttgtacgccagatgctaatatttaatactctatatatagaatactgttgaagacgcttctaaagcactagagtattgtagcactgatggaaggccttcgatgaaatgtttccctgaaagttgcatactacatcgctgaagcactacaatattgtaacactgagggaaggcctttgtatcatgacctaaattcatatagggccctctttgatgagttgattttgagaagtatgaagggatgattaaggtcatggagaaggtggtaatacagttaattctatggagctcactggaggagcactaccttttgccagttgcttgcaagaatgtaattggaatccgatgtgcttcatggcgcatcgtatcctccattgagtatagggaataaggttgtgtcaacatggaccgtgccactctcatcgagggctaccataacaagattgaagttgaactcaacaagatctgcgttggaatcctcaagctctttgcttcccaccttcccccctcattaatagttccaaagtccaaggtcttctacctcaagatgaagggtgattactacaggatattgctttggaggagttggcccccttatcctattaggctttggctgatgcttaacctctcaactctcctgatcttgctcgtggtctccccaaacaggcaaagccaacgaatgaaagggactcactcgcagcaacaaccaaaaagctgatcacgcattctccttttcacatttgttgcatttaattaattcatccaatagcataaattggcactccttttgtgttattgctctttggttggtcttattgttgttgttgtactgcttgccatgtgtattttatcataagtgttgttttggctaatccctaacgatgcaatacatttgagcaacaattcaattgttttgttttttgaacagttattctaaatacccaatgttcacagcatatttcacttcccatggttcactgttttgttgtattagtagctctaattctaaggtgtcaatgaatcttaggcgaaagaattgttcgtagtagtggtccagaacagacttcatactgtgatttacagac

SEQ ID NO: 218707 - DNA, 3044 bp, Zea Mays
atggaccttgacgcggctgcagaggaggaggagcgccggcttgaggactacaatgaggcgcaggatgctaggtacttcctggggtttggtgacacccatggagatcctattgaggttgatactgttgccggctctcaaattggcactggaaccgaatccactagcccgtcagaagcagtccctaatcctgatcaggctgctaatgctagtggtagcaacatgaagaaaaggtccaagtgctgggatgactttgatgaattgactaagattgtgaatggtaagaaagtcaggagccacgttgtgcctgccgccagccccgacacctccagatgttgcctccatccatcctccgagcttaccgcctcgcccccgcccccaaaccctagaccccctacaatcacgaggaaggggagaacggccgaggaggatgctccgcaaggaaggggaggacggtcgaggatgacgttgttgctcgtcgctgagcatcttcgcgccctcagtgctgccaaggagccctctctatccctgatggcgtcccaaccgttggtgttgtggcgccctcctctccactcccctatctattttgttgtttgatgtctactttcttcgccgctctggttgcggcacgattggtgcaccacctcctcgtgcgaggtgagggcaagcctgcacatgctcaactccatcgacaacctcaccttcatgccactctgggagcatgccgagtggcgatgtgacgacttggtggtctatcgtcgttgcccttcgccaggtgtcgatctcttcgtcagtgaagagcatccaccaggagcaattgaagccattggacattggttgcacaacttgataaagtgaagaatctgcttgcgtctgagtttgggagtctataaacatggggaagagaaaatattggtgcctttgcaattggtgaccctgctgcaactatttttttctaggaattcacaagagcaatatggtacaccaatgccacacattggacaaacaacagttgaagttgatcttttgaattatggtgtgatagaaggtgatgaatcatgtaaacatttctctgaactaaaagtcttacatccatggatgatcaaagatggcatgaatcttacaaaggaacagagattagagaaaattgagtcacaaaaacttgaaaaatatgaagccaaaggtgacaagagacatgacttgaaagatgatcaaagtgtacaggaagaatacataaatgcatattatgaggccttgaggaaaagttggaagaggaagaagcaaaaagcagaatgcagcatgaaggcaagatttttgtccctgatgctcaaagggaacgccaagttgacaataaatacaagcaggatgatgatgaagaaggcattgaataagtattccagctttcttatatggacagtaggaacccaaggtttgctgtgtaatccattatcaacagttgcactcacattagccttgtggcgattcttttcaaaacaggatgatttaaacccatatgttgttccaatggctatgggcatttaacgtcaactagagagtcccttggatatgactacaagtactatcatcaggaggattgttgctaaccatgaagcttacctgtgtattgtcagctttcaaactcgatgaaccaactgagaaagtactgcttatgaagctagagaagcatggaaggagtgttgctgaatcaaaggcaaaagaagaagctggaagagttttgatttgcatgaaggataggtcctcgacacagttcagcagagatgctggctctatgcccaaggtgtggacaggaaaggaggacataaaagccataactaaaactgttcgctcagttgtacgccagatgctaatatttaatactctatatatagaatactgttgaagacgcttctaaagcactagagtattgtagcactgatggaaggccttcgatgaaatgtttccctgaaagttgcatactacatcgctgaagcactacaatattgtaacactgagggaaggcctttgtatcatgacctaaattcatatagggccctctttgatgaggtcatggagaaggtggtaatacagttaattctatggagctcactggaggagcactaccttttgccagttgcttgcaagaatgtaattggaatccgatgtgcttcatggcgcatcgtatcctccattgagtatagggaataaggttgtgtcaacatggaccgtgccactctcatcgagggctaccataacaagattgaagttgaactcaacaagatctgcgttggaatcctcaagctctttgcttcccaccttcccccctcattaatagttccaaagtccaaggtcttctacctcaagatgaagggtgattactacaggatattgctttggaggagttggcccccttatcctattaggctttggctgatgcttaacctctcaactctcctgatcttgctcgtggtctccccaaacaggtttggtttctagatccattacatggagtgtgtagtgtttttcctcttttttgcaatcctcatgatgtgccaccaggtctggtctaatcgttcccctaaaattgtggcctataatcagcttcttggcctatgatccttttgtatgtaggcaaagccaacgaatgaaagggactcactcgcagcaacaaccaaaaagctgatcacgcattctccttttcacatttgttgcatttaattaattcatccaatagcataaattggcactccttttgtgttattgctctttggttggtcttattgttgttgttgtactgcttgccatgtgtattttatcataagtgttgttttggctaatccctaacgatgcaatacatttgagcaacaattcaattgttttgttttttgaacagttattctaaatacccaatgttcacagcatatttcacttcccatggttcactgttttgttgtattagtagctctaattctaaggtgtcaatgaatcttaggcgaaagaattgttcgtagtagtggtccagaacagacttcatactgtgatttacagac

SEQ ID NO: 218708 - DNA, 4207 bp, Zea Mays
atggaccttgacgcggctgcagaggaggaggagcgccggcttgaggactacaatgaggcgcaggatgctaggtacttcctggggtttggtgacacccatggagatcctattgaggttgatactgttgccggctctcaaattggcactggaaccgaatccactagcccgtcagaagcagtccctaatcctgatcaggctgctaatgctagtggtagcaacatgaagaaaaggtccaagtgctgggatgactttgatgaattgactaagattgtgaatggtaagaaagtcaggagccacgttgtgcctgccgccagccccgacacctccagatgttgcctccatccatcctccgagcttaccgcctcgcccccgcccccaaaccctagaccccctacaatcacgaggaaggggagaacggccgaggaggatgctccgcaaggaaggggaggacggtcgaggatgacgttgttgctcgtcgctgagcatcttcgcgccctcagtgctgccaaggagccctctctatccctgatggcgtcccaaccgttggtaatatctccgcctcggccatgggcattgcaaccctcgattcaatctctcctcttcgatctcaggccgatcgtcggcgatgatgacccagcctccctctccacgtccctgctccccaactcatacaggtgttgtggcgccctcctctccactcccctatctattttgttgtttgatgtctactttcttcgccgctctggttgcggcacgattggtgcaccacctcctcgtgcgaggtgagggcaagcctgcacatgctcaactccatcgacaacctcaccttcatgccactctgggagcatgccgagtggcgatgtgacgacttggtggtctatcgtcgttgcccttcgccaggtgtcgatctcttcgtcagtgaagagcatccaccagttccattcattcatttattatatggtgaatggccacaaaaccatattctatgatggcacaaggtcccaccaagatgcgtagccatgtgcaaaccatatttgtcatgtagccacaagggcccgtcgatctgttttggtttacaatgtggatgaaaacaacatggagctctggcttatgggggcttatcgatgccagcgaagcccgtgggagcaattgaagccattggacattggttgcacaacttgataaagtgaagaatctgcttgcgtctgagtttgggagtctataaacatggggaagagaaaatattggtgcctttgcaattggtgaccctgctgcaactatttttttctaggaattcacaagagcaatatggtacaccaatgccacacattggacaaacaacagttgaagttgatcttttgaattatggtgtgatagaaggtgatgaatcatgtaaacatttctctgaactaaaagtcttacatccatggatgatcaaagatggcatgaatcttacaaaggaacagagattagagaaaattgagtcacaaaaacttgaaaaatatgaagccaaaggtgacaagagacatgacttgaaagatgatcaaagtgtacaggaagaatacataaatgcatattatgaggccttgaggaaaagttggaagaggaagaagcaaaaagcagaatgcagcatgaaggcaagatttttgtccctgatgctcaaagggaacgccaagttgacaataaatacaagcaggatgatgatgaagaaggcattgaataagtattccagctttcttatatggacagtaggaacccaaggtttgctgtgtaatccattatcaacagttgcactcacattagccttgtggcgattcttttcaaaacaggatgatttaaacccatatgttgttccaatggctatgggcatttaacgtcaactagagagtcccttggatatgactacaagtactatcatcaggaggattgttgctaaccatgaagcttacctgtgtattgtcagctttcaaactcgatgaaccaactgagaaagtactgcttatgaagctagagaagcatggaaggagtgttgctgaatcaaaggcaaaagaagaagctggaagagttttgatttgcatgaaggataggtcctcgacacagttcagcagagatgctggctctatgcccaagctgttgaagacgcttctaaagcactagagtattgtagcactgatggaaggccttcgatgaaatgtttccctgaaagttgcatactacatcgctgaagcactacaatattgtaacactgagggaaggcctttgtatcatgacctaaattcatatagggccctctttgatgaggtaattgttgctttggttttcacttttccttacaaccttcgaattatgtggctatgtctgaaaacttaatacttctacagttctcgggtcttcataccattccaatttgtgttagctaataaacaagtcaggctatgtctgaaaccagtatctaatagttctccgcccaacaaggaactgtgcaacataaaaacaaatcttaaacaagttacatgttctgaattttagaaactcaaactccactctaagggctaaccggctaaccgaacatgttatagaacaaactcagtcctaaattgtagacatattggaattctgcgtatgttttttccaacctatcttcaaactatacaagaattattatctaatataaacaatacattgacaataatgtacacaaaaatccatgtatttaatgtgtggacatggtatcatcatgtctgactaacccttttttactttcattgaatgaagttcgtacatgtatttgaggtattttttattttcttcctactataagccttgcttagatactgatctaagatcatctccaagggacagacaaaaaatcctagaggttctcacataagtacggtttagagaagggataaaccgaggaaagcctcccccacaaatacagaaaggctgcctcgaacctatgatttggtgactcagtgaaacaaacaactctcactactgcactaggcctgccattgtttacgagcatccccaagggccttacttaaattcactctctaaattttaatttggtgagccattttaataaaaatatgtttgataggttttttatcttctaacaatttttatgtatcttgtacgcactctagagaaccaacccactcactgctctttatttactgcatgctatttaggtctgctaagcaaaaaatgatattctttctcaatcttttgtcatgtttagataaatttggtggttttaggataaagtttgtgaagggcttcactttttttttctataattagaatttaactcaaaagttttcccttgaaattcaagttgattttgagaagtatgaagggatgattaaggtcatggagaaggtggtaatacagttaattctatggagctcactggaggagcactaccttttgccagttgcttgcaagaatgtaattggaatccgatgtgcttcatggcgcatcgtatcctccattgagtatagggaataaggttgtgtcaacatggaccgtgccactctcatcgagggctaccataacaagattgaagttgaactcaacaagatctgcgttggaatcctcaagctctttgcttcccaccttcccccctcattaatagttccaaagtccaaggtcttctacctcaagatgaagggtgattactacaggatattgctttggaggagttggcccccttatcctattaggctttggctgatgcttaacctctcaactctcctgatcttgctcgtggtctccccaaacaggcaaagccaacgaatgaaagggactcactcgcagcaacaaccaaaaagctgatcacgcattctccttttcacatttgttgcatttaattaattcatccaatagcataaattggcactccttttgtgttattgctctttggttggtcttattgttgttgttgtactgcttgccatgtgtattttatcataagtgttgttttggctaatccctaacgatgcaatacatttgagcaacaattcaattgttttgttttttgaacagttattctaaatacccaatgttcacagcatatttcacttcccatggttcactgttttgttgtattagtagctctaattctaaggtgtcaatgaatcttaggcgaaagaattgttcgtagtagtggtccagaacagacttcatactgtgatttacagac

SEQ ID NO: 218709 - DNA, 3150 bp, Zea Mays
atggaccttgacgcggctgcagaggaggaggagcgccggcttgaggactacaatgaggcgcaggatgctaggtacttcctggggtttggtgacacccatggagatcctattgaggttgatactgttgccggctctcaaattggcactggaaccgaatccactagcccgtcagaagcagtccctaatcctgatcaggctgctaatgctagtggtagcaacatgaagaaaaggtccaagtgctgggatgactttgatgaattgactaagattgtgaatggtaagaaagtcaggagccacgttgtgcctgccgccagccccgacacctccagatgttgcctccatccatcctccgagcttaccgcctcgcccccgcccccaaaccctagaccccctacaatcacgaggaaggggagaacggccgaggaggatgctccgcaaggaaggggaggacggtcgaggatgacgttgttgctcgtcgctgagcatcttcgcgccctcagtgctgccaaggagccctctctatccctgatggcgtcccaaccgttggtaatatctccgcctcggccatgggcattgcaaccctcgattcaatctctcctcttcgatctcaggccgatcgtcggcgatgatgacccagcctccctctccacgtccctgctccccaactcatacaggtgttgtggcgccctcctctccactcccctatctattttgttgtttgatgtctactttcttcgccgctctggttgcggcacgattggtgcaccacctcctcgtgcgaggtgagggcaagcctgcacatgctcaactccatcgacaacctcaccttcatgccactctgggagcatgccgagtggcgatgtgacgacttggtggtctatcgtcgttgcccttcgccaggtgtcgatctcttcgtcagtgaagagcatccaccagttccattcattcatttattatatggtgaatggccacaaaaccatattctatgatggcacaaggtcccaccaagatgcgtagccatgtgcaaaccatatttgtcatgtagccacaagggcccgtcgatctgttttggtttacaatgtggatgaaaacaacatggagctctggcttatgggggcttatcgatgccagcgaagcccgtgggagcaattgaagccattggacattggttgcacaacttgataaagtgaagaatctgcttgcgtctgagtttgggagtctataaacatggggaagagaaaatattggtgcctttgcaattggtgaccctgctgcaactatttttttctaggaattcacaagagcaatatggtacaccaatgccacacattggacaaacaacagttgaagttgatcttttgaattatggtgtgatagaaggtgatgaatcatgtaaacatttctctgaactaaaagtcttacatccatggatgatcaaagatggcatgaatcttacaaaggaacagagattagagaaaattgagtcacaaaaacttgaaaaatatgaagccaaaggtgacaagagacatgacttgaaagatgatcaaagtgtacaggaagaatacataaatgcatattatgaggccttgaggaaaagttggaagaggaagaagcaaaaagcagaatgcagcatgaaggcaagatttttgtccctgatgctcaaagggaacgccaagttgacaataaatacaagcaggatgatgatgaagaaggcattgaataagtattccagctttcttatatggacagtaggaacccaaggtttgctgtgtaatccattatcaacagttgcactcacattagccttgtggcgattcttttcaaaacaggatgatttaaacccatatgttgttccaatggctatgggcatttaacgtcaactagagagtcccttggatatgactacaagtactatcatcaggaggattgttgctaaccatgaagcttacctgtgtattgtcagctttcaaactcgatgaaccaactgagaaagtactgcttatgaagctagagaagcatggaaggagtgttgctgaatcaaaggcaaaagaagaagctggaagagttttgatttgcatgaaggataggtcctcgacacagttcagcagagatgctggctctatgcccaagctgttgaagacgcttctaaagcactagagtattgtagcactgatggaaggccttcgatgaaatgtttccctgaaagttgcatactacatcgctgaagcactacaatattgtaacactgagggaaggcctttgtatcatgacctaaattcatatagggccctctttgatgagggaataaggttgtgtcaacatggaccgtgccactctcatcgagggctaccataacaagattgaagttgaactcaacaagatctgcgttggaatcctcaagctctttgcttcccaccttcccccctcattaatagttccaaagtccaaggtcttctacctcaagatgaagggtgattactacaggatattgctttggaggagttggcccccttatcctattaggctttggctgatgcttaacctctcaactctcctgatcttgctcgtggtctccccaaacaggtttggtttctagatccattacatggagtgtgtagtgtttttcctcttttttgcaatcctcatgatgtgccaccaggtctggtctaatcgttcccctaaaattgtggcctataatcagcttcttggcctatgatccttttgtatgtaggcaaagccaacgaatgaaagggactcactcgcagcaacaaccaaaaagctgatcacgcattctccttttcacatttgttgcatttaattaattcatccaatagcataaattggcactccttttgtgttattgctctttggttggtcttattgttgttgttgtactgcttgccatgtgtattttatcataagtgttgttttggctaatccctaacgatgcaatacatttgagcaacaattcaattgttttgttttttgaacagttattctaaatacccaatgttcacagcatatttcacttcccatggttcactgttttgttgtattagtagctctaattctaaggtgtcaatgaatcttaggcgaaagaattgttcgtagtagtggtccagaacagacttcatactgtgatttacagac

SEQ ID NO: 218710 - DNA, 4164 bp, Zea Mays
atggaccttgacgcggctgcagaggaggaggagcgccggcttgaggactacaatgaggcgcaggatgctaggtacttcctggggtttggtgacacccatggagatcctattgaggttgatactgttgccggctctcaaattggcactggaaccgaatccactagcccgtcagaagcagtccctaatcctgatcaggctgctaatgctagtggtagcaacatgaagaaaaggtccaagtgctgggatgactttgatgaattgactaagattgtgaatggtaagaaagtcaggagccacgttgtgcctgccgccagccccgacacctccagatgttgcctccatccatcctccgagcttaccgcctcgcccccgcccccaaaccctagaccccctacaatcacgaggaaggggagaacggccgaggaggatgctccgcaaggaaggggaggacggtcgaggatgacgttgttgctcgtcgctgagcatcttcgcgccctcagtgctgccaaggagccctctctatccctgatggcgtcccaaccgttggtaatatctccgcctcggccatgggcattgcaaccctcgattcaatctctcctcttcgatctcaggccgatcgtcggcgatgatgacccagcctccctctccacgtccctgctccccaactcatacaggtgttgtggcgccctcctctccactcccctatctattttgttgtttgatgtctactttcttcgccgctctggttgcggcacgattggtgcaccacctcctcgtgcgaggtgagggcaagcctgcacatgctcaactccatcgacaacctcaccttcatgccactctgggagcatgccgagtggcgatgtgacgacttggtggtctatcgtcgttgcccttcgccaggtgtcgatctcttcgtcagtgaagagcatccaccagttccattcattcatttattatatggtgaatggccacaaaaccatattctatgatggcacaaggtcccaccaagatgcgtagccatgtgcaaaccatatttgtcatgtagccacaagggcccgtcgatctgttttggtttacaatgtggatgaaaacaacatggagctctggcttatgggggcttatcgatgccagcgaagcccgtgggagcaattgaagccattggacattggttgcacaacttgataaagtgaagaatctgcttgcgtctgagtttgggagtctataaacatggggaagagaaaatattggtgcctttgcaattggtgaccctgctgcaactatttttttctaggaattcacaagagcaatatggtacaccaatgccacacattggacaaacaacagttgaagttgatcttttgaattatggtgtgatagaaggtgatgaatcatgtaaacatttctctgaactaaaagtcttacatccatggatgatcaaagatggcatgaatcttacaaaggaacagagattagagaaaattgagtcacaaaaacttgaaaaatatgaagccaaaggtgacaagagacatgacttgaaagatgatcaaagtgtacaggaagaatacataaatgcatattatgaggccttgaggaaaagttggaagaggaagaagcaaaaagcagaatgcagcatgaaggcaagatttttgtccctgatgctcaaagggaacgccaagttgacaataaatacaagcaggatgatgatgaagaaggcattgaataagtattccagctttcttatatggacagtaggaacccaaggtttgctgtgtaatccattatcaacagttgcactcacattagccttgtggcgattcttttcaaaacaggatgatttaaacccatatgttgttccaatggctatgggcatttaacgtcaactagagagtcccttggatatgactacaagtactatcatcaggaggattgttgctaaccatgaagcttacctgtgtattgtcagctttcaaactcgatgaaccaactgagaaagtactgcttatgaagctagagaagcatggaaggagtgttgctgaatcaaaggcaaaagaagaagctggaagagttttgatttgcatgaaggatagctgttgaagacgcttctaaagcactagagtattgtagcactgatggaaggccttcgatgaaatgtttccctgaaagttgcatactacatcgctgaagcactacaatattgtaacactgagggaaggcctttgtatcatgacctaaattcatatagggccctctttgatgaggtaattgttgctttggttttcacttttccttacaaccttcgaattatgtggctatgtctgaaaacttaatacttctacagttctcgggtcttcataccattccaatttgtgttagctaataaacaagtcaggctatgtctgaaaccagtatctaatagttctccgcccaacaaggaactgtgcaacataaaaacaaatcttaaacaagttacatgttctgaattttagaaactcaaactccactctaagggctaaccggctaaccgaacatgttatagaacaaactcagtcctaaattgtagacatattggaattctgcgtatgttttttccaacctatcttcaaactatacaagaattattatctaatataaacaatacattgacaataatgtacacaaaaatccatgtatttaatgtgtggacatggtatcatcatgtctgactaacccttttttactttcattgaatgaagttcgtacatgtatttgaggtattttttattttcttcctactataagccttgcttagatactgatctaagatcatctccaagggacagacaaaaaatcctagaggttctcacataagtacggtttagagaagggataaaccgaggaaagcctcccccacaaatacagaaaggctgcctcgaacctatgatttggtgactcagtgaaacaaacaactctcactactgcactaggcctgccattgtttacgagcatccccaagggccttacttaaattcactctctaaattttaatttggtgagccattttaataaaaatatgtttgataggttttttatcttctaacaatttttatgtatcttgtacgcactctagagaaccaacccactcactgctctttatttactgcatgctatttaggtctgctaagcaaaaaatgatattctttctcaatcttttgtcatgtttagataaatttggtggttttaggataaagtttgtgaagggcttcactttttttttctataattagaatttaactcaaaagttttcccttgaaattcaagttgattttgagaagtatgaagggatgattaaggtcatggagaaggtggtaatacagttaattctatggagctcactggaggagcactaccttttgccagttgcttgcaagaatgtaattggaatccgatgtgcttcatggcgcatcgtatcctccattgagtatagggaataaggttgtgtcaacatggaccgtgccactctcatcgagggctaccataacaagattgaagttgaactcaacaagatctgcgttggaatcctcaagctctttgcttcccaccttcccccctcattaatagttccaaagtccaaggtcttctacctcaagatgaagggtgattactacaggatattgctttggaggagttggcccccttatcctattaggctttggctgatgcttaacctctcaactctcctgatcttgctcgtggtctccccaaacaggcaaagccaacgaatgaaagggactcactcgcagcaacaaccaaaaagctgatcacgcattctccttttcacatttgttgcatttaattaattcatccaatagcataaattggcactccttttgtgttattgctctttggttggtcttattgttgttgttgtactgcttgccatgtgtattttatcataagtgttgttttggctaatccctaacgatgcaatacatttgagcaacaattcaattgttttgttttttgaacagttattctaaatacccaatgttcacagcatatttcacttcccatggttcactgttttgttgtattagtagctctaattctaaggtgtcaatgaatcttaggcgaaagaattgttcgtagtagtggtccagaacagacttcatactgtgatttacagac

SEQ ID NO: 218711 - DNA, 3833 bp, Zea Mays
atggaccttgacgcggctgcagaggaggaggagcgccggcttgaggactacaatgaggcgcaggatgctaggtacttcctggggtttggtgacacccatggagatcctattgaggttgatactgttgccggctctcaaattggcactggaaccgaatccactagcccgtcagaagcagtccctaatcctgatcaggctgctaatgctagtggtagcaacatgaagaaaaggtccaagtgctgggatgactttgatgaattgactaagattgtgaatggtaagaaagtcaggagccacgttgtgcctgccgccagccccgacacctccagatgttgcctccatccatcctccgagcttaccgcctcgcccccgcccccaaaccctagaccccctacaatcacgaggaaggggagaacggccgaggaggatgctccgcaaggaaggggaggacggtcgaggatgacgttgttgctcgtcgctgagcatcttcgcgccctcagtgctgccaaggagccctctctatccctgatggcgtcccaaccgttggtaatatctccgcctcggccatgggcattgcaaccctcgattcaatctctcctcttcgatctcaggccgatcgtcggcgatgatgacccagcctccctctccacgtccctgctccccaactcatacaggagcaattgaagccattggacattggttgcacaacttgataaagtgaagaatctgcttgcgtctgagtttgggagtctataaacatggggaagagaaaatattggtgcctttgcaattggtgaccctgctgcaactatttttttctaggaattcacaagagcaatatggtacaccaatgccacacattggacaaacaacagttgaagttgatcttttgaattatggtgtgatagaaggtgatgaatcatgtaaacatttctctgaactaaaagtcttacatccatggatgatcaaagatggcatgaatcttacaaaggaacagagattagagaaaattgagtcacaaaaacttgaaaaatatgaagccaaaggtgacaagagacatgacttgaaagatgatcaaagtgtacaggaagaatacataaatgcatattatgaggccttgaggaaaagttggaagaggaagaagcaaaaagcagaatgcagcatgaaggcaagatttttgtccctgatgctcaaagggaacgccaagttgacaataaatacaagcaggatgatgatgaagaaggcattgaataagtattccagctttcttatatggacagtaggaacccaaggtttgctgtgtaatccattatcaacagttgcactcacattagccttgtggcgattcttttcaaaacaggatgatttaaacccatatgttgttccaatggctatgggcatttaacgtcaactagagagtcccttggatatgactacaagtactatcatcaggaggattgttgctaaccatgaagcttacctgtgtattgtcagctttcaaactcgatgaaccaactgagaaagtactgcttatgaagctagagaagcatggaaggagtgttgctgaatcaaaggcaaaagaagaagctggaagagttttgatttgcatgaaggataggtcctcgacacagttcagcagagatgctggctctatgcccaaggtgtggacaggaaaggaggacataaaagccataactaaaactgttcgctcagttgtacgccagatgctaatatttaatactctatatatagaatactgttgaagacgcttctaaagcactagagtattgtagcactgatggaaggccttcgatgaaatgtttccctgaaagttgcatactacatcgctgaagcactacaatattgtaacactgagggaaggcctttgtatcatgacctaaattcatatagggccctctttgatgaggtaattgttgctttggttttcacttttccttacaaccttcgaattatgtggctatgtctgaaaacttaatacttctacagttctcgggtcttcataccattccaatttgtgttagctaataaacaagtcaggctatgtctgaaaccagtatctaatagttctccgcccaacaaggaactgtgcaacataaaaacaaatcttaaacaagttacatgttctgaattttagaaactcaaactccactctaagggctaaccggctaaccgaacatgttatagaacaaactcagtcctaaattgtagacatattggaattctgcgtatgttttttccaacctatcttcaaactatacaagaattattatctaatataaacaatacattgacaataatgtacacaaaaatccatgtatttaatgtgtggacatggtatcatcatgtctgactaacccttttttactttcattgaatgaagttcgtacatgtatttgaggtattttttattttcttcctactataagccttgcttagatactgatctaagatcatctccaagggacagacaaaaaatcctagaggttctcacataagtacggtttagagaagggataaaccgaggaaagcctcccccacaaatacagaaaggctgcctcgaacctatgatttggtgactcagtgaaacaaacaactctcactactgcactaggcctgccattgtttacgagcatccccaagggccttacttaaattcactctctaaattttaatttggtgagccattttaataaaaatatgtttgataggttttttatcttctaacaatttttatgtatcttgtacgcactctagagaaccaacccactcactgctctttatttactgcatgctatttaggtctgctaagcaaaaaatgatattctttctcaatcttttgtcatgtttagataaatttggtggttttaggataaagtttgtgaagggcttcactttttttttctataattagaatttaactcaaaagttttcccttgaaattcaagttgattttgagaagtatgaagggatgattaaggtcatggagaaggtggtaatacagttaattctatggagctcactggaggagcactaccttttgccagttgcttgcaagaatgtaattggaatccgatgtgcttcatggcgcatcgtatcctccattgagtatagggaataaggttgtgtcaacatggaccgtgccactctcatcgagggctaccataacaagattgaagttgaactcaacaagatctgcgttggaatcctcaagctctttgcttcccaccttcccccctcattaatagttccaaagtccaaggtcttctacctcaagatgaagggtgattactacaggatattgctttggaggagttggcccccttatcctattaggctttggctgatgcttaacctctcaactctcctgatcttgctcgtggtctccccaaacaggcaaagccaacgaatgaaagggactcactcgcagcaacaaccaaaaagctgatcacgcattctccttttcacatttgttgcatttaattaattcatccaatagcataaattggcactccttttgtgttattgctctttggttggtcttattgttgttgttgtactgcttgccatgtgtattttatcataagtgttgttttggctaatccctaacgatgcaatacatttgagcaacaattcaattgttttgttttttgaacagttattctaaatacccaatgttcacagcatatttcacttcccatggttcactgttttgttgtattagtagctctaattctaaggtgtcaatgaatcttaggcgaaagaattgttcgtagtagtggtccagaacagacttcatactgtgatttacagac

SEQ ID NO: 218712 - DNA, 4237 bp, Zea Mays
atggaccttgacgcggctgcagaggaggaggagcgccggcttgaggactacaatgaggcgcaggatgctaggtacttcctggggtttggtgacacccatggagatcctattgaggttgatactgttgccggctctcaaattggcactggaaccgaatccactagcccgtcagaagcagtccctaatcctgatcaggctgctaatgctagtggtagcaacatgaagaaaaggtccaagtgctgggatgactttgatgaattgactaagattgtgaatggtaagaaagtcaggagccacgttgtgcctgccgccagccccgacacctccagatgttgcctccatccatcctccgagcttaccgcctcgcccccgcccccaaaccctagaccccctacaatcacgaggaaggggagaacggccgaggaggatgctccgcaaggaaggggaggacggtcgaggatgacgttgttgctcgtcgctgagcatcttcgcgccctcagtgctgccaaggagccctctctatccctgatggcgtcccaaccgttggccgatcgtcggcgatgatgacccagcctccctctccacgtccctgctccccaactcatacaggtgttgtggcgccctcctctccactcccctatctattttgttgtttgatgtctactttcttcgccgctctggttgcggcacgattggtgcaccacctcctcgtgcgaggtgagggcaagcctgcacatgctcaactccatcgacaacctcaccttcatgccactctgggagcatgccgagtggcgatgtgacgacttggtggtctatcgtcgttgcccttcgccaggtgtcgatctcttcgtcagtgaagagcatccaccagttccattcattcatttattatatggtgaatggccacaaaaccatattctatgatggcacaaggtcccaccaagatgcgtagccatgtgcaaaccatatttgtcatgtagccacaagggcccgtcgatctgttttggtttacaatgtggatgaaaacaacatggagctctggcttatgggggcttatcgatgccagcgaagcccgtgggagcaattgaagccattggacattggttgcacaacttgataaagtgaagaatctgcttgcgtctgagtttgggagtctataaacatggggaagagaaaatattggtgcctttgcaattggtgaccctgctgcaactatttttttctaggaattcacaagagcaatatggtacaccaatgccacacattggacaaacaacagttgaagttgatcttttgaattatggtgtgatagaaggtgatgaatcatgtaaacatttctctgaactaaaagtcttacatccatggatgatcaaagatggcatgaatcttacaaaggaacagagattagagaaaattgagtcacaaaaacttgaaaaatatgaagccaaaggtgacaagagacatgacttgaaagatgatcaaagtgtacaggaagaatacataaatgcatattatgaggccttgaggaaaagttggaagaggaagaagcaaaaagcagaatgcagcatgaaggcaagatttttgtccctgatgctcaaagggaacgccaagttgacaataaatacaagcaggatgatgatgaagaaggcattgaataagtattccagctttcttatatggacagtaggaacccaaggtttgctgtgtaatccattatcaacagttgcactcacattagccttgtggcgattcttttcaaaacaggatgatttaaacccatatgttgttccaatggctatgggcatttaacgtcaactagagagtcccttggatatgactacaagtactatcatcaggaggattgttgctaaccatgaagcttacctgtgtattgtcagctttcaaactcgatgaaccaactgagaaagtactgcttatgaagctagagaagcatggaaggagtgttgctgaatcaaaggcaaaagaagaagctggaagagttttgatttgcatgaaggataggtcctcgacacagttcagcagagatgctggctctatgcccaaggtgtggacaggaaaggaggacataaaagccataactaaaactgttcgctcagttgtacgccagatgctaatatttaatactctatatatagaatactgttgaagacgcttctaaagcactagagtattgtagcactgatggaaggccttcgatgaaatgtttccctgaaagttgcatactacatcgctgaagcactacaatattgtaacactgagggaaggcctttgtatcatgacctaaattcatatagggccctctttgatgaggtaattgttgctttggttttcacttttccttacaaccttcgaattatgtggctatgtctgaaaacttaatacttctacagttctcgggtcttcataccattccaatttgtgttagctaataaacaagtcaggctatgtctgaaaccagtatctaatagttctccgcccaacaaggaactgtgcaacataaaaacaaatcttaaacaagttacatgttctgaattttagaaactcaaactccactctaagggctaaccggctaaccgaacatgttatagaacaaactcagtcctaaattgtagacatattggaattctgcgtatgttttttccaacctatcttcaaactatacaagaattattatctaatataaacaatacattgacaataatgtacacaaaaatccatgtatttaatgtgtggacatggtatcatcatgtctgactaacccttttttactttcattgaatgaagttcgtacatgtatttgaggtattttttattttcttcctactataagccttgcttagatactgatctaagatcatctccaagggacagacaaaaaatcctagaggttctcacataagtacggtttagagaagggataaaccgaggaaagcctcccccacaaatacagaaaggctgcctcgaacctatgatttggtgactcagtgaaacaaacaactctcactactgcactaggcctgccattgtttacgagcatccccaagggccttacttaaattcactctctaaattttaatttggtgagccattttaataaaaatatgtttgataggttttttatcttctaacaatttttatgtatcttgtacgcactctagagaaccaacccactcactgctctttatttactgcatgctatttaggtctgctaagcaaaaaatgatattctttctcaatcttttgtcatgtttagataaatttggtggttttaggataaagtttgtgaagggcttcactttttttttctataattagaatttaactcaaaagttttcccttgaaattcaagttgattttgagaagtatgaagggatgattaaggtcatggagaaggtggtaatacagttaattctatggagctcactggaggagcactaccttttgccagttgcttgcaagaatgtaattggaatccgatgtgcttcatggcgcatcgtatcctccattgagtatagggaataaggttgtgtcaacatggaccgtgccactctcatcgagggctaccataacaagattgaagttgaactcaacaagatctgcgttggaatcctcaagctctttgcttcccaccttcccccctcattaatagttccaaagtccaaggtcttctacctcaagatgaagggtgattactacaggatattgctttggaggagttggcccccttatcctattaggctttggctgatgcttaacctctcaactctcctgatcttgctcgtggtctccccaaacaggcaaagccaacgaatgaaagggactcactcgcagcaacaaccaaaaagctgatcacgcattctccttttcacatttgttgcatttaattaattcatccaatagcataaattggcactccttttgtgttattgctctttggttggtcttattgttgttgttgtactgcttgccatgtgtattttatcataagtgttgttttggctaatccctaacgatgcaatacatttgagcaacaattcaattgttttgttttttgaacagttattctaaatacccaatgttcacagcatatttcacttcccatggttcactgttttgttgtattagtagctctaattctaaggtgtcaatgaatcttaggcgaaagaattgttcgtagtagtggtccagaacagacttcatactgtgatttacagac

SEQ ID NO: 218713 - DNA, 4465 bp, Zea Mays
atggaccttgacgcggctgcagaggaggaggagcgccggcttgaggactacaatgaggcgcaggatgctaggtacttcctggggtttggtgacacccatggagatcctattgaggttgatactgttgccggctctcaaattggcactggaaccgaatccactagcccgtcagaagcagtccctaatcctgatcaggctgctaatgctagtggtagcaacatgaagaaaaggtccaagtgctgggatgactttgatgaattgactaagattgtgaatggtaagaaagtcaggagccacgttgtgcctgccgccagccccgacacctccagatgttgcctccatccatcctccgagcttaccgcctcgcccccgcccccaaaccctagaccccctacaatcacgaggaaggggagaacggccgaggaggatgctccgcaaggaaggggaggacggtcgaggatgacgttgttgctcgtcgctgagcatcttcgcgccctcagtgctgccaaggagccctctctatccctgatggcgtcccaaccgttggccgatcgtcggcgatgatgacccagcctccctctccacgtccctgctccccaactcatacaggtgttgtggcgccctcctctccactcccctatctattttgttgtttgatgtctactttcttcgccgctctggttgcggcacgattggtgcaccacctcctcgtgcgaggtgagggcaagcctgcacatgctcaactccatcgacaacctcaccttcatgccactctgggagcatgccgagtggcgatgtgacgacttggtggtctatcgtcgttgcccttcgccaggtgtcgatctcttcgtcagtgaagagcatccaccagttccattcattcatttattatatggtgaatggccacaaaaccatattctatgatggcacaaggtcccaccaagatgcgtagccatgtgcaaaccatatttgtcatgtagccacaagggcccgtcgatctgttttggtttacaatgtggatgaaaacaacatggagctctggcttatgggggcttatcgatgccagcgaagcccgtgggagcaattgaagccattggacattggttgcacaacttgataaagtgaagaatctgcttgcgtctgagtttgggagtctataaacatggggaagagaaaatattggtgcctttgcaattggtgaccctgctgcaactatttttttctaggaattcacaagagcaatatggtacaccaatgccacacattggacaaacaacagttgaagttgatcttttgaattatggtgtgatagaaggtgatgaatcatgtaaacatttctctgaactaaaagtcttacatccatggatgatcaaagatggcatgaatcttacaaaggaacagagattagagaaaattgagtcacaaaaacttgaaaaatatgaagccaaaggtgacaagagacatgacttgaaagatgatcaaagtgtacaggaagaatacataaatgcatattatgaggccttgaggaaaagttggaagaggaagaagcaaaaagcagaatgcagcatgaaggcaagatttttgtccctgatgctcaaagggaacgccaagttgacaataaatacaagcaggatgatgatgaagaaggcattgaataagtattccagctttcttatatggacagtaggaacccaaggtttgctgtgtaatccattatcaacagttgcactcacattagccttgtggcgattcttttcaaaacaggatgatttaaacccatatgttgttccaatggctatgggcatttaacgtcaactagagagtcccttggatatgactacaagtactatcatcaggaggattgttgctaaccatgaagcttacctgtgtattgtcagctttcaaactcgatgaaccaactgagaaagtactgcttatgaagctagagaagcatggaaggagtgttgctgaatcaaaggcaaaagaagaagctggaagagttttgatttgcatgaaggataggtcctcgacacagttcagcagagatgctggctctatgcccaaggtgtggacaggaaaggaggacataaaagccataactaaaactgttcgctcagttgtacgccagatgctaatatttaatactctatatatagaatactgttgaagacgcttctaaagcactagagtattgtagcactgatggaaggccttcgatgaaatgtttccctgaaagttgcatactacatcgctgaagcactacaatattgtaacactgagggaaggcctttgtatcatgacctaaattcatatagggccctctttgatgaggtaattgttgctttggttttcacttttccttacaaccttcgaattatgtggctatgtctgaaaacttaatacttctacagttctcgggtcttcataccattccaatttgtgttagctaataaacaagtcaggctatgtctgaaaccagtatctaatagttctccgcccaacaaggaactgtgcaacataaaaacaaatcttaaacaagttacatgttctgaattttagaaactcaaactccactctaagggctaaccggctaaccgaacatgttatagaacaaactcagtcctaaattgtagacatattggaattctgcgtatgttttttccaacctatcttcaaactatacaagaattattatctaatataaacaatacattgacaataatgtacacaaaaatccatgtatttaatgtgtggacatggtatcatcatgtctgactaacccttttttactttcattgaatgaagttcgtacatgtatttgaggtattttttattttcttcctactataagccttgcttagatactgatctaagatcatctccaagggacagacaaaaaatcctagaggttctcacataagtacggtttagagaagggataaaccgaggaaagcctcccccacaaatacagaaaggctgcctcgaacctatgatttggtgactcagtgaaacaaacaactctcactactgcactaggcctgccattgtttacgagcatccccaagggccttacttaaattcactctctaaattttaatttggtgagccattttaataaaaatatgtttgataggttttttatcttctaacaatttttatgtatcttgtacgcactctagagaaccaacccactcactgctctttatttactgcatgctatttaggtctgctaagcaaaaaatgatattctttctcaatcttttgtcatgtttagataaatttggtggttttaggataaagtttgtgaagggcttcactttttttttctataattagaatttaactcaaaagttttcccttgaaattcaagttgattttgagaagtatgaagggatgattaaggtcatggagaaggtggtaatacagttaattctatggagctcactggaggagcactaccttttgccagttgcttgcaagaatgtaattggaatccgatgtgcttcatggcgcatcgtatcctccattgagtatagggaataaggttgtgtcaacatggaccgtgccactctcatcgagggctaccataacaagattgaagttgaactcaacaagatctgcgttggaatcctcaagctctttgcttcccaccttcccccctcattaatagttccaaagtccaaggtcttctacctcaagatgaagggtgattactacaggatattgctttggaggagttggcccccttatcctattaggctttggctgatgcttaacctctcaactctcctgatcttgctcgtggtctccccaaacagattgacacggtgggaggaaaaagacaatggtcagcaacttactcggagcagaaattttttaattgtggtacccgtggtgctgtaagtttcatctcatcctcttgtagttcacacttgaacaaagtactctttagattctatacaggcagcgattgcttgtgcaattatattccacttcattcctaattaacaatttgggtcttatgattgacgactttgactttatcaccataaataaacctgacacacgaattatatctggattctggaacaggttcaataagagagcatcatagtgttgcataaataagtgtgcttatgattcatatttgctcattgcaaattggagttatttgtgttgtttctttgtatactcaacaaagagatgttaaccacttgtgtttatctcattgccacactcagttatgtcacgtaacttcattttcatgttttattttgttccagcaatgtagtttatctttgttttaatagctctttctttgtaaaacaacattttgttgtggttattatgcggataagagaacctaaaactacaacactgatgtttgtgtgacataagagaacctaaaacacattgatgacgtttggggccaagaactatagtggggtggttgatgtacttggag

SEQ ID NO: 218714 - DNA, 4114 bp, Zea Mays
atggaccttgacgcggctgcagaggaggaggagcgccggcttgaggactacaatgaggcgcaggatgctaggtacttcctggggtttggtgacacccatggagatcctattgaggttgatactgttgccggctctcaaattggcactggaaccgaatccactagcccgtcagaagcagtccctaatcctgatcaggctgctaatgctagtggtagcaacatgaagaaaaggtccaagtgctgggatgactttgatgaattgactaagattgtgaatggtaagaaagtcaggagccacgttgtgcctgccgccagccccgacacctccagatgttgcctccatccatcctccgagcttaccgcctcgcccccgcccccaaaccctagaccccctacaatcacgaggaaggggagaacggccgaggaggatgctccgcaaggaaggggaggacggtcgaggatgacgttgttgctcgtcgctgagcatcttcgcgccctcagtgctgccaaggagccctctctatccctgatggcgtcccaaccgttggtgttgtggcgccctcctctccactcccctatctattttgttgtttgatgtctactttcttcgccgctctggttgcggcacgattggtgcaccacctcctcgtgcgaggtgagggcaagcctgcacatgctcaactccatcgacaacctcaccttcatgccactctgggagcatgccgagtggcgatgtgacgacttggtggtctatcgtcgttgcccttcgccaggtgtcgatctcttcgtcagtgaagagcatccaccagttccattcattcatttattatatggtgaatggccacaaaaccatattctatgatggcacaaggtcccaccaagatgcgtagccatgtgcaaaccatatttgtcatgtagccacaagggcccgtcgatctgttttggtttacaatgtggatgaaaacaacatggagctctggcttatgggggcttatcgatgccagcgaagcccgtgggagcaattgaagccattggacattggttgcacaacttgataaagtgaagaatctgcttgcgtctgagtttgggagtctataaacatggggaagagaaaatattggtgcctttgcaattggtgaccctgctgcaactatttttttctaggaattcacaagagcaatatggtacaccaatgccacacattggacaaacaacagttgaagttgatcttttgaattatggtgtgatagaaggtgatgaatcatgtaaacatttctctgaactaaaagtcttacatccatggatgatcaaagatggcatgaatcttacaaaggaacagagattagagaaaattgagtcacaaaaacttgaaaaatatgaagccaaaggtgacaagagacatgacttgaaagatgatcaaagtgtacaggaagaatacataaatgcatattatgaggccttgaggaaaagttggaagaggaagaagcaaaaagcagaatgcagcatgaaggcaagatttttgtccctgatgctcaaagggaacgccaagttgacaataaatacaagcaggatgatgatgaagaaggcattgaataagtattccagctttcttatatggacagtaggaacccaaggtttgctgtgtaatccattatcaacagttgcactcacattagccttgtggcgattcttttcaaaacaggatgatttaaacccatatgttgttccaatggctatgggcatttaacgtcaactagagagtcccttggatatgactacaagtactatcatcaggaggattgttgctaaccatgaagcttacctgtgtattgtcagctttcaaactcgatgaaccaactgagaaagtactgcttatgaagctagagaagcatggaaggagtgttgctgaatcaaaggcaaaagaagaagctggaagagttttgatttgcatgaaggataggtcctcgacacagttcagcagagatgctggctctatgcccaagctgttgaagacgcttctaaagcactagagtattgtagcactgatggaaggccttcgatgaaatgtttccctgaaagttgcatactacatcgctgaagcactacaatattgtaacactgagggaaggcctttgtatcatgacctaaattcatatagggccctctttgatgaggtaattgttgctttggttttcacttttccttacaaccttcgaattatgtggctatgtctgaaaacttaatacttctacagttctcgggtcttcataccattccaatttgtgttagctaataaacaagtcaggctatgtctgaaaccagtatctaatagttctccgcccaacaaggaactgtgcaacataaaaacaaatcttaaacaagttacatgttctgaattttagaaactcaaactccactctaagggctaaccggctaaccgaacatgttatagaacaaactcagtcctaaattgtagacatattggaattctgcgtatgttttttccaacctatcttcaaactatacaagaattattatctaatataaacaatacattgacaataatgtacacaaaaatccatgtatttaatgtgtggacatggtatcatcatgtctgactaacccttttttactttcattgaatgaagttcgtacatgtatttgaggtattttttattttcttcctactataagccttgcttagatactgatctaagatcatctccaagggacagacaaaaaatcctagaggttctcacataagtacggtttagagaagggataaaccgaggaaagcctcccccacaaatacagaaaggctgcctcgaacctatgatttggtgactcagtgaaacaaacaactctcactactgcactaggcctgccattgtttacgagcatccccaagggccttacttaaattcactctctaaattttaatttggtgagccattttaataaaaatatgtttgataggttttttatcttctaacaatttttatgtatcttgtacgcactctagagaaccaacccactcactgctctttatttactgcatgctatttaggtctgctaagcaaaaaatgatattctttctcaatcttttgtcatgtttagataaatttggtggttttaggataaagtttgtgaagggcttcactttttttttctataattagaatttaactcaaaagttttcccttgaaattcaagttgattttgagaagtatgaagggatgattaaggtcatggagaaggtggtaatacagttaattctatggagctcactggaggagcactaccttttgccagttgcttgcaagaatgtaattggaatccgatgtgcttcatggcgcatcgtatcctccattgagtatagggaataaggttgtgtcaacatggaccgtgccactctcatcgagggctaccataacaagattgaagttgaactcaacaagatctgcgttggaatcctcaagctctttgcttcccaccttcccccctcattaatagttccaaagtccaaggtcttctacctcaagatgaagggtgattactacaggatattgctttggaggagttggcccccttatcctattaggctttggctgatgcttaacctctcaactctcctgatcttgctcgtggtctccccaaacagattgacacggtgggaggaaaaagacaatggtcagcaacttactcggagcagaaattttttaattgtggtacccgtggtgctgttcaataagagagcatcatagtgttgcataaataagtgtgcttatgattcatatttgctcattgcaaattggagttatttgtgttgtttctttgtatactcaacaaagagatgttaaccacttgtgtttatctcattgccacactcagttatgtcacgtaacttcattttcatgttttattttgttccagcaatgtagtttatctttgttttaatagctctttctttgtaaaacaacattttgttgtggttattatgcggataagagaacctaaaactacaacactgatgtttgtgtgacataagagaacctaaaacacattgatgacgtttggggccaagaactatagtggggtggttgatgtacttggag

SEQ ID NO: 218715 - DNA, 3491 bp, Zea Mays
atggaccttgacgcggctgcagaggaggaggagcgccggcttgaggactacaatgaggcgcaggatgctaggtacttcctggggtttggtgacacccatggagatcctattgaggttgatactgttgccggctctcaaattggcactggaaccgaatccactagcccgtcagaagcagtccctaatcctgatcaggctgctaatgctagtggtagcaacatgaagaaaaggtccaagtgctgggatgactttgatgaattgactaagattgtgaatggtaagaaagtcaggagccacgttgtgcctgccgccagccccgacacctccagatgttgcctccatccatcctccgagcttaccgcctcgcccccgcccccaaaccctagaccccctacaatcacgaggaaggggagaacggccgaggaggatgctccgcaaggaaggggaggacggtcgaggatgacgttgttgctcgtcgctgagcatcttcgcgccctcagtgctgccaaggagccctctctatccctgatggcgtcccaaccgttggtaatatctccgcctcggccatgggcattgcaaccctcgattcaatctctcctcttcgatctcaggccgatcgtcggcgatgatgacccagcctccctctccacgtccctgctccccaactcatacaggtgttgtggcgccctcctctccactcccctatctattttgttgtttgatgtctactttcttcgccgctctggttgcggcacgattggtgcaccacctcctcgtgcgaggtgagggcaagcctgcacatgctcaactccatcgacaacctcaccttcatgccactctgggagcatgccgagtggcgatgtgacgacttggtggtctatcgtcgttgcccttcgccaggtgtcgatctcttcgtcagtgaagagcatccaccagttccattcattcatttattatatggtgaatggccacaaaaccatattctatgatggcacaaggtcccaccaagatgcgtagccatgtgcaaaccatatttgtcatgtagccacaagggcccgtcgatctgttttggtttacaatgtggatgaaaacaacatggagctctggcttatgggggcttatcgatgccagcgaagcccgtgggagcaattgaagccattggacattggttgcacaacttgataaagtgaagaatctgcttgcgtctgagtttgggagtctataaacatggggaagagaaaatattggtgcctttgcaattggtgaccctgctgcaactatttttttctaggaattcacaagagcaatatggtacaccaatgccacacattggacaaacaacagttgaagttgatcttttgaattatggtgtgatagaaggtgatgaatcatgtaaacatttctctgaactaaaagtcttacatccatggatgatcaaagatggcatgaatcttacaaaggaacagagattagagaaaattgagtcacaaaaacttgaaaaatatgaagccaaaggtgacaagagacatgacttgaaagatgatcaaagtgtacaggaagaatacataaatgcatattatgaggccttgaggaaaagttggaagaggaagaagcaaaaagcagaatgcagcatgaaggcaagatttttgtccctgatgctcaaagggaacgccaagttgacaataaatacaagcaggatgatgatgaagaaggcattgaataagtattccagctttcttatatggacagtaggaacccaaggtttgctgtgtaatccattatcaacagttgcactcacattagccttgtggcgattcttttcaaaacaggatgatttaaacccatatgttgttccaatggctatgggcatttaacgtcaactagagagtcccttggatatgactacaagtactatcatcaggaggattgttgctaaccatgaagcttacctgtgtattgtcagctttcaaactcgatgaaccaactgagaaagtactgcttatgaagctagagaagcatggaaggagtgttgctgaatcaaaggcaaaagaagaagctggaagagttttgatttgcatgaaggataggtcctcgacacagttcagcagagatgctggctctatgcccaaggtgtggacaggaaaggaggacataaaagccataactaaaactgttcgctcagttgtacgccagatgctaatatttaatactctatatatagaatactgttgaagacgcttctaaagcactagagtattgtagcactgatggaaggccttcgatgaaatgtttccctgaaagttgcatactacatcgctgaagcactacaatattgtaacactgagggaaggcctttgtatcatgacctaaattcatatagggccctctttgatgagttgattttgagaagtatgaagggatgattaaggtcatggagaaggtggtaatacagttaattctatggagctcactggaggagcactaccttttgccagttgcttgcaagaatgtaattggaatccgatgtgcttcatggcgcatcgtatcctccattgagtatagggaataaggttgtgtcaacatggaccgtgccactctcatcgagggctaccataacaagattgaagttgaactcaacaagatctgcgttggaatcctcaagctctttgcttcccaccttcccccctcattaatagttccaaagtccaaggtcttctacctcaagatgaagggtgattactacaggatattgctttggaggagttggcccccttatcctattaggctttggctgatgcttaacctctcaactctcctgatcttgctcgtggtctccccaaacagattgacacggtgggaggaaaaagacaatggtcagcaacttactcggagcagaaattttttaattgtggtacccgtggtgctgtaagtttcatctcatcctcttgtagttcacacttgaacaaagtactctttagattctatacaggcagcgattgcttgtgcaattatattccacttcattcctaattaacaatttgggtcttatgattgacgactttgactttatcaccataaataaacctgacacacgaattatatctggattctggaacaggttcaataagagagcatcatagtgttgcataaataagtgtgcttatgattcatatttgctcattgcaaattggagttatttgtgttgtttctttgtatactcaacaaagagatgttaaccacttgtgtttatctcattgccacactcagttatgtcacgtaacttcattttcatgttttattttgttccagcaatgtagtttatctttgttttaatagctctttctttgtaaaacaacattttgttgtggttattatgcggataagagaacctaaaactacaacactgatgtttgtgtgacataagagaacctaaaacacattgatgacgtttggggccaagaactatagtggggtggttgatgtacttggag

SEQ ID NO: 218716 - DNA, 4392 bp, Zea Mays
atggaccttgacgcggctgcagaggaggaggagcgccggcttgaggactacaatgaggcgcaggatgctaggtacttcctggggtttggtgacacccatggagatcctattgaggttgatactgttgccggctctcaaattggcactggaaccgaatccactagcccgtcagaagcagtccctaatcctgatcaggctgctaatgctagtggtagcaacatgaagaaaaggtccaagtgctgggatgactttgatgaattgactaagattgtgaatggtaagaaagtcaggagccacgttgtgcctgccgccagccccgacacctccagatgttgcctccatccatcctccgagcttaccgcctcgcccccgcccccaaaccctagaccccctacaatcacgaggaaggggagaacggccgaggaggatgctccgcaaggaaggggaggacggtcgaggatgacgttgttgctcgtcgctgagcatcttcgcgccctcagtgctgccaaggagccctctctatccctgatggcgtcccaaccgttggtaatatctccgcctcggccatgggcattgcaaccctcgattcaatctctcctcttcgatctcaggccgatcgtcggcgatgatgacccagcctccctctccacgtccctgctccccaactcatacaggtgttgtggcgccctcctctccactcccctatctattttgttgtttgatgtctactttcttcgccgctctggttgcggcacgattggtgcaccacctcctcgtgcgaggtgagggcaagcctgcacatgctcaactccatcgacaacctcaccttcatgccactctgggagcatgccgagtggcgatgtgacgacttggtggtctatcgtcgttgcccttcgccaggtgtcgatctcttcgtcagtgaagagcatccaccagttccattcattcatttattatatggtgaatggccacaaaaccatattctatgatggcacaaggtcccaccaagatgcgtagccatgtgcaaaccatatttgtcatgtagccacaagggcccgtcgatctgttttggtttacaatgtggatgaaaacaacatggagctctggcttatgggggcttatcgatgccagcgaagcccgtgggagcaattgaagccattggacattggttgcacaacttgataaagtgaagaatctgcttgcgtctgagtttgggagtctataaacatggggaagagaaaatattggtgcctttgcaattggtgaccctgctgcaactatttttttctaggaattcacaagagcaatatggtacaccaatgccacacattggacaaacaacagttgaagttgatcttttgaattatggtgtgatagaaggtgatgaatcatgtaaacatttctctgaactaaaagtcttacatccatggatgatcaaagatggcatgaatcttacaaaggaacagagattagagaaaattgagtcacaaaaacttgaaaaatatgaagccaaaggtgacaagagacatgacttgaaagatgatcaaagtgtacaggaagaatacataaatgcatattatgaggccttgaggaaaagttggaagaggaagaagcaaaaagcagaatgcagcatgaaggcaagatttttgtccctgatgctcaaagggaacgccaagttgacaataaatacaagcaggatgatgatgaagaaggcattgaataagtattccagctttcttatatggacagtaggaacccaaggtttgctgtgtaatccattatcaacagttgcactcacattagccttgtggcgattcttttcaaaacaggatgatttaaacccatatgttgttccaatggctatgggcatttaacgtcaactagagagtcccttggatatgactacaagtactatcatcaggaggattgttgctaaccatgaagcttacctgtgtattgtcagctttcaaactcgatgaaccaactgagaaagtactgcttatgaagctagagaagcatggaaggagtgttgctgaatcaaaggcaaaagaagaagctggaagagttttgatttgcatgaaggatagctgttgaagacgcttctaaagcactagagtattgtagcactgatggaaggccttcgatgaaatgtttccctgaaagttgcatactacatcgctgaagcactacaatattgtaacactgagggaaggcctttgtatcatgacctaaattcatatagggccctctttgatgaggtaattgttgctttggttttcacttttccttacaaccttcgaattatgtggctatgtctgaaaacttaatacttctacagttctcgggtcttcataccattccaatttgtgttagctaataaacaagtcaggctatgtctgaaaccagtatctaatagttctccgcccaacaaggaactgtgcaacataaaaacaaatcttaaacaagttacatgttctgaattttagaaactcaaactccactctaagggctaaccggctaaccgaacatgttatagaacaaactcagtcctaaattgtagacatattggaattctgcgtatgttttttccaacctatcttcaaactatacaagaattattatctaatataaacaatacattgacaataatgtacacaaaaatccatgtatttaatgtgtggacatggtatcatcatgtctgactaacccttttttactttcattgaatgaagttcgtacatgtatttgaggtattttttattttcttcctactataagccttgcttagatactgatctaagatcatctccaagggacagacaaaaaatcctagaggttctcacataagtacggtttagagaagggataaaccgaggaaagcctcccccacaaatacagaaaggctgcctcgaacctatgatttggtgactcagtgaaacaaacaactctcactactgcactaggcctgccattgtttacgagcatccccaagggccttacttaaattcactctctaaattttaatttggtgagccattttaataaaaatatgtttgataggttttttatcttctaacaatttttatgtatcttgtacgcactctagagaaccaacccactcactgctctttatttactgcatgctatttaggtctgctaagcaaaaaatgatattctttctcaatcttttgtcatgtttagataaatttggtggttttaggataaagtttgtgaagggcttcactttttttttctataattagaatttaactcaaaagttttcccttgaaattcaagttgattttgagaagtatgaagggatgattaaggtcatggagaaggtggtaatacagttaattctatggagctcactggaggagcactaccttttgccagttgcttgcaagaatgtaattggaatccgatgtgcttcatggcgcatcgtatcctccattgagtatagggaataaggttgtgtcaacatggaccgtgccactctcatcgagggctaccataacaagattgaagttgaactcaacaagatctgcgttggaatcctcaagctctttgcttcccaccttcccccctcattaatagttccaaagtccaaggtcttctacctcaagatgaagggtgattactacaggatattgctttggaggagttggcccccttatcctattaggctttggctgatgcttaacctctcaactctcctgatcttgctcgtggtctccccaaacagattgacacggtgggaggaaaaagacaatggtcagcaacttactcggagcagaaattttttaattgtggtacccgtggtgctgtaagtttcatctcatcctcttgtagttcacacttgaacaaagtactctttagattctatacaggcagcgattgcttgtgcaattatattccacttcattcctaattaacaatttgggtcttatgattgacgactttgactttatcaccataaataaacctgacacacgaattatatctggattctggaacaggttcaataagagagcatcatagtgttgcataaataagtgtgcttatgattcatatttgctcattgcaaattggagttatttgtgttgtttctttgtatactcaacaaagagatgttaaccacttgtgtttatctcattgccacactcagttatgtcacgtaacttcattttcatgttttattttgttccagcaatgtagtttatctttgttttaatagctctttctttgtaaaacaacattttgttgtggttattatgcggataagagaacctaaaactacaacactgatgtttgtgtgacataagagaacctaaaacacattgatgacgtttggggccaagaactatagtggggtggttgatgtacttggag

SEQ ID NO: 218717 - DNA, 3595 bp, Zea Mays
caccagcctcatccgttctcctcgccccatccgcatccgccgccagcggccgaatgtcgcgcaggccaacctcgcgccccatccgcatccgccacatgccacacatgtccaacatcgccagcctcgtccgggagccatgagcaacctcccactccccaccaacacgccttcgcctcacctcgtgatgcccgggacctgcagcagtcgccgcctcccctgagcgtctgagatgcagctccacgctcatctgcgtcccccgccgcaggagccacgttgtgcctgccgccagccccgacacctccagatgttgcctccatccatcctccgagcttaccgcctcgcccccgcccccaaaccctagaccccctacaatcacgaggaaggggagaacggccgaggaggatgctccgcaaggaaggggaggacggtcgaggatgacgttgttgctcgtcgctgagcatcttcgcgccctcagtgctgccaaggagccctctctatccctgatggcgtcccaaccgttggccgatcgtcggcgatgatgacccagcctccctctccacgtccctgctccccaactcatacaggaattcacaagagcaatatggtacaccaatgccacacattggacaaacaacagttgaagttgatcttttgaattatggtgtgatagaaggtgatgaatcatgtaaacatttctctgaactaaaagtcttacatccatggatgatcaaagatggcatgaatcttacaaaggaacagagattagagaaaattgagtcacaaaaacttgaaaaatatgaagccaaaggtgacaagagacatgacttgaaagatgatcaaagtgtacaggaagaatacataaatgcatattatgaggccttgaggaaaagttggaagaggaagaagcaaaaagcagaatgcagcatgaaggcaagatttttgtccctgatgctcaaagggaacgccaagttgacaataaatacaagcaggatgatgatgaagaaggcattgaataagtattccagctttcttatatggacagtaggaacccaaggtttgctgtgtaatccattatcaacagttgcactcacattagccttgtggcgattcttttcaaaacaggatgatttaaacccatatgttgttccaatggctatgggcatttaacgtcaactagagagtcccttggatatgactacaagtactatcatcaggaggattgttgctaaccatgaagcttacctgtgtattgtcagctttcaaactcgatgaaccaactgagaaagtactgcttatgaagctagagaagcatggaaggagtgttgctgaatcaaaggcaaaagaagaagctggaagagttttgatttgcatgaaggataggtcctcgacacagttcagcagagatgctggctctatgcccaaggtgtggacaggaaaggaggacataaaagccataactaaaactgttcgctcagttgtacgccagatgctaatatttaatactctatatatagaatactgttgaagacgcttctaaagcactagagtattgtagcactgatggaaggccttcgatgaaatgtttccctgaaagttgcatactacatcgctgaagcactacaatattgtaacactgagggaaggcctttgtatcatgacctaaattcatatagggccctctttgatgaggtaattgttgctttggttttcacttttccttacaaccttcgaattatgtggctatgtctgaaaacttaatacttctacagttctcgggtcttcataccattccaatttgtgttagctaataaacaagtcaggctatgtctgaaaccagtatctaatagttctccgcccaacaaggaactgtgcaacataaaaacaaatcttaaacaagttacatgttctgaattttagaaactcaaactccactctaagggctaaccggctaaccgaacatgttatagaacaaactcagtcctaaattgtagacatattggaattctgcgtatgttttttccaacctatcttcaaactatacaagaattattatctaatataaacaatacattgacaataatgtacacaaaaatccatgtatttaatgtgtggacatggtatcatcatgtctgactaacccttttttactttcattgaatgaagttcgtacatgtatttgaggtattttttattttcttcctactataagccttgcttagatactgatctaagatcatctccaagggacagacaaaaaatcctagaggttctcacataagtacggtttagagaagggataaaccgaggaaagcctcccccacaaatacagaaaggctgcctcgaacctatgatttggtgactcagtgaaacaaacaactctcactactgcactaggcctgccattgtttacgagcatccccaagggccttacttaaattcactctctaaattttaatttggtgagccattttaataaaaatatgtttgataggttttttatcttctaacaatttttatgtatcttgtacgcactctagagaaccaacccactcactgctctttatttactgcatgctatttaggtctgctaagcaaaaaatgatattctttctcaatcttttgtcatgtttagataaatttggtggttttaggataaagtttgtgaagggcttcactttttttttctataattagaatttaactcaaaagttttcccttgaaattcaagttgattttgagaagtatgaagggatgattaaggtcatggagaaggtggtaatacagttaattctatggagctcactggaggagcactaccttttgccagttgcttgcaagaatgtaattggaatccgatgtgcttcatggcgcatcgtatcctccattgagtatagggaataaggttgtgtcaacatggaccgtgccactctcatcgagggctaccataacaagattgaagttgaactcaacaagatctgcgttggaatcctcaagctctttgcttcccaccttcccccctcattaatagttccaaagtccaaggtcttctacctcaagatgaagggtgattactacaggatattgctttggaggagttggcccccttatcctattaggctttggctgatgcttaacctctcaactctcctgatcttgctcgtggtctccccaaacaggcaaagccaacgaatgaaagggactcactcgcagcaacaaccaaaaagctgatcacgcattctccttttcacatttgttgcatttaattaattcatccaatagcataaattggcactccttttgtgttattgctctttggttggtcttattgttgttgttgtactgcttgccatgtgtattttatcataagtgttgttttggctaatccctaacgatgcaatacatttgagcaacaattcaattgttttgttttttgaacagttattctaaatacccaatgttcacagcatatttcacttcccatggttcactgttttgttgtattagtagctctaattctaaggtgtcaatgaatcttaggcgaaagaattgttcgtagtagtggtccagaacagacttcatactgtgatttacagac

SEQ ID NO: 218718 - DNA, 3450 bp, Zea Mays
ctcatccgttctcctcgccccatccgcatccgccgccagcggccgaatgtcgcgcaggccaacctcgcgccccatccgcatccgccacatgccacacatgtccaacatcgccagcctcgtccgggagccatgagcaacctcccactccccaccaacacgccttcgcctcacctcgtgatgcccgggacctgcagcagtcgccgcctcccctgagcgtctgagatgcagctccacgctcatctgcgtcccccgccgcaggagccacgttgtgcctgccgccagccccgacacctccagatgttgcctccatccatcctccgagcttaccgcctcgcccccgcccccaaaccctagaccccctacaatcacgaggaaggggagaacggccgaggaggatgctccgcaaggaaggggaggacggtcgaggatgacgttgttgctcgtcgctgagcatcttcgcgccctcagtgctgccaaggagccctctctatccctgatggcgtcccaaccgttggccgatcgtcggcgatgatgacccagcctccctctccacgtccctgctccccaactcatacaggaattcacaagagcaatatggtacaccaatgccacacattggacaaacaacagttgaagttgatcttttgaattatggtgtgatagaaggtgatgaatcatgtaaacatttctctgaactaaaagtcttacatccatggatgatcaaagatggcatgaatcttacaaaggaacagagattagagaaaattgagtcacaaaaacttgaaaaatatgaagccaaaggtgacaagagacatgacttgaaagatgatcaaagtgtacaggaagaatacataaatgcatattatgaggccttgaggaaaagttggaagaggaagaagcaaaaagcagaatgcagcatgaaggcaagatttttgtccctgatgctcaaagggaacgccaagttgacaataaatacaagcaggatgatgatgaagaaggcattgaataagtattccagctttcttatatggacagtaggaacccaaggtttgctgtgtaatccattatcaacagttgcactcacattagccttgtggcgattcttttcaaaacaggatgatttaaacccatatgttgttccaatggctatgggcatttaacgtcaactagagagtcccttggatatgactacaagtactatcatcaggaggattgttgctaaccatgaagcttacctgtgtattgtcagctttcaaactcgatgaaccaactgagaaagtactgcttatgaagctagagaagcatggaaggagtgttgctgaatcaaaggcaaaagaagaagctggaagagttttgatttgcatgaaggatagctgttgaagacgcttctaaagcactagagtattgtagcactgatggaaggccttcgatgaaatgtttccctgaaagttgcatactacatcgctgaagcactacaatattgtaacactgagggaaggcctttgtatcatgacctaaattcatatagggccctctttgatgaggtaattgttgctttggttttcacttttccttacaaccttcgaattatgtggctatgtctgaaaacttaatacttctacagttctcgggtcttcataccattccaatttgtgttagctaataaacaagtcaggctatgtctgaaaccagtatctaatagttctccgcccaacaaggaactgtgcaacataaaaacaaatcttaaacaagttacatgttctgaattttagaaactcaaactccactctaagggctaaccggctaaccgaacatgttatagaacaaactcagtcctaaattgtagacatattggaattctgcgtatgttttttccaacctatcttcaaactatacaagaattattatctaatataaacaatacattgacaataatgtacacaaaaatccatgtatttaatgtgtggacatggtatcatcatgtctgactaacccttttttactttcattgaatgaagttcgtacatgtatttgaggtattttttattttcttcctactataagccttgcttagatactgatctaagatcatctccaagggacagacaaaaaatcctagaggttctcacataagtacggtttagagaagggataaaccgaggaaagcctcccccacaaatacagaaaggctgcctcgaacctatgatttggtgactcagtgaaacaaacaactctcactactgcactaggcctgccattgtttacgagcatccccaagggccttacttaaattcactctctaaattttaatttggtgagccattttaataaaaatatgtttgataggttttttatcttctaacaatttttatgtatcttgtacgcactctagagaaccaacccactcactgctctttatttactgcatgctatttaggtctgctaagcaaaaaatgatattctttctcaatcttttgtcatgtttagataaatttggtggttttaggataaagtttgtgaagggcttcactttttttttctataattagaatttaactcaaaagttttcccttgaaattcaagttgattttgagaagtatgaagggatgattaaggtcatggagaaggtggtaatacagttaattctatggagctcactggaggagcactaccttttgccagttgcttgcaagaatgtaattggaatccgatgtgcttcatggcgcatcgtatcctccattgagtatagggaataaggttgtgtcaacatggaccgtgccactctcatcgagggctaccataacaagattgaagttgaactcaacaagatctgcgttggaatcctcaagctctttgcttcccaccttcccccctcattaatagttccaaagtccaaggtcttctacctcaagatgaagggtgattactacaggatattgctttggaggagttggcccccttatcctattaggctttggctgatgcttaacctctcaactctcctgatcttgctcgtggtctccccaaacaggcaaagccaacgaatgaaagggactcactcgcagcaacaaccaaaaagctgatcacgcattctccttttcacatttgttgcatttaattaattcatccaatagcataaattggcactccttttgtgttattgctctttggttggtcttattgttgttgttgtactgcttgccatgtgtattttatcataagtgttgttttggctaatccctaacgatgcaatacatttgagcaacaattcaattgttttgttttttgaacagttattctaaatacccaatgttcacagcatatttcacttcccatggttcactgttttgttgtattagtagctctaattctaaggtgtcaatgaatcttaggcgaaagaattgttcgtagtagtggtccagaacagacttcatactgtgatttacagac

SEQ ID NO: 218719 - DNA, 3800 bp, Zea Mays
gccccatccgcatccgccgccagcggccgaatgtcgcgcaggccaacctcgcgccccatccgcatccgccacatgccacacatgtccaacatcgccagcctcgtccgggagccatgagcaacctcccactccccaccaacacgccttcgcctcacctcgtgatgcccgggacctgcagcagtcgccgcctcccctgagcgtctgagatgcagctccacgctcatctgcgtcccccgccgcaggagccacgttgtgcctgccgccagccccgacacctccagatgttgcctccatccatcctccgagcttaccgcctcgcccccgcccccaaaccctagaccccctacaatcacgaggaaggggagaacggccgaggaggatgctccgcaaggaaggggaggacggtcgaggatgacgttgttgctcgtcgctgagcatcttcgcgccctcagtgctgccaaggagccctctctatccctgatggcgtcccaaccgttggccgatcgtcggcgatgatgacccagcctccctctccacgtccctgctccccaactcatacaggaattcacaagagcaatatggtacaccaatgccacacattggacaaacaacagttgaagttgatcttttgaattatggtgtgatagaaggtgatgaatcatgtaaacatttctctgaactaaaagtcttacatccatggatgatcaaagatggcatgaatcttacaaaggaacagagattagagaaaattgagtcacaaaaacttgaaaaatatgaagccaaaggtgacaagagacatgacttgaaagatgatcaaagtgtacaggaagaatacataaatgcatattatgaggccttgaggaaaagttggaagaggaagaagcaaaaagcagaatgcagcatgaaggcaagatttttgtccctgatgctcaaagggaacgccaagttgacaataaatacaagcaggatgatgatgaagaaggcattgaataagtattccagctttcttatatggacagtaggaacccaaggtttgctgtgtaatccattatcaacagttgcactcacattagccttgtggcgattcttttcaaaacaggatgatttaaacccatatgttgttccaatggctatgggcatttaacgtcaactagagagtcccttggatatgactacaagtactatcatcaggaggattgttgctaaccatgaagcttacctgtgtattgtcagctttcaaactcgatgaaccaactgagaaagtactgcttatgaagctagagaagcatggaaggagtgttgctgaatcaaaggcaaaagaagaagctggaagagttttgatttgcatgaaggataggtcctcgacacagttcagcagagatgctggctctatgcccaaggtgtggacaggaaaggaggacataaaagccataactaaaactgttcgctcagttgtacgccagatgctaatatttaatactctatatatagaatactgttgaagacgcttctaaagcactagagtattgtagcactgatggaaggccttcgatgaaatgtttccctgaaagttgcatactacatcgctgaagcactacaatattgtaacactgagggaaggcctttgtatcatgacctaaattcatatagggccctctttgatgaggtaattgttgctttggttttcacttttccttacaaccttcgaattatgtggctatgtctgaaaacttaatacttctacagttctcgggtcttcataccattccaatttgtgttagctaataaacaagtcaggctatgtctgaaaccagtatctaatagttctccgcccaacaaggaactgtgcaacataaaaacaaatcttaaacaagttacatgttctgaattttagaaactcaaactccactctaagggctaaccggctaaccgaacatgttatagaacaaactcagtcctaaattgtagacatattggaattctgcgtatgttttttccaacctatcttcaaactatacaagaattattatctaatataaacaatacattgacaataatgtacacaaaaatccatgtatttaatgtgtggacatggtatcatcatgtctgactaacccttttttactttcattgaatgaagttcgtacatgtatttgaggtattttttattttcttcctactataagccttgcttagatactgatctaagatcatctccaagggacagacaaaaaatcctagaggttctcacataagtacggtttagagaagggataaaccgaggaaagcctcccccacaaatacagaaaggctgcctcgaacctatgatttggtgactcagtgaaacaaacaactctcactactgcactaggcctgccattgtttacgagcatccccaagggccttacttaaattcactctctaaattttaatttggtgagccattttaataaaaatatgtttgataggttttttatcttctaacaatttttatgtatcttgtacgcactctagagaaccaacccactcactgctctttatttactgcatgctatttaggtctgctaagcaaaaaatgatattctttctcaatcttttgtcatgtttagataaatttggtggttttaggataaagtttgtgaagggcttcactttttttttctataattagaatttaactcaaaagttttcccttgaaattcaagttgattttgagaagtatgaagggatgattaaggtcatggagaaggtggtaatacagttaattctatggagctcactggaggagcactaccttttgccagttgcttgcaagaatgtaattggaatccgatgtgcttcatggcgcatcgtatcctccattgagtatagggaataaggttgtgtcaacatggaccgtgccactctcatcgagggctaccataacaagattgaagttgaactcaacaagatctgcgttggaatcctcaagctctttgcttcccaccttcccccctcattaatagttccaaagtccaaggtcttctacctcaagatgaagggtgattactacaggatattgctttggaggagttggcccccttatcctattaggctttggctgatgcttaacctctcaactctcctgatcttgctcgtggtctccccaaacagattgacacggtgggaggaaaaagacaatggtcagcaacttactcggagcagaaattttttaattgtggtacccgtggtgctgtaagtttcatctcatcctcttgtagttcacacttgaacaaagtactctttagattctatacaggcagcgattgcttgtgcaattatattccacttcattcctaattaacaatttgggtcttatgattgacgactttgactttatcaccataaataaacctgacacacgaattatatctggattctggaacaggttcaataagagagcatcatagtgttgcataaataagtgtgcttatgattcatatttgctcattgcaaattggagttatttgtgttgtttctttgtatactcaacaaagagatgttaaccacttgtgtttatctcattgccacactcagttatgtcacgtaacttcattttcatgttttattttgttccagcaatgtagtttatctttgttttaatagctctttctttgtaaaacaacattttgttgtggttattatgcggataagagaacctaaaactacaacactgatgtttgtgtgacataagagaacctaaaacacattgatgacgtttggggccaagaactatagtggggtggttgatgtacttggag

SEQ ID NO: 218720 - DNA, 4554 bp, Zea Mays
ccccatccgcatccgccgccagcggccgaatgtcgcgcaggccaacctcgcgccccatccgcatccgccacatgccacacatgtccaacatcgccagcctcgtccgggagccatgagcaacctcccactccccaccaacacgccttcgcctcacctcgtgatgcccgggacctgcagcagtcgccgcctcccctgagcgtctgagatgcagctccacgctcatctgcgtcccccgccgcaggagccacgttgtgcctgccgccagccccgacacctccagatgttgcctccatccatcctccgagcttaccgcctcgcccccgcccccaaaccctagaccccctacaatcacgaggaaggggagaacggccgaggaggatgctccgcaaggaaggggaggacggtcgaggatgacgttgttgctcgtcgctgagcatcttcgcgccctcagtgctgccaaggagccctctctatccctgatggcgtcccaaccgttggtaatatctccgcctcggccatgggcattgcaaccctcgattcaatctctcctcttcgatctcaggccgatcgtcggcgatgatgacccagcctccctctccacgtccctgctccccaactcatacaggtgttgtggcgccctcctctccactcccctatctattttgttgtttgatgtctactttcttcgccgctctggttgcggcacgattggtgcaccacctcctcgtgcgaggtgagggcaagcctgcacatgctcaactccatcgacaacctcaccttcatgccactctgggagcatgccgagtggcgatgtgacgacttggtggtctatcgtcgttgcccttcgccaggtgtcgatctcttcgtcagtgaagagcatccaccagttccattcattcatttattatatggtgaatggccacaaaaccatattctatgatggcacaaggtcccaccaagatgcgtagccatgtgcaaaccatatttgtcatgtagccacaagggcccgtcgatctgttttggtttacaatgtggatgaaaacaacatggagctctggcttatgggggcttatcgatgccagcgaagcccgtgggagcaattgaagccattggacattggttgcacaacttgataaagtgaagaatctgcttgcgtctgagtttgggagtctataaacatggggaagagaaaatattggtgcctttgcaattggtgaccctgctgcaactatttttttctaggaattcacaagagcaatatggtacaccaatgccacacattggacaaacaacagttgaagttgatcttttgaattatggtgtgatagaaggtgatgaatcatgtaaacatttctctgaactaaaagtcttacatccatggatgatcaaagatggcatgaatcttacaaaggaacagagattagagaaaattgagtcacaaaaacttgaaaaatatgaagccaaaggtgacaagagacatgacttgaaagatgatcaaagtgtacaggaagaatacataaatgcatattatgaggccttgaggaaaagttggaagaggaagaagcaaaaagcagaatgcagcatgaaggcaagatttttgtccctgatgctcaaagggaacgccaagttgacaataaatacaagcaggatgatgatgaagaaggcattgaataattatacttcacattatcatgtctttacttttggcagtgttgttagtaatgaagttgcttctcatgcaacacttcttattagcaagcagtatgtattggcaatgggttttgcattgctggaacacctgacagaaatttttagtttcccagaagtaaaggcgttctggtttgttagtaatattggccttctaatggtttatgctctatccagagtattccagctttcttatatggacagtaggaacccaaggtttgctgtgtaatccattatcaacagttgcactcacattagccttgtggcgattcttttcaaaacaggatgatttaaacccatatgttgttccaatggctatgggcatttaacgtcaactagagagtcccttggatatgactacaagtactatcatcaggaggattgttgctaaccatgaagcttacctgtgtattgtcagctttcaaactcgatgaaccaactgagaaagtactgcttatgaagctagagaagcatggaaggagtgttgctgaatcaaaggcaaaagaagaagctggaagagttttgatttgcatgaaggatagctgttgaagacgcttctaaagcactagagtattgtagcactgatggaaggccttcgatgaaatgtttccctgaaagttgcatactacatcgctgaagcactacaatattgtaacactgagggaaggcctttgtatcatgacctaaattcatatagggccctctttgatgaggtaattgttgctttggttttcacttttccttacaaccttcgaattatgtggctatgtctgaaaacttaatacttctacagttctcgggtcttcataccattccaatttgtgttagctaataaacaagtcaggctatgtctgaaaccagtatctaatagttctccgcccaacaaggaactgtgcaacataaaaacaaatcttaaacaagttacatgttctgaattttagaaactcaaactccactctaagggctaaccggctaaccgaacatgttatagaacaaactcagtcctaaattgtagacatattggaattctgcgtatgttttttccaacctatcttcaaactatacaagaattattatctaatataaacaatacattgacaataatgtacacaaaaatccatgtatttaatgtgtggacatggtatcatcatgtctgactaacccttttttactttcattgaatgaagttcgtacatgtatttgaggtattttttattttcttcctactataagccttgcttagatactgatctaagatcatctccaagggacagacaaaaaatcctagaggttctcacataagtacggtttagagaagggataaaccgaggaaagcctcccccacaaatacagaaaggctgcctcgaacctatgatttggtgactcagtgaaacaaacaactctcactactgcactaggcctgccattgtttacgagcatccccaagggccttacttaaattcactctctaaattttaatttggtgagccattttaataaaaatatgtttgataggttttttatcttctaacaatttttatgtatcttgtacgcactctagagaaccaacccactcactgctctttatttactgcatgctatttaggtctgctaagcaaaaaatgatattctttctcaatcttttgtcatgtttagataaatttggtggttttaggataaagtttgtgaagggcttcactttttttttctataattagaatttaactcaaaagttttcccttgaaattcaagttgattttgagaagtatgaagggatgattaaggtcatggagaaggtggtaatacagttaattctatggagctcactggaggagcactaccttttgccagttgcttgcaagaatgtaattggaatccgatgtgcttcatggcgcatcgtatcctccattgagtatagggaataaggttgtgtcaacatggaccgtgccactctcatcgagggctaccataacaagattgaagttgaactcaacaagatctgcgttggaatcctcaagctctttgcttcccaccttcccccctcattaatagttccaaagtccaaggtcttctacctcaagatgaagggtgattactacaggatattgctttggaggagttggcccccttatcctattaggctttggctgatgcttaacctctcaactctcctgatcttgctcgtggtctccccaaacagattgacacggtgggaggaaaaagacaatggtcagcaacttactcggagcagaaattttttaattgtggtacccgtggtgctgtaagtttcatctcatcctcttgtagttcacacttgaacaaagtactctttagattctatacaggcagcgattgcttgtgcaattatattccacttcattcctaattaacaatttgggtcttatgattgacgactttgactttatcaccataaataaacctgacacacgaattatatctggattctggaacaggttcaataagagagcatcatagtgttgcataaataagtgtgcttatgattcatatttgctcattgcaaattggagttatttgtgttgtttctttgtatactcaacaaagagatgttaaccacttgtgtttatctcattgccacactcagttatgtcacgtaacttcattttcatgttttattttgttccagcaatgtagtttatctttgttttaatagctctttctttgtaaaacaacattttgttgtggttattatgcggataagagaacctaaaactacaacactgatgtttgtgtgacataagagaacctaaaacacattgatgacgtttggggccaagaactatagtggggtggttgatgtacttggag

SEQ ID NO: 218721 - DNA, 2844 bp, Zea Mays
cgcaggccaacctcgcgccccatccgcatccgccacatgccacacatgtccaacatcgccagcctcgtccgggagccatgagcaacctcccactccccaccaacacgccttcgcctcacctcgtgatgcccgggacctgcagcagtcgccgcctcccctgagcgtctgagatgcagctccacgctcatctgcgtcccccgccgcaggagccacgttgtgcctgccgccagccccgacacctccagatgttgcctccatccatcctccgagcttaccgcctcgcccccgcccccaaaccctagaccccctacaatcacgaggaaggggagaacggccgaggaggatgctccgcaaggaaggggaggacggtcgaggatgacgttgttgctcgtcgctgagcatcttcgcgccctcagtgctgccaaggagccctctctatccctgatggcgtcccaaccgttggtaatatctccgcctcggccatgggcattgcaaccctcgattcaatctctcctcttcgatctcagtatttaagattttgaattagatttgtatattatttttctattatattaggagcaattgaagccattggacattggttgcacaacttgataaagtgaagaatctgcttgcgtctgagtttgggagtctataaacatggggaagagaaaatattggtgcctttgcaattggtgaccctgctgcaactatttttttctaggaattcacaagagcaatatggtacaccaatgccacacattggacaaacaacagttgaagttgatcttttgaattatggtgtgatagaaggtgatgaatcatgtaaacatttctctgaactaaaagtcttacatccatggatgatcaaagatggcatgaatcttacaaaggaacagagattagagaaaattgagtcacaaaaacttgaaaaatatgaagccaaaggtgacaagagacatgacttgaaagatgatcaaagtgtacaggaagaatacataaatgcatattatgaggccttgaggaaaagttggaagaggaagaagcaaaaagcagaatgcagcatgaaggcaagatttttgtccctgatgctcaaagggaacgccaagttgacaataaatacaagcaggatgatgatgaagaaggcattgaataagtattccagctttcttatatggacagtaggaacccaaggtttgctgtgtaatccattatcaacagttgcactcacattagccttgtggcgattcttttcaaaacaggatgatttaaacccatatgttgttccaatggctatgggcatttaacgtcaactagagagtcccttggatatgactacaagtactatcatcaggaggattgttgctaaccatgaagcttacctgtgtattgtcagctttcaaactcgatgaaccaactgagaaagtactgcttatgaagctagagaagcatggaaggagtgttgctgaatcaaaggcaaaagaagaagctggaagagttttgatttgcatgaaggataggtcctcgacacagttcagcagagatgctggctctatgcccaaggtgtggacaggaaaggaggacataaaagccataactaaaactgttcgctcagttgtacgccagatgctaatatttaatactctatatatagaatactgttgaagacgcttctaaagcactagagtattgtagcactgatggaaggccttcgatgaaatgtttccctgaaagttgcatactacatcgctgaagcactacaatattgtaacactgagggaaggcctttgtatcatgacctaaattcatatagggccctctttgatgagttgattttgagaagtatgaagggatgattaaggtcatggagaaggtggtaatacagttaattctatggagctcactggaggagcactaccttttgccagttgcttgcaagaatgtaattggaatccgatgtgcttcatggcgcatcgtatcctccattgagtatagggaataaggttgtgtcaacatggaccgtgccactctcatcgagggctaccataacaagattgaagttgaactcaacaagatctgcgttggaatcctcaagctctttgcttcccaccttcccccctcattaatagttccaaagtccaaggtcttctacctcaagatgaagggtgattactacaggatattgctttggaggagttggcccccttatcctattaggctttggctgatgcttaacctctcaactctcctgatcttgctcgtggtctccccaaacaggtttggtttctagatccattacatggagtgtgtagtgtttttcctcttttttgcaatcctcatgatgtgccaccaggtctggtctaatcgttcccctaaaattgtggcctataatcagcttcttggcctatgatccttttgtatgtaggcaaagccaacgaatgaaagggactcactcgcagcaacaaccaaaaagctgatcacgcattctccttttcacatttgttgcatttaattaattcatccaatagcataaattggcactccttttgtgttattgctctttggttggtcttattgttgttgttgtactgcttgccatgtgtattttatcataagtgttgttttggctaatccctaacgatgcaatacatttgagcaacaattcaattgttttgttttttgaacagttattctaaatacccaatgttcacagcatatttcacttcccatggttcactgttttgttgtattagtagctctaattctaaggtgtcaatgaatcttaggcgaaagaattgttcgtagtagtggtccagaacagacttcatactgtgatttacagac

SEQ ID NO: 218722 - DNA, 1314 bp, Zea Mays
agggaacgaaccaaccagcctagcgacgccgacgccgccacgtcccaacgaaaaagaaacaaaaaagaagaagaggacagactgccagagtcatggcggccacgagctccgcctgcgcgtgcgcggcggtagcgctcgcgtccttcccgtccgccgcctccacctccgccccttcccgcgtctcggccagcagccaccgcggtcagcggcactccagggccgccaccgtcagatgttccagcacgtcgcccaacgtgtcccagggcgcgccggcgccggcgccgcccaagccgcaaatcgagctcgagttcgtcgggccgaagcccggtgccgacggctccttcccggtggaccgggcggaggcggccagcggcgagaagctcctccgtgacgtcatgaacgagaacaagatcgagctctacgccgcatacggtaaggtgatgaactgcggtggcggcggaagttgcggcacttgcatcgtcgagataatcgatggaaaggagctcctgaatgagaggacgaacaccgagaatcggtacctgaagaagaaaccagactcatggaggctagcttgccagactattgtaggcaacaaagagaactctggcaaggttgtggtccaacggctgccccagtggaagagatgaccgtgcagtgcagcaccacgttggtggatgattgatcgtccagttgtatgtcactaaaacgccatgccctgtgcattagagaagagacagaatcacctcgtcatatcgcttgtgaccagttctctgatactagtttgcaagtctgggcttcggtccacagtatatatgtgggatatatatctgtaaacaaaaaaaacaagaaggcagggcatgttgggatatatatctgtaaacaaaaaaacaagtttgggcttcggtccacagtatataagctgttttcacaaatggagaccagagtactccggtgtatgttggtagctttctgaaagaaaaaaaaaacaagaaggcagggcactagaattttcagcccttcaaaatttcctttcctgcatgttgtctctacggacatatgaatttttaacgaacatgtcactgctaacagaggcgtgcctctctgatacgtgcatggtgtcccgttacatgattctctccatgccatcgtgaattcgtgatgcagaacaatgtgatatggatgtatctgatttgtaatgttttgtatgcttatattccaatcatccgttgtagtctagctggtcaggatattcggctctcacccgaaagacccgggttcgagtcccggcaacggaacttttttatgtttttttag

SEQ ID NO: 218723 - DNA, 6026 bp, Zea Mays
tgatcaataacaacattgataataaaaaacaagagttcaaatgacatggtgtgatggtgaatatatagacggcataatgaatagctgccacctgctatacagtccgggtccaaagtgtccaactcgatagacgacccaccagcgtcctagcttgcctatatatgccacctcttctcctttcttgcatcactgctcgaggcttctagtagagagcacagctagcaaaacagagctccagaaactgaccgattggtttcacaccagagttagcgggatggcggggacgagcggccacagcgaacgagcagacgagcctctgaaggaggcgctgttggctgcccgcaacggtagcggcagcgacggcgacggcgagaaggacctggaggagatccggagcgtggggtcgttcctgcggcacgcggcggaggagaaccggaagctctggtaccttgcgggccccgccatcatcacgtccatcacgcagtactcgctcggcggcatcacccaggtcttcgccggccatctcaccacgctcgagctcgacgccatctccaccgagaacaacgtcatcgccggcctcgccttcggcatcatgctggggatgggcagcgcgctggagacgctgtgcggacaggcgtacggcgcgaagcagctgcacatgctgggcgtgtacatgcagcggtcgcttatcatcctcaacgccatggccgtgctgatgctcccgctctacctcttcgccacccctatcctgcgcttcttccaccaggacgccgagattgccgcgctcaccggccgcctagcgctctacatgatcccgcagctcttcgcctacgccttcaacttccccatccagaagttcctgcaggcgcagagcaaggtgatggccatggcggtcgtgtcggtggcggcgctgctgctccacgtcgccatcagctggctcctcgtcgggcccatggggatggggatcgtcggcctggccgttgcgctcaacgcgtcctggtggctcgtcgtgctgggccagctcgcctacattctcatgggctactgccccggcgcctggaacggattcgactggctcgccttctccgacctctccggcttcgcgcgcctgtcgcttggctccgccgtcatgctctgcctggagttctggttctacatgttcctgatcgtcatcgtcggcaacctggagaacgctcaggtcgccgttgctgcagtctccatttgcacgaacctgttcgggtggcagatcatggtgttcttcggattcaacgcggccatcagcgtgcgggtgtcgaacgagctgggcgccgggcggccccgcgcggccaagttcgcgatcctggtggtgctcatgtcttcggtggccatcgggttggccttcttcgtcctcgtcctggccttccgcgacgtgtacggcgcgcccttcacggaaagccccgaggtggtgcgcgccgtggccagcctcggcgtcgtcttcgccttctcgctgctcctcaacagcgtgcagccggtgctgtcgggcgttgccgtcggggccggctggcagtggctggtggcgtacatcaacctcggctgctactacctcgttggcatccccgtcgggtacatcatcgccttcccgctgcgcggcggggtgcaggggatgtggggcggcatgctcacgggcgtcggcctgcagaccctcatcctggtcgccatcacgctgcgcaccaactgggacaaggaggccagcgaggcccattccaggatacagaaatggggtggatcggcggcggccaaagtttcacatgcatgactagtctgaatgacgcgcgccaccatgagaatacaatacaacagatgccatgcgagcagaatggcatgctgcggtgcgtaagcttgattgtacgtgcaggttgcgttttgggctgcttaataagtagttggagacaaagtcatacttaggttgttttgtttccagcagatatatgcttgtaaaacaccgtattgtgccatagactgcatgattcttagcagagtttgaaatagaaaataatatatctctactactacttaattacctaatgtaggcgtccacactcggatggtgcacgttctgccgctggcgcgccccgcatcccgcccgcggccgcaccccgcttccccatcgtggcagccatctcctcaaccgtcgcgggatccccgcccttccctcgaaaccccgccccgcgcccctccctgagctctgtcgcgtcatccctgccttgtccccttcctcccactccgacgcacacgaggaagctgttaaccagcgccgccacttccaccgagtccctcgtggcgcttgaggcccgctgtctctccccccgctgtcgaggctcgcgccggctagaggtccacgctccccccccccagagatagctccctccccgaggagctgaaggcagcggcgtcacgggggctgcggtaggagctcgacaccgagcgggagttcgcggagacggcagccagatccggatcgaccctcttcgccttattcgagctcctggggctcgcagataaaggggccgaccgggtcgctggagccctcctacgacgaggccctgtggccggatgaggaggccggcgtcgacgcggcggaggccgcgccggcggaagcggacgatggcatcgaggtctgctgcttcgacaatcgcggtgtcggccacagctccgtgctccccaacaaatcctactactcgacggcaatcatggcgacggatgccttggccttgatggatcatttggggtggaagaaggctcacgtcttcggccactccatgggtgccatgattgcttgcaagctagatgtgatggcacctcacaggctatgttcgctggcattgcttaatgtcaccagaggtggctttcagtgcttcccaaaggtagacgcgcagatgctatctcttgcattccgtttcttaagggcaaaaactccagaggaaagagcccttgtggacctggaaacacattatacaaaggtttttcttccctgcctgggctgcgcgcactatttacagaggacccaggggtctcggggaaagattcccaagacacaaaaaatcctggactggaccgcgggttagtatcctaaatccagaggggctctttagcaaaatactacggccgaaggggtacgaagggatttgggccgttggatcatacatccacggatcagaatagatcggtcgtggaatgaagcggtacgcactgctgaccctacgatccgagatctacggtccttgtttaatgaagccaaatctcatcctagccgagggatcgtagatctatggtcacgattcaattgcacgaacgggtgcgcgattgtctgatctcgatcgttgcgcagaagatcaacggccacagctcaaacccctccgtcgacggccaccctacggcggtgcactctaaaccgcggcggcgccatagccggtgagcgcgaaagctcaaatccccggcccacgttacaaggtaaacagagctacacgcataggagaacagcgcagagagtagggagatgaatttaccgaggattgggcacacaggcgggctgaccacgacacgaggcggcttgacggcgttccgccctctccggcgaacaactacggggcgcgcggtcgacgattcggcacgcaggcaccacggatggttacgcgcccgctcggtgtagacccccgacctccctacgacttccggcggcggcggatggacggtcgggcacggcggcggtggtcttcggttcctaagcgcggaagttatgcaagcgaggcgggtaggtttataggggcggggagagcccaggcgtgcgcggggcctagatccgcggttcccggcggcggataaggactcagttgcaactccgagcgggccggcgagggatgcggaggttcgctccatccgcgatttctcaggggaagatgacgacctgacgaaagggccccacccgccagcgtttcgcccgcgcgcagtgattggagtagtggggccggtttgacagagcgccgcgcgcggtgaggagcgtgggccgcacggaagcagtccggagctgggccgaaaacgggtaatccggcccagtaaggttccttattccctttttctttatgttttattttttctgttttctttaattgttttgaatccaaatttgaatttgaatgtgagtttattctttgagtccattatacaaattcacactctaatgatggaataatatattttcatttacttatttttatcctcacaatatttatttccttctcttttctagattcaagaatttcttttaggttctaaattccctttttggactttaatattttcttgtcacattacttttataatgccacataatgcacacaaaataaagaaccgacatggtgcacattttttttgtgataagtcttttatgaacaattattattattatttttttgaatatggtgttcacatgtgatgataagtaggttcaatcatacacataaaatattggaaaataatttttctccccttttattacctttacaaattaggtattacaaattctacccccttaaaaataatctcgtcctcgagatttgtaagaaaaggaatatagaaagacaaatatttggttgcagtttagcttcgagttttttttaaatggttttaagcacaaatgttttctatatacttttttttgtcatttaaataaggaaatgattaggaacacatgggtatactatgtttagctattaggcagaagtagagaaggttgcggtaacaaggattagggcaaagaaagattccattacggatggtggatcttgactcatctgatgattccgttttgccctttgaagactgtagttggtgcttatcctcccttgacgtggttggtcttctgtggccctcagtcctggagttgccatccgagttgaggacatatggctatagctaggatagctagggtacatgaggtagttagatttaaacagagttttactttgcttttaggatatctagattaggcaacctatgatgtaggttaggtggttgtttacgtacgagttagtccaaggtattaatttagggtaagatatgtttatagaatcatggcctaactttttttgttgccaacattatctaacttatttaagtaactcaatttggattagatcatgttagattaggtaggatctagattaaattggaataagataaaatcttttcaagataagatgaatctattaagataagagagaatcttttaagatgagatggatctattagacttgatatatttttgtgggggatattctaagttggctagttattttatcaacatttttttgctatatgcatatacagatgtaattgtggacattactccacaactcattacactcaatcaaagatccaaatcagacaagtgtcataagaacaagcattcaagttcagagatatcaaaaaaaatagttttgtttttgttcctaaaattaggtctcctattcctaaaagtcactttaggcacaggatttcaaagtgtgaaatcaccttttgtcttttagaagtgaaaaggtaagagtaatcagagtaaagcggaaatagatgagaaaagattaagagaagtttagaaagaatcagagtagcaaaggtaagtaaagaatggttgtctagttctatctaggtttcgtcctacagtcaacattcctctgataccacttctgtcacacccgggttttaggggcaccaagacccgggcgcgaacataaacaccagatatgctgggaccaagtctcacacatatgatgtatagtggcacaagatcgaatgtcacatctttatatataacaggagttctatacaaaataaataattacattataaggcgacaacggtccagcaacccaaagttgactgggagacgacggcctagacctctcacgaacacatcgcagcatcctccaagcgcctcatcctgcggtacctgttcttgacctgtgggggggtgtgagacagcaagagtgagc

SEQ ID NO: 218724 - DNA, 2901 bp, Zea Mays
atgcggtgccatgcacctggactactagtacgcttggggaatggggatgggtgcaacggtagaggaagatccggcggtgaccgtgctcctgttcgttctcctggtcttgattcgattgggaggggaaggggttccttcggtcttgggaaattcgaagacatgcctgcgctctacgcttattacggagatggcgggtgcctcgtctcggcgccggctgagctggccgggctcttctgccgcggcgccgtgcagcagcggaagcgcacgctggtgaccgcgtccgcggtcgccgcggcggcggccgagttcgtgagggcggccaagaagcagaggcagctgccgctgccgtcgctcgacgcgctcccagacgagtgcctcttcgagatcctgcgccgcgtgcccggcggccgcggccgcggcgcctccgcctgcgtctcccgccgctggctcgcgctcctcggcagcatccgggcctccgagctcggccaggccgcggcggcggcggcggacaccccgtcgctgcccgacctgaacgaggaattcgtcatggaggaggataatgaggagtcccccgcggatcggtgcgtcgacagggtcctagagggcaaggaggccaccgacgtccgcctggccgccatggccgtcgtcgccggatcccgtggcgggctggagaagctcgccgtccgcggcagccacccgacccgtggcgtcacggaccaaggactgtcggcggttgcacgcggcagccccaacctcagctcgctcgcgctctgggatgtgcctcttatcaccgatgctgggctcgcggagattgctgccgggtgtccctcgctcgagcgtctggatatctgtcgatgtcccctcatcacagacaagggcctcgtcgctgttgcgcaggggtgccccaacttggtgtctctgaccattgaggcatgccccggtgttgccaatgagggcctgagggcgattggccgcagctgcgtgaagctgcaagctgtgaacatcaagaactgccctcttgttggtgaccaaggcatttccagcctggtgtgctctgctaccgctgctcttacaaagatccggctccagggattgaacataactgatgcttcgcttgctgtgattggatactatgggaaagccatcactgaccttacacttactcgtctcgctgctgttggtgagaggggtttctgggtgatggctaatgctgctggcctgcagaatctcaggtgcatgagtgttacctcttgccctggagtcaccgatcttgcgcttgcttctattgccaagttctgcccgaacttgaagcagctgtacctcaggaagtgcggatatgtgtcagatgctggcctcaaggcgttcacagaatcagcaaaggtgtttgagaacttgcatctcgaggaatgcaaccgggtttctcttgtcggtattcttgctttcctcctcaactgcagagagaagttcagggctctatcgttggtgaaatgcatggggatcaaggatatctgctctgcgcctgcacaacttcctctttgccgatcacttcgtttccttacaatcaaggattgcccaggtttcaccgatgcaagcttggctgcggtggggatgatttgccctcagttggagcaggttgacctgagtggtcttggtgaggtcactgacaacgggcttcttccattgatccagtcttctgaagctggtctggtcaaggttgacttgagtggttgcaagaacattacagatgtggctgtctcctccctggtgaagggacatggaaaatctctgaagaaaatcaaccttgagggttgcagcaagataacagatgctatcctcttcaccatgtctgagagctgcaccgagcttgcggagcttaatctttcaaactgcatggttagtgactacggtgttgccatcctggcatctgcaaggcacctcaagctccgtgttctctcactgtcaggctgctctaaggttactcagaagagcgtgctgttcttgggcaaccttggccagtctatagagggcctcaatcttcagttctgtgacatgattggcaaccacaacattgcatcgctggagaagaagctctggtggtgtgacatccttgcataggcagacaagatggtccattgctggaagggctcatgtctagtctactgggagccacctccagatgcagatatacgaccgtagcagtagcacaaccaggtgatcttcaggtttttggctcgcatgcgatgcgagtgatgatggtgggcttccgcattgttcaaggaccagttgttttagggggtgctttctagtcaagtgctcgtttttcacagatcacctctcgggaggtttatctgttttttgagccttggctgccatcactggcatcctgcccctcgatccagacactggtccttgccttatagtcatataaggttttttaggttgccatagtgtccaagtcctttttcgttttactgcttcctggttatgaagttgcaggcatccgtgatccattggcagctctggactatcacaattctaactcaagaaccagatgctggtgtcatcttttccagggctgctgatgctggagcgtctgtggatttgtgcagtgtgtttggttgtcgagttttgagtttgtttttagtcttgatgtgttgtgtgctgttcatgttctccatggtgtgtaagggtcatgtagggttgcatcttttttacagtctctctgggatgcttggtgttcatggtgatcttggccaatgctaggcgcatactagaagccttgccttgacaaccttttatggtttttttgccagatccctatttttacaagcagattgttgagtgctgtaagcttggcgaccctctttgaataaatgaaatatgtgtttatgttgaaatttt

SEQ ID NO: 218725 - DNA, 864 bp, Zea Mays
gcgccacagatatgatattgtgcgaaatgcaggctgagcttggagcaaatactatgctggcagtgtcaattgcagcttgcaaagctggtgctgctgaaaaagaggttccactctacaagcatatagcggatcttgttggcaaaagcgctacaactcttcctgtccctgcaaatacagtcattaatggtggaaagcatgctggaaatggtcttcccattcaagaaattatgattcttcttgttggtgctatgaacttcgaagaagcaatgcagatgggttcagagacctatcaccatctcaaggatattatcttggagaaatgtggctcagacagctgcaacattggagatcatggtgggtttgctccaaatatttccaggcaattattagttcatgagtatctcatggcaaatcaagtgggcactgtcactgaggcgatagaggttgtgaagcaggcaaatgatgcacattggggtgtgatggtgtcacataggtctggagatactgaggattctttcattgctgacctggctgttggtgctgcagccggacagatcaaagccagtgtcccatgccgtggagtctaactaaatacaatcagctgcttagaatagatcaatagaggaagaacttggaagtgaaggcgtctatgcaggggagaattgaaaatcttgacccgcctttgtatgtagccacttatcttttctttgttgtcttgtccaattgtgtgtgctcgtcctcaacaaggatatggaaatagggtggtgaaatgcaccatttatagcatgggttataaacatgagtacaaaacatggtttaagaactagaaatgagttacattctagtgaactggtcctttttcgt

SEQ ID NO: 218726 - DNA, 2580 bp, Zea Mays
tttgaagaacgacgactagagtgacctgttttgacaaatttctcggctgggcgtgggcgggtttctgatgttgggttgggaagagaagagatagctcgtcctcagcatccgccttcctcctcggcggccatgctgctccgcctccgcccgccgcggcacccgtccaccgcggcggccacaaccctctcttccttcctcccctccacttccttccgccgactcatccccttgccgcgctggcgcccccctccgcgccgccgcctctccgccgccgccaaggattcgatcggccggttggatccgcgccaggagcggtacgacgtcattgtggtcggaggcggccatgccggatgcgaggccgcccttgcttcggctcgcctcggcgcgcgcaccctgcttcttacgctcaacattgaccggattgcgtggcagccttgtaaccctgctgttggtggccctgcgaagtctcaacttgtccatgaggtagatgcccttggtggtgaaattggaaaaattactgataggtgctacttgcaaaagcgtgtactgaacagctcaaaaggccctgctgtacgtgcactgcgtgctcagactgataagagagagtatgcaatagagatgaagaacagtgtggaaaggacatcaatgcctgctgggcgagctggagagtcagcttctcatggactaactgaaaacttgcagtttctgggttttgaaactgaccgcttgaaaaccggtacaccaccacgaattgatcgcagaacagttgatttttctggattggaaccccagcatggtgatgaagaggtaggttggtttagttttgatcctgaatttcacgtcgagagagaacagatgtgctgctatctaacacgaactacaaaagagacgcaccaaattgttatcgacaacttagatgaaacaccaacttatggtggttgggttgaagcgaagggaccaagatactgcccgtcaattgaagacaagattgtaaggttcaaagataaagagtctcatcagatctttcttgaacctgagggtagaaatgttcctgaactatatctacagggcttttctactgggcttcctgagagattgcaattgtcccttgtgcgaactataccagggctggagaactgtctaatgctaagacctgcatatgcagttgaatatgattacttacccgcatatcaatgctcaagatcacttatgacaaagaagattgagggtttattcttctctggccagataaatggaacaacgggatacgaagaagctgcagctcagggtataatttctggaatcaatgcagctaggcattctgatgggaaatcattaattattcttgagagggaaagcagttatataggaactcttattgatgatcttgttacaaaagatcttagagagccctatcgcatgctaacaagccgttcagaacaccggctattgcttcgatcagataatgctgatagtcgtttgacccctttgggacgagagattggtttaatagatgatagacgttgggagctttatcagtcaaagcaagcccgcattaagcaagagaaagaacggttgagatctacaaaagttccaggaggtgaatttgctgctgaagttactgcagtatccaaccaacctgtaaaggattcatctacacttgaagccatattaaagaagccacacgtacaatataaactccttgacgagcatggatgcggaaatgaaaatttatctcgaattgagaaggaatgtgtagagattgatatcaagtatgaaggtttcatcgcacgacaacaaagtcaattacatcagatcgtaaaccaagaacacaggaaacttcctgaagatttggattaccactcaatgacaaatctatcacttgaagctcgtgagaaactttccaaggtgcgtccacaaacaataggtcaagctagcagaatcggcggtgtgagcccagcagacatgacagttctcctcatttggatggagagcaaccgacgcatggctacccacaggagacagcgagagcagctgggatcagttgcagtcgagtcggatggttcttcagaggaggccgtccaagccagcacggcataaacgtggggagcttctggcagctgaacaaggaacaacaaaattcggtgaggcatccagggagcctgcgcgtctgtggtacaacgatgcagggaggcgccaagtgcatgcatgtcttttcttgacgacatgaggaaatagtcggccccctggttccttcatgttgtgcctcattgtctaccagtatgtgtgcatgttgtttaggaatgctggtggaatacaggttgatatttgcagtagtagaattgagagagcagactgtaaagaacgacaacaaataggggtttaaaacatacattcgcactcacttagctaaaaaaatacactttttgtgtgttttatactttatacttaagcaaaatatagatatttttacgaaattagatgaaaagggcgtgttggatctagcccaccatgtgatacctaaggcctaggtatgacacgatgattgagctgggggtagactgtactagaccacgtgag

SEQ ID NO: 218727 - DNA, 1005 bp, Zea Mays
caacgaacgacccacaattgtacattggaggggaaataccagaagcttggagctctgccccgactttcttgatcggcttgccaactggcttgtattcatcaccgaaaaccatttcttgtcttgagtgtattggaggataagaaggtgaacaagaagctgacaaccaagctgaccctatactcaggatgtgttgtgccttctggtggtgaaaccgtctctttaagcaactgaactgctttaagtataacagaagagctcagtgatttaccctttagaaaatcctctaccttgctagctctgatggcatggtcagctccataagcaccgaacaccaagcatatatcctccatgatgttcttccctgaagctgcatcagttgaagtccttgccaagagagcagcattgacatatgaagcagcattgccaaatggccgaggcgctgcccggaatgtctcaaaggtgatgccatctgaatcccactttgggatgaatatgctcatcaacagggtcctagaatcacatggagactgctgcaagaactcctccaaagtaaggcacaaccttttggaagccgtctggattgtgactgttgtacctgcagccagtagcacagttgctatgtctgactcgaatggcaacctctgcgccatgattatgttgccacctatggttgttgtgttccgaacaaatggtgaagccactttgcttaggtgattggcaatttttctgaagaccagatttccatctgacaacacctcaatggttgtagcctgtagagatggacacaaccgatccaagctcaattcccttaacgctgctgttgatgactgatagctctggtattcctttgatgtcaatgtacttgtcatagaggtcctgatccatgtgtaagggagttcactgccactccccgctcattttttctgaaggggaaatatccatcttcttgttgttttgtaccgttggatactttagcatcattctcatactactaggagtgtaggt

SEQ ID NO: 218728 - DNA, 3926 bp, Zea Mays
ctcgcagtccgcagccatagaaaccatctgactcccgtcggcgagccgcgagaggcgcaacagaagttgtgatatgcaccatggttgggagaactattcaggtccaaggttttgctctaactgacagtgccgaatctgtcaaattgtttttggagcgaattgctggtgctggaaccatctgtgctctcaagctcaggcatccaaggaacatctctgccaactcaagggcatttgctatagttcagttccagtcacaggaaagtgcttcattggtagagaatgcggctcaaagacaggttctcaagattggacggttttatctgagaaccagacctgcagaccgggacattgttccaagaccaaggattccaatgttttctctagaggacattgtgctgcatttgggatgcttggttaaggaaaatatcctatctgctctttttagagcaagtaatgtttcggttcaatttggatttgatatgaaaaagatctacttctacctctcctacaattttactaaatttaaacttgaactttcttacgaaagtatatgggagatgcagcttcaccgtccacctgcttataggtcacggacacagttccttttgattcaggttcaggcagctcctaaaatttataaactgctcccaggccgtccaggtcttatgtttgaggatcctttcttcaactggtttagggatgacacagatgaacaatggaccaggacaattgattttactccatcagctagcatcgggcaatcatctattttatgtctggaggtgccacaacagtgtgagcttccaagaattggcgactactttgtttactataaagagcagaatcttgactttgaatgtcggaatgggtattcatattcctgtggtagcaaccttgtaccaattgtgaaatctcctgattacatagaggtcccttatgagatactcttcaaaatcaaccatttggttcagaatgggacactcagtgggccaacagttgatcatagtttcttccgtcatgttagcccaaaatttgaacctattgatcatataaaacgagcacttttaaagatgacatatttgaaaagcacctgcttgaacccaacagattggttatctgtgcaatactccagaatacggaaatcacgccatgcatcacaaaagttatctaatatatctctggatgatggcttggtctatgtccacagggtgcaagttacccctgctaaagtgtatttttatggacctgagataaatgtctccaatcgcgttgtgcggcatttctctgcagacatagataacttccttcggatttcatttgttgatgaagactgtgagaagctccgttcagctgatttgtcacctcgatctacttctggaaatgatgcaaggagaactgctctgtataatagagttttgtcagtcctttcaaatggcatcaatattggtgacaagcactttgagtttcttgccttttcttcaagtcagcttcgagataactctgcatggatgtttgcttctcggcagggattgactgcgagcgacataaggaagtggatgggggactttcgagatatcagaaatgtggcaaagtatgctgcaagacttgggcaatctttcagttcctcaacagaaactttaaaagtacacaaatctgaggtggaacgaattcctgatattacaaatggcacaaagtacatattctctgatggagttggaaagatctcagctaattttgcagtggaggtggctatgaagtgcaaattgaaacgctttgctccttctgtttttcagataaggtatggcggttacaaaggtgttgtcgctgtagatacaagatcaaatcataagctttctttgagaaaaagcatgtcaaagttccagtcagaaaatatcactcttgatgtccttgcatacagcaagtaccaaccatgcttcctgaatcggcagttgattactcttctctcaacacttggggttagcgataatgtctttgagctaaagcagaaggaagccttaaggcagttgaacagaatggtaactgaaccacaggctgctcgtgaagcagttgaacttatgcccatgggagaagtaaccaatgtagttaaagaattgttgtcatgtggctaccagcctgatcatgagccatatctttccatgctgctacaaacttttagagcatccaagcttctagagttgaaaacaaagtcaaggatattcatcacacaggggcgagcaatgatgggttgcctggatgaaacctgcacacttaagtacggccaggtattcgtccaagcttcttacagtgcagatgaccatcgcaaggtcgttgtaactggaaaagtagttgtcgccaaaaatccttgtctccaccctggtgacatacgggttctccaggctgttgatgttcctgctctgcaccacttgtttgactgtgttgtctttccacagcagggaccaaggccgcaccctaacgagtgttcagggagtgatcttgatggggacatatattttgtttcttgggatccacatcttattccgagtcgtttggtggatcctatggactatactccagcttcagcagaaacattagaccatgatgtcactattgaggagatacaggagtacttcacaaactacatagttaatgagagtcttgggattatcgccaatgcgcatgtggtctttgcagatcaggaacgtatgaaggctgagagtccaccgtgcgttcaactggccaagctcttctctatagctgtcgatttcccaaagactggagtgccggctctgattccacatgagctacatgtcaaggagtatcctgacttcatggagaaactcgacaaagtcacctatgaatcaaagggtgtgatcgggaagctctatagggaaataaagaagcacacaccacacataaagcacttcacgagggaagtggcaaggcggtcttatgacaccgatttgattgttgatggctatgaagattacattactgaggctatagagttcaaggaagagtacgatttcaggctgggtaatcttatggaccactatggcataaaaagtgaagctgagataataagtggatgtattctaaagatggcaaagaatttcaccaagagtagtgatgctgatgcaattagaatggcggtgagatctttgaggaaagaagctaggtcgtggttcaatgagatgagcacaggagaggatggccaagatgccatggaggccaaggcctctgcttggtaccatgttacttatcatcagcagtactggggcagctacaatgaagggtatgatcggccgcatcttattagcttcccatggtgcgtatatgacaagcttgtggccatcaagcaggggaggaatctcctcacgcggatggatcgaaacttgaggttccgttgagcattgccagcaggtttgctcctgtacatatccctgatcgtttgcactcagcactgccagcaagtgtgcatgaacgatctgatgaattaagacgggcaaactgccgcaagctgacgctctggcctacgtgcgtcttgaaactttcggatgctgccgtctaactaaatgcatgttccttgatttccactgggaccttgagtttgaagtgtgtaaatatgctgcttatgatgtttttagtattggacctctatcaactgccgttctagttagtaacaatggttgccagtcatggattaccaggtttcgccgagctcctgtatggacgaccacgaaggtctatttcttccattaccaagtgcgaagtgtcacatctaacttgcgtagttgcattcaccttttttctcaaaaaaaaaatgcattcgccctgcaccatcatcaattgcgtagttctgagcatcagaaagctgtacaactctgtatgcatgaacggcctgtcaggaagccggggcaagcagggaa

SEQ ID NO: 218729 - DNA, 3925 bp, Zea Mays
cgcagtccgcagccatagaaaccatctgactcccgtcggcgagccgcgagaggcgcaacagaagttgtgatatgcaccatggttgggagaactattcaggtccaaggttttgctctaactgacagtgccgaatctgtcaaattgtttttggagcgaattgctggtgctggaaccatctgtgctctcaagctcaggcatccaaggaacatctctgccaactcaagggcatttgctatagttcagttccagtcacaggaaagtgcttcattggtagagaatgcggctcaaagacaggttctcaagattggacggttttatctgagaaccagacctgcagaccgggacattgttccaagaccaaggattccaatgttttctctagaggacattgtgctgcatttgggatgcttggttaaggaaaatatcctatctgctctttttagagcaagtaatgtttcggttcaatttggatttgatatgaaaaagatctacttctacctctcctacaattttactaaatttaaacttgaactttcttacgaaagtatatgggagatgcagcttcaccgtccacctgcttataggtcacggacacagttccttttgattcagggttcaggcagctcctaaaatttataaactgctcccaggccgtccaggtcttatgtttgaggatcctttcttcaactggtttagggatgacacagatgaacaatggaccaggacaattgattttactccatcagctagcatcgggcaatcatctattttatgtctggaggtgccacaacagtgtgagcttccaagaattggcgactactttgtttactataaagagcagaatcttgactttgaatgtcggaatgggtattcatattcctgtggtagcaaccttgtaccaattgtgaaatctcctgattacatagaggtcccttatgagatactcttcaaaatcaaccatttggttcagaatgggacactcagtgggccaacagttgatcatagtttcttccgtcatgttagcccaaaatttgaacctattgatcatataaaacgagcacttttaaagatgacatatttgaaaagcacctgcttgaacccaacagattggttatctgtgcaatactccagaatacggaaatcacgccatgcatcacaaaagttatctaatatatctctggatgatggcttggtctatgtccacagggtgcaagttacccctgctaaagtgtatttttatggacctgagataaatgtctccaatcgcgttgtgcggcatttctctgcagacatagataacttccttcggatttcatttgttgatgaagactgtgagaagctccgttcagctgatttgtcacctcgatctacttctggaaatgatgcaaggagaactgctctgtataatagagttttgtcagtcctttcaaatggcatcaatattggtgacaagcactttgagtttcttgccttttcttcaagtcagcttcgagataactctgcatggatgtttgcttctcggcagggattgactgcgagcgacataaggaagtggatgggggactttcgagatatcagaaatgtggcaaagtatgctgcaagacttgggcaatctttcagttcctcaacagaaactttaaaagtacacaaatctgaggtggaacgaattcctgatattacaaatggcacaaagtacatattctctgatggagttggaaagatctcagctaattttgcagtggaggtggctatgaagtgcaaattgaaacgctttgctccttctgtttttcagataaggtatggcggttacaaaggtgttgtcgctgtagatacaagatcaaatcataagctttctttgagaaaaagcatgtcaaagttccagtcagaaaatatcactcttgatgtccttgcatacagcaagtaccaaccatgcttcctgaatcggcagttgattactcttctctcaacacttggggttagcgataatgtctttgagctaaagcagaaggaagccttaaggcagttgaacagaatggtaactgaaccacaggctgctcgtgaagcagttgaacttatgcccatgggagaagtaaccaatgtagttaaagaattgttgtcatgtggctaccagcctgatcatgagccatatctttccatgctgctacaaacttttagagcatccaagcttctagagttgaaaacaaagtcaaggatattcatcacacaggggcgagcaatgatgggttgcctggatgaaacctgcacacttaagtacggccaggtattcgtccaagcttcttacagtgcagatgaccatcgcaaggtcgttgtaactggaaaagtagttgtcgccaaaaatccttgtctccaccctggtgacatacgggttctccaggctgttgatgttcctgctctgcaccacttgtttgactgtgttgtctttccacagcagggaccaaggccgcaccctaacgagtgttcagggagtgatcttgatggggacatatattttgtttcttgggatccacatcttattccgagtcgtttggtggatcctatggactatactccagcttcagcagaaacattagaccatgatgtcactattgaggagatacaggagtacttcacaaactacatagttaatgagagtcttgggattatcgccaatgcgcatgtggtctttgcagatcaggaacgtatgaaggctgagagtccaccgtgcgttcaactggccaagctcttctctatagctgtcgatttcccaaagactggagtgccggctctgattccacatgagctacatgtcaaggagtatcctgacttcatggagaaactcgacaaagtcacctatgaatcaaagggtgtgatcgggaagctctatagggaaataaagaagcacacaccacacataaagcacttcacgagggaagtggcaaggcggtcttatgacaccgatttgattgttgatggctatgaagattacattactgaggctatagagttcaaggaagagtacgatttcaggctgggtaatcttatggaccactatggcataaaaagtgaagctgagataataagtggatgtattctaaagatggcaaagaatttcaccaagagtagtgatgctgatgcaattagaatggcggtgagatctttgaggaaagaagctaggtcgtggttcaatgagatgagcacaggagaggatggccaagatgccatggaggccaaggcctctgcttggtaccatgttacttatcatcagcagtactggggcagctacaatgaagggtatgatcggccgcatcttattagcttcccatggtgcgtatatgacaagcttgtggccatcaagcaggggaggaatctcctcacgcggatggatcgaaacttgaggttccgttgagcattgccagcaggtttgctcctgtacatatccctgatcgtttgcactcagcactgccagcaagtgtgcatgaacgatctgatgaattaagacgggcaaactgccgcaagctgacgctctggcctacgtgcgtcttgaaactttcggatgctgccgtctaactaaatgcatgttccttgatttccactgggaccttgagtttgaagtgtgtaaatatgctgcttatgatgtttttagtattggacctctatcaactgccgttctagttagtaacaatggttgccagtcatggattaccaggtttcgccgagctcctgtatggacgaccacgaaggtctatttcttccattaccaagtgcgaagtgtcacatctaacttgcgtagttgcattcaccttttttctcaaaaaaaaaatgcattcgccctgcaccatcatcaattgcgtagttctgagcatcagaaagctgtacaactctgtatgcatgaacggcctgtcaggaagccggggcaagcagggaa

SEQ ID NO: 218730 - DNA, 3918 bp, Zea Mays
cagccatagaaaccatctgactcccgtcggcgagccgcgagaggcgcaacagaagtagttgtgatatgcaccatggttgggagaactattcaggtccaaggttttgctctaactgacagtgccgaatctgtcaaattgtttttggagcgaattgctggtgctggaaccatctgtgctctcaagctcaggcatccaaggaacatctctgccaactcaagggcatttgctatagttcagttccagtcacaggaaagtgcttcattggtagagaatgcggctcaaagacaggttctcaagattggacggttttatctgagaaccagacctgcagaccgggacattgttccaagaccaaggattccaatgttttctctagaggacattgtgctgcatttgggatgcttggttaaggaaaatatcctatctgctctttttagagcaagtaatgtttcggttcaatttggatttgatatgaaaaagatctacttctacctctcctacaattttactaaatttaaacttgaactttcttacgaaagtatatgggagatgcagcttcaccgtccacctgcttataggtcacggacacagttccttttgattcaggttcaggcagctcctaaaatttataaactgctcccaggccgtccaggtcttatgtttgaggatcctttcttcaactggtttagggatgacacagatgaacaatggaccaggacaattgattttactccatcagctagcatcgggcaatcatctattttatgtctggaggtgccacaacagtgtgagcttccaagaattggcgactactttgtttactataaagagcagaatcttgactttgaatgtcggaatgggtattcatattcctgtggtagcaaccttgtaccaattgtgaaatctcctgattacatagaggtcccttatgagatactcttcaaaatcaaccatttggttcagaatgggacactcagtgggccaacagttgatcatagtttcttccgtcatgttagcccaaaatttgaacctattgatcatataaaacgagcacttttaaagatgacatatttgaaaagcacctgcttgaacccaacagattggttatctgtgcaatactccagaatacggaaatcacgccatgcatcacaaaagttatctaatatatctctggatgatggcttggtctatgtccacagggtgcaagttacccctgctaaagtgtatttttatggacctgagataaatgtctccaatcgcgttgtgcggcatttctctgcagacatagataacttccttcggatttcatttgttgatgaagactgtgagaagctccgttcagctgatttgtcacctcgatctacttctggaaatgatgcaaggagaactgctctgtataatagagttttgtcagtcctttcaaatggcatcaatattggtgacaagcactttgagtttcttgccttttcttcaagtcagcttcgagataactctgcatggatgtttgcttctcggcagggattgactgcgagcgacataaggaagtggatgggggactttcgagatatcagaaatgtggcaaagtatgctgcaagacttgggcaatctttcagttcctcaacagaaactttaaaagtacacaaatctgaggtggaacgaattcctgatattacaaatggcacaaagtacatattctctgatggagttggaaagatctcagctaattttgcagtggaggtggctatgaagtgcaaattgaaacgctttgctccttctgtttttcagataaggtatggcggttacaaaggtgttgtcgctgtagatacaagatcaaatcataagctttctttgagaaaaagcatgtcaaagttccagtcagaaaatatcactcttgatgtccttgcatacagcaagtaccaaccatgcttcctgaatcggcagttgattactcttctctcaacacttggggttagcgataatgtctttgagctaaagcagaaggaagccttaaggcagttgaacagaatggtaactgaaccacaggctgctcgtgaagcagttgaacttatgcccatgggagaagtaaccaatgtagttaaagaattgttgtcatgtggctaccagcctgatcatgagccatatctttccatgctgctacaaacttttagagcatccaagcttctagagttgaaaacaaagtcaaggatattcatcacacaggggcgagcaatgatgggttgcctggatgaaacctgcacacttaagtacggccaggtattcgtccaagcttcttacagtgcagatgaccatcgcaaggtcgttgtaactggaaaagtagttgtcgccaaaaatccttgtctccaccctggtgacatacgggttctccaggctgttgatgttcctgctctgcaccacttgtttgactgtgttgtctttccacagcagggaccaaggccgcaccctaacgagtgttcagggagtgatcttgatggggacatatattttgtttcttgggatccacatcttattccgagtcgtttggtggatcctatggactatactccagcttcagcagaaacattagaccatgatgtcactattgaggagatacaggagtacttcacaaactacatagttaatgagagtcttgggattatcgccaatgcgcatgtggtctttgcagatcaggaacgtatgaaggctgagagtccaccgtgcgttcaactggccaagctcttctctatagctgtcgatttcccaaagactggagtgccggctctgattccacatgagctacatgtcaaggagtatcctgacttcatggagaaactcgacaaagtcacctatgaatcaaagggtgtgatcgggaagctctatagggaaataaagaagcacacaccacacataaagcacttcacgagggaagtggcaaggcggtcttatgacaccgatttgattgttgatggctatgaagattacattactgaggctatagagttcaaggaagagtacgatttcaggctgggtaatcttatggaccactatggcataaaaagtgaagctgagataataagtggatgtattctaaagatggcaaagaatttcaccaagagtagtgatgctgatgcaattagaatggcggtgagatctttgaggaaagaagctaggtcgtggttcaatgagatgagcacaggagaggatggccaagatgccatggaggccaaggcctctgcttggtaccatgttacttatcatcagcagtactggggcagctacaatgaagggtatgatcggccgcatcttattagcttcccatggtgcgtatatgacaagcttgtggccatcaagcaggggaggaatctcctcacgcggatggatcgaaacttgaggttccgttgagcattgccagcaggtttgctcctgtacatatccctgatcgtttgcactcagcactgccagcaagtgtgcatgaacgatctgatgaattaagacgggcaaactgccgcaagctgacgctctggcctacgtgcgtcttgaaactttcggatgctgccgtctaactaaatgcatgttccttgatttccactgggaccttgagtttgaagtgtgtaaatatgctgcttatgatgtttttagtattggacctctatcaactgccgttctagttagtaacaatggttgccagtcatggattaccaggtttcgccgagctcctgtatggacgaccacgaaggtctatttcttccattaccaagtgcgaagtgtcacatctaacttgcgtagttgcattcaccttttttctcaaaaaaaaaatgcattcgccctgcaccatcatcaattgcgtagttctgagcatcagaaagctgtacaactctgtatgcatgaacggcctgtcaggaagccggggcaagcagggaa

SEQ ID NO: 218731 - DNA, 3362 bp, Zea Mays
atagaaaccatctgactcccgtcggcgagccgcgagaggcgcaacagaaggttcaggcagctcctaaaatttataaactgctcccaggccgtccaggtcttatgtttgaggatcctttcttcaactggtttagggatgacacagatgaacaatggaccaggacaattgattttactccatcagctagcatcgggcaatcatctattttatgtctggaggtgccacaacagtgtgagcttccaagaattggcgactactttgtttactataaagagcagaatcttgactttgaatgtcggaatgggtattcatattcctgtggtagcaaccttgtaccaattgtgaaatctcctgattacatagaggtcccttatgagatactcttcaaaatcaaccatttggttcagaatgggacactcagtgggccaacagttgatcatagtttcttccgtcatgttagcccaaaatttgaacctattgatcatataaaacgagcacttttaaagatgacatatttgaaaagcacctgcttgaacccaacagattggttatctgtgcaatactccagaatacggaaatcacgccatgcatcacaaaagttatctaatatatctctggatgatggcttggtctatgtccacagggtgcaagttacccctgctaaagtgtatttttatggacctgagataaatgtctccaatcgcgttgtgcggcatttctctgcagacatagataacttccttcggatttcatttgttgatgaagactgtgagaagctccgttcagctgatttgtcacctcgatctacttctggaaatgatgcaaggagaactgctctgtataatagagttttgtcagtcctttcaaatggcatcaatattggtgacaagcactttgagtttcttgccttttcttcaagtcagcttcgagataactctgcatggatgtttgcttctcggcagggattgactgcgagcgacataaggaagtggatgggggactttcgagatatcagaaatgtggcaaagtatgctgcaagacttgggcaatctttcagttcctcaacagaaactttaaaagtacacaaatctgaggtggaacgaattcctgatattacaaatggcacaaagtacatattctctgatggagttggaaagatctcagctaattttgcagtggaggtggctatgaagtgcaaattgaaacgctttgctccttctgtttttcagataaggtatggcggttacaaaggtgttgtcgctgtagatacaagatcaaatcataagctttctttgagaaaaagcatgtcaaagttccagtcagaaaatatcactcttgatgtccttgcatacagcaagtaccaaccatgcttcctgaatcggcagttgattactcttctctcaacacttggggttagcgataatgtctttgagctaaagcagaaggaagccttaaggcagttgaacagaatggtaactgaaccacaggctgctcgtgaagcagttgaacttatgcccatgggagaagtaaccaatgtagttaaagaattgttgtcatgtggctaccagcctgatcatgagccatatctttccatgctgctacaaacttttagagcatccaagcttctagagttgaaaacaaagtcaaggatattcatcacacaggggcgagcaatgatgggttgcctggatgaaacctgcacacttaagtacggccaggtattcgtccaagcttcttacagtgcagatgaccatcgcaaggtcgttgtaactggaaaagtagttgtcgccaaaaatccttgtctccaccctggtgacatacgggttctccaggctgttgatgttcctgctctgcaccacttgtttgactgtgttgtctttccacagcagggaccaaggccgcaccctaacgagtgttcagggagtgatcttgatggggacatatattttgtttcttgggatccacatcttattccgagtcgtttggtggatcctatggactatactccagcttcagcagaaacattagaccatgatgtcactattgaggagatacaggagtacttcacaaactacatagttaatgagagtcttgggattatcgccaatgcgcatgtggtctttgcagatcaggaacgtatgaaggctgagagtccaccgtgcgttcaactggccaagctcttctctatagctgtcgatttcccaaagactggagtgccggctctgattccacatgagctacatgtcaaggagtatcctgacttcatggagaaactcgacaaagtcacctatgaatcaaagggtgtgatcgggaagctctatagggaaataaagaagcacacaccacacataaagcacttcacgagggaagtggcaaggcggtcttatgacaccgatttgattgttgatggctatgaagattacattactgaggctatagagttcaaggaagagtacgatttcaggctgggtaatcttatggaccactatggcataaaaagtgaagctgagataataagtggatgtattctaaagatggcaaagaatttcaccaagagtagtgatgctgatgcaattagaatggcggtgagatctttgaggaaagaagctaggtcgtggttcaatgagatgagcacaggagaggatggccaagatgccatggaggccaaggcctctgcttggtaccatgttacttatcatcagcagtactggggcagctacaatgaagggtatgatcggccgcatcttattagcttcccatggtgcgtatatgacaagcttgtggccatcaagcaggggaggaatctcctcacgcggatggatcgaaacttgaggttccgttgagcattgccagcaggtttgctcctgtacatatccctgatcgtttgcactcagcactgccagcaagtgtgcatgaacgatctgatgaattaagacgggcaaactgccgcaagctgacgctctggcctacgtgcgtcttgaaactttcggatgctgccgtctaactaaatgcatgttccttgatttccactgggaccttgagtttgaagtgtgtaaatatgctgcttatgatgtttttagtattggacctctatcaactgccgttctagttagtaacaatggttgccagtcatggattaccaggtttcgccgagctcctgtatggacgaccacgaaggtctatttcttccattaccaagtgcgaagtgtcacatctaacttgcgtagttgcattcaccttttttctcaaaaaaaaaatgcattcgccctgcaccatcatcaattgcgtagttctgagcatcagaaagctgtacaactctgtatgcatgaacggcctgtcaggaagccggggcaagcagggaa

SEQ ID NO: 218732 - DNA, 4042 bp, Zea Mays
cgatctcttgctccagcttcccacttcccgtctccactcccgcccggctcgccgtcgaggacacgtgggtagaacaatcttgtctcctcctcttcccggtgcgtgcgatcgccccttttcgtgttggtggtttcactgcggagttccaggccgcttccgccctttcaggccgcgtggggaagttgtgatatgcaccatggttgggagaactattcaggtccaaggttttgctctaactgacagtgccgaatctgtcaaattgtttttggagcgaattgctggtgctggaaccatctgtgctctcaagctcaggcatccaaggaacatctctgccaactcaagggcatttgctatagttcagttccagtcacaggaaagtgcttcattggtagagaatgcggctcaaagacaggttctcaagattggacggttttatctgagaaccagacctgcagaccgggacattgttccaagaccaaggattccaatgttttctctagaggacattgtgctgcatttgggatgcttggttaaggaaaatatcctatctgctctttttagagcaagtaatgtttcggttcaatttggatttgatatgaaaaagatctacttctacctctcctacaattttactaaatttaaacttgaactttcttacgaaagtatatgggagatgcagcttcaccgtccacctgcttataggtcacggacacagttccttttgattcaggttcaggcagctcctaaaatttataaactgctcccaggccgtccaggtcttatgtttgaggatcctttcttcaactggtttagggatgacacagatgaacaatggaccaggacaattgattttactccatcagctagcatcgggcaatcatctattttatgtctggaggtgccacaacagtgtgagcttccaagaattggcgactactttgtttactataaagagcagaatcttgactttgaatgtcggaatgggtattcatattcctgtggtagcaaccttgtaccaattgtgaaatctcctgattacatagaggtcccttatgagatactcttcaaaatcaaccatttggttcagaatgggacactcagtgggccaacagttgatcatagtttcttccgtcatgttagcccaaaatttgaacctattgatcatataaaacgagcacttttaaagatgacatatttgaaaagcacctgcttgaacccaacagattggttatctgtgcaatactccagaatacggaaatcacgccatgcatcacaaaagttatctaatatatctctggatgatggcttggtctatgtccacagggtgcaagttacccctgctaaagtgtatttttatggacctgagataaatgtctccaatcgcgttgtgcggcatttctctgcagacatagataacttccttcggatttcatttgttgatgaagactgtgagaagctccgttcagctgatttgtcacctcgatctacttctggaaatgatgcaaggagaactgctctgtataatagagttttgtcagtcctttcaaatggcatcaatattggtgacaagcactttgagtttcttgccttttcttcaagtcagcttcgagataactctgcatggatgtttgcttctcggcagggattgactgcgagcgacataaggaagtggatgggggactttcgagatatcagaaatgtggcaaagtatgctgcaagacttgggcaatctttcagttcctcaacagaaactttaaaagtacacaaatctgaggtggaacgaattcctgatattacaaatggcacaaagtacatattctctgatggagttggaaagatctcagctaattttgcagtggaggtggctatgaagtgcaaattgaaacgctttgctccttctgtttttcagataaggtatggcggttacaaaggtgttgtcgctgtagatacaagatcaaatcataagctttctttgagaaaaagcatgtcaaagttccagtcagaaaatatcactcttgatgtccttgcatacagcaagtaccaaccatgcttcctgaatcggcagttgattactcttctctcaacacttggggttagcgataatgtctttgagctaaagcagaaggaagccttaaggcagttgaacagaatggtaactgaaccacaggctgctcgtgaagcagttgaacttatgcccatgggagaagtaaccaatgtagttaaagaattgttgtcatgtggctaccagcctgatcatgagccatatctttccatgctgctacaaacttttagagcatccaagcttctagagttgaaaacaaagtcaaggatattcatcacacaggggcgagcaatgatgggttgcctggatgaaacctgcacacttaagtacggccaggtattcgtccaagcttcttacagtgcagatgaccatcgcaaggtcgttgtaactggaaaagtagttgtcgccaaaaatccttgtctccaccctggtgacatacgggttctccaggctgttgatgttcctgctctgcaccacttgtttgactgtgttgtctttccacagcagggaccaaggccgcaccctaacgagtgttcagggagtgatcttgatggggacatatattttgtttcttgggatccacatcttattccgagtcgtttggtggatcctatggactatactccagcttcagcagaaacattagaccatgatgtcactattgaggagatacaggagtacttcacaaactacatagttaatgagagtcttgggattatcgccaatgcgcatgtggtctttgcagatcaggaacgtatgaaggctgagagtccaccgtgcgttcaactggccaagctcttctctatagctgtcgatttcccaaagactggagtgccggctctgattccacatgagctacatgtcaaggagtatcctgacttcatggagaaactcgacaaagtcacctatgaatcaaagggtgtgatcgggaagctctatagggaaataaagaagcacacaccacacataaagcacttcacgagggaagtggcaaggcggtcttatgacaccgatttgattgttgatggctatgaagattacattactgaggctatagagttcaaggaagagtacgatttcaggctgggtaatcttatggaccactatggcataaaaagtgaagctgagataataagtggatgtattctaaagatggcaaagaatttcaccaagagtagtgatgctgatgcaattagaatggcggtgagatctttgaggaaagaagctaggtcgtggttcaatgagatgagcacaggagaggatggccaagatgccatggaggccaaggcctctgcttggtaccatgttacttatcatcagcagtactggggcagctacaatgaagggtatgatcggccgcatcttattagcttcccatggtgcgtatatgacaagcttgtggccatcaagcaggggaggaatctcctcacgcggatggatcgaaacttgaggttccgttgagcattgccagcaggtttgctcctgtacatatccctgatcgtttgcactcagcactgccagcaagtgtgcatgaacgatctgatgaattaagacgggcaaactgccgcaagctgacgctctggcctacgtgcgtcttgaaactttcggatgctgccgtctaactaaatgcatgttccttgatttccactgggaccttgagtttgaagtgtgtaaatatgctgcttatgatgtttttagtattggacctctatcaactgccgttctagttagtaacaatggttgccagtcatggattaccaggtttcgccgagctcctgtatggacgaccacgaaggtctatttcttccattaccaagtgcgaagtgtcacatctaacttgcgtagttgcattcaccttttttctcaaaaaaaaaatgcattcgccctgcaccatcatcaattgcgtagttctgagcatcagaaagctgtacaactctgtatgcatgaacggcctgtcaggaagccggggcaagcagggaa

SEQ ID NO: 218733 - DNA, 3956 bp, Zea Mays
tctcttgctccagcttcccacttcccgtctccactcccgcccggctcgccgtcgaggacacgtgggtagaacaatcttgtctcctcctcttcccggtgcgtgcgatcgccccttttcgtgttggtggtttcactgcggagttccaggccgcttccgccctttcaggccgcgtggggaagttgtgatatgcaccatggttgggagaactattcaggtccaaggttttgctctaactgacagtgccgaatctgtcaaattgtttttggagcgaattgctggtgctggaaccatctgtgctctcaagctcaggcatccaaggaacatctctgccaactcaagggcatttgctatagttcagttccagtcacaggaaagtgcttcattggtagagaatgcggctcaaagacaggttctcaagattggacggttttatctgagaaccagacctgcagaccgggacattgttccaagaccaaggattccaatgttttctctagaggacattgtgctgcatttgggatgcttggttaaggaaaatatcctatctgctctttttagagcaagtaatgtttcggttcaatttggatttgatatgaaaaagatctacttctacctctcctacaattttactaaatttaaacttgaactttcttacgaaagtatatgggagatgcagcttcaccgtccacctgcttataggtcacggacacagttccttttgattcagggatgacacagatgaacaatggaccaggacaattgattttactccatcagctagcatcgggcaatcatctattttatgtctggaggtgccacaacagtgtgagcttccaagaattggcgactactttgtttactataaagagcagaatcttgactttgaatgtcggaatgggtattcatattcctgtggtagcaaccttgtaccaattgtgaaatctcctgattacatagaggtcccttatgagatactcttcaaaatcaaccatttggttcagaatgggacactcagtgggccaacagttgatcatagtttcttccgtcatgttagcccaaaatttgaacctattgatcatataaaacgagcacttttaaagatgacatatttgaaaagcacctgcttgaacccaacagattggttatctgtgcaatactccagaatacggaaatcacgccatgcatcacaaaagttatctaatatatctctggatgatggcttggtctatgtccacagggtgcaagttacccctgctaaagtgtatttttatggacctgagataaatgtctccaatcgcgttgtgcggcatttctctgcagacatagataacttccttcggatttcatttgttgatgaagactgtgagaagctccgttcagctgatttgtcacctcgatctacttctggaaatgatgcaaggagaactgctctgtataatagagttttgtcagtcctttcaaatggcatcaatattggtgacaagcactttgagtttcttgccttttcttcaagtcagcttcgagataactctgcatggatgtttgcttctcggcagggattgactgcgagcgacataaggaagtggatgggggactttcgagatatcagaaatgtggcaaagtatgctgcaagacttgggcaatctttcagttcctcaacagaaactttaaaagtacacaaatctgaggtggaacgaattcctgatattacaaatggcacaaagtacatattctctgatggagttggaaagatctcagctaattttgcagtggaggtggctatgaagtgcaaattgaaacgctttgctccttctgtttttcagataaggtatggcggttacaaaggtgttgtcgctgtagatacaagatcaaatcataagctttctttgagaaaaagcatgtcaaagttccagtcagaaaatatcactcttgatgtccttgcatacagcaagtaccaaccatgcttcctgaatcggcagttgattactcttctctcaacacttggggttagcgataatgtctttgagctaaagcagaaggaagccttaaggcagttgaacagaatggtaactgaaccacaggctgctcgtgaagcagttgaacttatgcccatgggagaagtaaccaatgtagttaaagaattgttgtcatgtggctaccagcctgatcatgagccatatctttccatgctgctacaaacttttagagcatccaagcttctagagttgaaaacaaagtcaaggatattcatcacacaggggcgagcaatgatgggttgcctggatgaaacctgcacacttaagtacggccaggtattcgtccaagcttcttacagtgcagatgaccatcgcaaggtcgttgtaactggaaaagtagttgtcgccaaaaatccttgtctccaccctggtgacatacgggttctccaggctgttgatgttcctgctctgcaccacttgtttgactgtgttgtctttccacagcagggaccaaggccgcaccctaacgagtgttcagggagtgatcttgatggggacatatattttgtttcttgggatccacatcttattccgagtcgtttggtggatcctatggactatactccagcttcagcagaaacattagaccatgatgtcactattgaggagatacaggagtacttcacaaactacatagttaatgagagtcttgggattatcgccaatgcgcatgtggtctttgcagatcaggaacgtatgaaggctgagagtccaccgtgcgttcaactggccaagctcttctctatagctgtcgatttcccaaagactggagtgccggctctgattccacatgagctacatgtcaaggagtatcctgacttcatggagaaactcgacaaagtcacctatgaatcaaagggtgtgatcgggaagctctatagggaaataaagaagcacacaccacacataaagcacttcacgagggaagtggcaaggcggtcttatgacaccgatttgattgttgatggctatgaagattacattactgaggctatagagttcaaggaagagtacgatttcaggctgggtaatcttatggaccactatggcataaaaagtgaagctgagataataagtggatgtattctaaagatggcaaagaatttcaccaagagtagtgatgctgatgcaattagaatggcggtgagatctttgaggaaagaagctaggtcgtggttcaatgagatgagcacaggagaggatggccaagatgccatggaggccaaggcctctgcttggtaccatgttacttatcatcagcagtactggggcagctacaatgaagggtatgatcggccgcatcttattagcttcccatggtgcgtatatgacaagcttgtggccatcaagcaggggaggaatctcctcacgcggatggatcgaaacttgaggttccgttgagcattgccagcaggtttgctcctgtacatatccctgatcgtttgcactcagcactgccagcaagtgtgcatgaacgatctgatgaattaagacgggcaaactgccgcaagctgacgctctggcctacgtgcgtcttgaaactttcggatgctgccgtctaactaaatgcatgttccttgatttccactgggaccttgagtttgaagtgtgtaaatatgctgcttatgatgtttttagtattggacctctatcaactgccgttctagttagtaacaatggttgccagtcatggattaccaggtttcgccgagctcctgtatggacgaccacgaaggtctatttcttccattaccaagtgcgaagtgtcacatctaacttgcgtagttgcattcaccttttttctcaaaaaaaaaatgcattcgccctgcaccatcatcaattgcgtagttctgagcatcagaaagctgtacaactctgtatgcatgaacggcctgtcaggaagccggggcaagcagggaa

SEQ ID NO: 218734 - DNA, 2528 bp, Zea Mays
cacacccacacacacacgccgctcggaatcggagcttgcatccgaccgcgagcaagcggaccaaatcctcctccatattctatcgcgtgcacgcatctggccgcctcgaccctcggcggcggcggcggcgacggcgacgacgacgatggggctggagatggaggcgatggcggggtcgatcggcgtgtcggtgcccgtgctccggttcctgctctgtttcgcggccaccatcccgacgggcctcctgtggcgcgcggtgcccggcgccatggggcgccacctctacgcggggctcactggtgccacgctctcctacctctccttcggggccacctccaacctcctcttcgtcgtgcccatgacgctcggttaccttgccatgctcctgttccgccgccacgccgggctcatcaccttcctcggcgccttcggcttcctcatcgcatgtcatgtgtactacatgagcggggatgcgtggaaggagggaggcattgatgcaactggagctttaatggttttaacgctgaaagtcatttcgtgctcaataaactacagtgatggtatcttgaaggaagagggtttacgcgatgctcagaaaaaaaaccgattgactaagcttccttctctaattgaatattttgggtattgtctctgttgtgggagccactttgctggaccggtatatgagatgaaagattatcttgaatggactgaaaggaaaggaatatgggctagcccaactccttcgccattgttacctactttgcgtgctctagttcaggctggtatatgcatggggttatatttatacctgtcacctaaatttccactctcacggtttagtgagcccctatattatgaatggggtttttggcaccgactcttctatcagtacatgtcaggctttaccgctcgttggaaatattactttatatggtcaatttcagaagcctcaattatcatatctggtctaggctttactggttggtcggaatcttctcccccaaaagccaaatgggatcgtgcaaaaaatgttgatgtattaggtgttgaattagctggaagttcagttcaattgccccttgtgtggaatattcaagtgagcacatggctacgatactatgtctatgagaggttaattcagaaaggaaagaaaccaggtttccttcaattgttgggtacacagacagtcagtgccatctggcatggactatatcctggatatatcatattctttgttcaatcagcattgatgataaatggttcacgagttatatacagatggcagcaagcagcgagcagttcattactaagcggtatcctggcctttctaaattttgcttatacattgctggtgcttaactactcctgcatcgggttccaggtactgagcttcaaagaaaccttggcatcctaccggagcgtatattatgttggcacaattgttcccattgtgtgtcttctgctgggcaatgttatcaagccagcaaggaaggcgaaggctcggaagaccgagtgaggaaatactcactcaagtgacctttacatagaagaaagatggtgaagcttcaacgaagataaggacattctagttttcaatttatttattctgtctttttgtacggtatcaaatttagcataaggataatgtggtgaccccggttctcctacctcggaactcgattgcgattgatcaatcattaaaacgtgacataaccactggattttcctttacttaatgactactcatacgtgtgtgcgaatgattttttgtcctgacgggcctttttctattgtgttcccatctgcctgctgaatgtcttccggacgccttcccacctggagcttttatttttgactggcaagatctattcaccgtaagtgatatccatggatgcatacatcaggagtgatgaggataccaaatcatcaacttgctcatcaggagtgaggataccaaatcatcaacttgctcatcaggagtgaggataccaaatcatcaacttgctcaggcacgtcgcacatgctgtgtatttcgtctacgaattgaccatgcggaaagtcaaattttgcccgtaatctcagttttcactccacggtccacgcggcatcttgttcttttaatatgcatccttttgcggcgtggtttatgagcgtcaaaatttaaattcagattgctgttagagcttgatggagggttttgatgtagtgcgcatggagatggaggtgatgggcgctttccgcgtggtcatactactaggaaccgacgagcccgacgtccgatttttatgggtcatataaatggtgcagcgcggtatacgcccgtgcggcccggtccaacccaacgtgcggcaagggcggcggcgtggtgagttctggtgttgacgtgacgtggtgttgacgctggactgctggtggtggtggcttcattcttgcatggcagtggcggaggacaaaatttttttatggctctacgttgtataatatttagcacataaccaattaaattataaaaataaaatgcacaa

SEQ ID NO: 218735 - DNA, 1279 bp, Zea Mays
ctgcagtgcagcccatgcttgtgtgatgtcgcagctaagaagtattatccttctaggcagcggctcaccctcccccttcaacctggaaaaggcgggaagccagttgtcctcagtccgaaggccagcctgctagaatactgcgagaagggttctgggtcactgacagtggtcttcaaagatttagggccacaggtctactacagcacactgttcttcttcgagtacctgggtcctctcatcatctaccccatgttctactatctgcccgtctacaagtacttcgggcacgagggggagcgggccatgcaccctgtccagacctacgcaatgtactactggtgcttccactacttcaagcggatcatggagacgttcttcgtgcaccgcttcagccacgcgacgtcgccgctctcgaacgtcttcaggaactgtgcctactactggaccttcggcgcttacattgcttactactgcaaccacccgctgtacaccccagtgagtgatctgcagatgaagattgggtttggttttggggtcgtctgccaggtcgcgaacttctactgccacatcctgctgcggaacctcaggagcccaagcggcagcggcgggtaccagatcccccgcggtttcttgttcaacatcgtgacctgcgccaattacaccaccgagatctaccagtgggtcggcttcaacatcgccacacagaccgtggcaggttacgtcttccttgtcgtggcggcgggcatcatgaccaactgggcgctcggcaagcacagccgtctgaagaagctgtttgacggcaaggatgggaggcccaagtaccctcgccggtgggtgattctccctccgttcctgtgaagaggcggtggtggtggctcactgttggtggtcggcccattgtgattcgatgtctacagacagttgtactgtactaatcgtgcctgtttagcggttgaacttggattccgttgtccgaagtttctaatccgaaagatggatttcattttcttcttcttcttcttagcattatgtcactgtctcacgtcgtcctgtctcaatacagtctaaggttcatgtgatgttatccccatttgtccacgcagaagtgaagtgaatgcagtcactatttcgattcgacactttttctgctgtcgtgtcctatgaccctgcttatctcatctgaggcttgtgatgcttgaactggacgttcagtcactaaacccttatgcagtcgctatgattgatttctagatggtacagctatcggttgtcagcattt

SEQ ID NO: 218736 - DNA, 1284 bp, Zea Mays
cgggaatctgtgggccgcttttatctttcatttgcaccactaagaagtattatccttctaggcagcggctcaccctcccccttcaacctggaaaaggcgggaagccagttgtcctcagtccgaaggccagcctgctagaatactgcgagaagggttctgggtcactgacagtggtcttcaaagatttagggccacaggtctactacagcacactgttcttcttcgagtacctgggtcctctcatcatctaccccatgttctactatctgcccgtctacaagtacttcgggcacgagggggagcgggccatgcaccctgtccagacctacgcaatgtactactggtgcttccactacttcaagcggatcatggagacgttcttcgtgcaccgcttcagccacgcgacgtcgccgctctcgaacgtcttcaggaactgtgcctactactggaccttcggcgcttacattgcttactactgcaaccacccgctgtacaccccagtgagtgatctgcagatgaagattgggtttggttttggggtcgtctgccaggtcgcgaacttctactgccacatcctgctgcggaacctcaggagcccaagcggcagcggcgggtaccagatcccccgcggtttcttgttcaacatcgtgacctgcgccaattacaccaccgagatctaccagtgggtcggcttcaacatcgccacacagaccgtggcaggttacgtcttccttgtcgtggcggcgggcatcatgaccaactgggcgctcggcaagcacagccgtctgaagaagctgtttgacggcaaggatgggaggcccaagtaccctcgccggtgggtgattctccctccgttcctgtgaagaggcggtggtggtggctcactgttggtggtcggcccattgtgattcgatgtctacagacagttgtactgtactaatcgtgcctgtttagcggttgaacttggattccgttgtccgaagtttctaatccgaaagatggatttcattttcttcttcttcttcttagcattatgtcactgtctcacgtcgtcctgtctcaatacagtctaaggttcatgtgatgttatccccatttgtccacgcagaagtgaagtgaatgcagtcactatttcgattcgacactttttctgctgtcgtgtcctatgaccctgcttatctcatctgaggcttgtgatgcttgaactggacgttcagtcactaaacccttatgcagtcgctatgattgatttctagatggtacagctatcggttgtcagcattt

SEQ ID NO: 218737 - DNA, 1269 bp, Zea Mays
aaagaaacacgcgtgtgttctggactaagaagtattatccttctaggcagcggctcaccctcccccttcaacctggaaaaggcgggaagccagttgtcctcagtccgaaggccagcctgctagaatactgcgagaagggttctgggtcactgacagtggtcttcaaagatttagggccacaggtctactacagcacactgttcttcttcgagtacctgggtcctctcatcatctaccccatgttctactatctgcccgtctacaagtacttcgggcacgagggggagcgggccatgcaccctgtccagacctacgcaatgtactactggtgcttccactacttcaagcggatcatggagacgttcttcgtgcaccgcttcagccacgcgacgtcgccgctctcgaacgtcttcaggaactgtgcctactactggaccttcggcgcttacattgcttactactgcaaccacccgctgtacaccccagtgagtgatctgcagatgaagattgggtttggttttggggtcgtctgccaggtcgcgaacttctactgccacatcctgctgcggaacctcaggagcccaagcggcagcggcgggtaccagatcccccgcggtttcttgttcaacatcgtgacctgcgccaattacaccaccgagatctaccagtgggtcggcttcaacatcgccacacagaccgtggcaggttacgtcttccttgtcgtggcggcgggcatcatgaccaactgggcgctcggcaagcacagccgtctgaagaagctgtttgacggcaaggatgggaggcccaagtaccctcgccggtgggtgattctccctccgttcctgtgaagaggcggtggtggtggctcactgttggtggtcggcccattgtgattcgatgtctacagacagttgtactgtactaatcgtgcctgtttagcggttgaacttggattccgttgtccgaagtttctaatccgaaagatggatttcattttcttcttcttcttcttagcattatgtcactgtctcacgtcgtcctgtctcaatacagtctaaggttcatgtgatgttatccccatttgtccacgcagaagtgaagtgaatgcagtcactatttcgattcgacactttttctgctgtcgtgtcctatgaccctgcttatctcatctgaggcttgtgatgcttgaactggacgttcagtcactaaacccttatgcagtcgctatgattgatttctagatggtacagctatcggttgtcagcattt

SEQ ID NO: 218738 - DNA, 2736 bp, Zea Mays
aaaataggcttttttcggtggtctctgtagaagcgccaaaatgtatgctttatttttggtggcttacttagccgccgaaaattactggttttcggcggccggcctatagccgccgaaaatgatgaacagtcttcttgtgtgtatccttcttggttcttgttattcatgacaagtgactaccccattcacataaaccttttaatttctttcgtatcaggagacaattcgacgaaactagacctcatgtgaaaagcagagcatcaacacggaaacccaaaaggctttaattcatttgtacaaaaaaaggtatccacttatgcatgttagtgttcctgtccaatatacacgttgggcaattgcgcactttaaagattaaattaattcctacaacaaatgataattgaacaaaaaataaatcatatgtggcgaaaaacatcatatctatccatgtagcagattaagtggagtgtttggtttaataaatcacttaatctaacatgaggaggtgcatcatgagtctattcgtcaaatttggtatgatgatcatattcctcatattaatactaactaactaactatgagaaatgagatgatgatggatcaactcattctattccataaaccaaacaaaaaaagtgaggagtgggaagatgatgcactaacttatttcttaaaccaaacactctacaaatctacatcaatcgctagaagaaaactcattgtttcttatagtggagaccactgtagcatggtcagtggtgagtacgaagcaaaatgattgatgaagaccgtgcaacattacagtgtatatcaattctgtttaccgaggtttcaatgataatgctctccttagttaatgtatggtattttttgacgaagtacagtcttaccatagacatagcagaagatatcttccatgtttaccttcttcttttcttagttgatggtcaatgtgacatatgtctttttccttctttttcctagcctaccatacgacattagcactggattgtgtcttatggtccttagatacaccatcatttgtcggtttttcaacatcaagaaaatctaacaagttctcaacaaatatgttttcctcttgtgtttaagagccgtgacgaaattccttttaagctataggtaatttggcaatgagatatcccttgccacagatgaatcaggcaagacacacaccattaatgagttgtatctgttgggtgtgtcctctacagctggtcaacagtgaccggattgggctaaacccaactatctatctctttaaatgggcccttgattgggagggcccacgctaacctcggttggagcccccagacacacgacgctatatataggactaaggggtcgcaggaaagactaacgctagtacctcgccccaaaaccacagtccccagaggccccatcgcctaggcgtcggagtgtttggaatcgcgacagcctacagcagctcggatcccgatgccaacaacaaagctaagaagtattatccttctaggcagcggctcaccctcccccttcaacctggaaaaggcgggaagccagttgtcctcagtccgaaggccagcctgctagaatactgcgagaagggttctgggtcactgacagtggtcttcaaagatttagggccacaggtctactacagcacactgttcttcttcgagtacctgggtcctctcatcatctaccccatgttctactatctgcccgtctacaagtacttcgggcacgagggggagcgggccatgcaccctgtccagacctacgcaatgtactactggtgcttccactacttcaagcggatcatggagacgttcttcgtgcaccgcttcagccacgcgacgtcgccgctctcgaacgtcttcaggaactgtgcctactactggaccttcggcgcttacattgcttactactgcaaccacccgctgtacaccccagtgagtgatctgcagatgaagattgggtttggttttggggtcgtctgccaggtcgcgaacttctactgccacatcctgctgcggaacctcaggagcccaagcggcagcggcgggtaccagatcccccgcggtttcttgttcaacatcgtgacctgcgccaattacaccaccgagatctaccagtgggtcggcttcaacatcgccacacagaccgtggcaggttacgtcttccttgtcgtggcggcgggcatcatgaccaactgggcgctcggcaagcacagccgtctgaagaagctgtttgacggcaaggatgggaggcccaagtaccctcgccggtgggtgattctccctccgttcctgtgaagaggcggtggtggtggctcactgttggtggtcggcccattgtgattcgatgtctacagacagttgtactgtactaatcgtgcctgtttagcggttgaacttggattccgttgtccgaagtttctaatccgaaagatggatttcattttcttcttcttcttcttagcattatgtcactgtctcacgtcgtcctgtctcaatacagtctaaggttcatgtgatgttatccccatttgtccacgcagaagtgaagtgaatgcagtcactatttcgattcgacactttttctgctgtcgtgtcctatgaccctgcttatctcatctgaggcttgtgatgcttgaactggacgttcagtcactaaacccttatgcagtcgctatgattgatttctagatggtacagctatcggttgtcagcattt

SEQ ID NO: 218739 - DNA, 1990 bp, Zea Mays
gaagaattgttctcctggattgaattcacaaaacaactgtttgttattttcttctcccgttcacttctctttggcccgaaaccgagagctagtgcttgattcggtcgtttttgggcaccgaacacgttcttgggaccgccgccgccgccctacttccagtcccagctgctcaggtctccatcggcctcgagccctttgccggcgacgagcactcacaacaccagggtgtaacaatgtcttcttcaatggaatcgtcataccttcctgctacaactgagtcattagcccaagctcaagaggctaaggatgcttcagagtccatttcaatcctttaccgtgtcattcaggacccatcttcttctgctgatgcactgagaacaaaagaagttgcaattacaaatcttacaaactacctcactaaagaaaacagagctgaggagctgcgtaatcttttgacccagctcagaccattttttgcagttattcctaaggcaaagactgcaaaaattgtccgtggaataattgatgctgtcgccaagatacctggaacatcagatcttcagatttcactctgcaaggaaatggtagaatggacccgtgcagagaagcgtactttcctccggcaacgtgtggaggcaaggttggcagctctcctgttagagaatcaggagtatactgaagcccttaccctgcttactagtcttatcaaggaagtcaggagacttgatgacaagttacttcttgtggacattgaccttttggaaagcaaacttcacttctccctgagaaatctgccaaaggccaaagcctccttaactgctgctagaacagcagcaaatgccatttatgttccacctgctcagcaaggcactattgatctccagagtggaatcctccatgctgaagaaaaggattacaagactgcttacagctacttctttgaagcatttgaagctttcagtgcactggaggacccgaaggccatctttagcctgaagtacatgctcttgtgtaagataatggttaaccaagctgacgatgttgcaggaataatctcgtctaaggctggcctaaaatatctgggtcctgatgttgatgctatgaaggccatctttagcctgaagtacatgctcttgtgtaagataatggttaaccaagctgacgatgttgcaggaataatctcgtctaaggctggcctaaaatatctgggtcctgatgttgatgctatgaaggctgttgctgatgcatactctaaaagatctctcaagtattttgaaactgcccttcgtgattataagtcccagctggaggaggaccctattgtccacaggcatctttcttctctgtatgatacactgctggagcagaatctctgcaggttgattgagccctactcaagggtggagattgcacatatagcggagatgattgaattgccgattgaccatgttgagaagaagctgtcgcagatgatccttgacaagaaatttgctgggacactagatcaaggtgctggctgcctcattatctttgaggattctaagaccgaggaaatcttccctgccactctcgaaaccatttcgaatgtcgggaaggttgtggacagcctttatgtgaggtcggccaagatcatggcttgaaagcagctagtcttacctgtttgctctgatttcatttccagtctgtcgatgtcctcagacatttattccttcaatattgacagtttattgtgaccgctacaggttcatgtgaccaaaggctagctatttttacgactgaatgagttatgcatgtattggtcttttaatatcagcgtgcagagtcggacggatgttattgtgtgttaattaatctaccatgttatcgaaatgcatgtctttagctccactgcggcttctgtctacagatggacaattagcacttatacgatgtgctgaattaggcacaacacaaaaaagcaccaggctaaccgtcatctcggcccgagcac

SEQ ID NO: 218740 - DNA, 2070 bp, Zea Mays
atccgtgataacgtagttctcaacaaaacgaaccggtttcatcgaccgctctcgcttgcaaagaaaaagaaataaagaaattggtccagtagccctggaagaattgttctcctggattgaattcacaaaacaactgtttgttattttcttctcccgttcacttctctttggcccgaaaccgagagctagtgcttgattcggtcgtttttgggcaccgaacacgttcttgggaccgccgccgccgccctacttccagtcccagctgctcaggtctccatcggcctcgagccctttgccggcgacgagcactcacaacaccagggtgtaacaatgtcttcttcaatggaatcgtcataccttcctgctacaactgagtcattagcccaagctcaagaggctaaggatgcttcagagtccatttcaatcctttaccgtgtcattcaggacccatcttcttctgctgatgcactgagaacaaaagaagttgcaattacaaatcttacaaactacctcactaaagaaaacagagctgaggagctgcgtaatcttttgacccagctcagaccattttttgcagttattcctaaggcaaagactgcaaaaattgtccgtggaataattgatgctgtcgccaagatacctggaacatcagatcttcagatttcactctgcaaggaaatggtagaatggacccgtgcagagaagcgtactttcctccggcaacgtgtggaggcaaggttggcagctctcctgttagagaatcaggagtatactgaagcccttaccctgcttactagtcttatcaaggaagtcaggagacttgatgacaagttacttcttgtggacattgaccttttggaaagcaaacttcacttctccctgagaaatctgccaaaggccaaagcctccttaactgctgctagaacagcagcaaatgccatttatgttccacctgctcagcaaggcactattgatctccagagtggaatcctccatgctgaagaaaaggattacaagactgcttacagctacttctttgaagcatttgaagctttcagtgcactggaggacccgaaggccatctttagcctgaagtacatgctcttgtgtaagataatggttaaccaagctgacgatgttgcaggaataatctcgtctaaggctggcctaaaatatctgggtcctgatgttgatgctatgaaggctgttgctgatgcatactctaaaagatctctcaagtattttgaaactgcccttcgtgattataagtcccagctggaggaggaccctattgtccacaggcatctttcttctctgtatgatacactgctggagcagaatctctgcaggttgattgagccctactcaagggtggagattgcacatatagcggagatgattgaattgccgattgaccatgttgagaagaagctgtcgcagatgatcgttgacaagaaatttgctgggacactagatcaaggtgctgattgcacatatagcggagatgattgaattgccgattgaccatgttgagaagaagctgtcgcagatgatccttgacaagaaatttgctgggacactagatcaaggtgctggctgcctcattatctttgaggattctaagaccgaggaaatcttccctgccactctcgaaaccatttcgaatgtcgggaaggttgtggacagcctttatgtgaggtcggccaagatcatggcttgaaagcagctagtcttacctgtttgctctgatttcatttccagtctgtcgatgtcctcagacatttattccttcaatattgacagtttattgtgaccgctacaggttcatgtgaccaaaggctagctatttttacgactgaatgagttatgcatgtattggtcttttaatatcagcgtgcagagtcggacggatgttattgtgtgttaattaatctaccatgttatcgaaatgcatgtctttagctccactgcggcttctgtctacagatggacaattagcacttatacgatgtgctgaattaggcacaacacaaaaaagcaccaggctaaccgtcatctcggcccgagcac

SEQ ID NO: 218741 - DNA, 2130 bp, Zea Mays
atccgtgataacgtagttctcaacaaaacgaaccggtttcatcgaccgctctcgcttgcaaagaaaaagaaataaagaaattggtccagtagccctggaagaattgttctcctggattgaattcacaaaacaactgtttgttattttcttctcccgttcacttctctttggcccgaaaccgagagctagtgcttgattcggtcgtttttgggcaccgaacacgttcttgggaccgccgccgccgccctacttccagtcccagctgctcaggtctccatcggcctcgagccctttgccggcgacgagcactcacaacaccagttttgtaagaggggatctgtaccagtcaggctgagcagcagcagcagtggtgtgttctggcttgtgtgggacctagaggaagcttacacaacagggaagagtattgtgttagggtgtaacaatgtcttcttcaatggaatcgtcataccttcctgctacaactgagtcattagcccaagctcaagaggctaaggatgcttcagagtccatttcaatcctttaccgtgtcattcaggacccatcttcttctgctgatgcactgagaacaaaagaagttgcaattacaaatcttacaaactacctcactaaagaaaacagagctgaggagctgcgtaatcttttgacccagctcagaccattttttgcagttattcctaaggcaaagactgcaaaaattgtccgtggaataattgatgctgtcgccaagatacctggaacatcagatcttcagatttcactctgcaaggaaatggtagaatggacccgtgcagagaagcgtactttcctccggcaacgtgtggaggcaaggttggcagctctcctgttagagaatcaggagtatactgaagcccttaccctgcttactagtcttatcaaggaagtcaggagacttgatgacaagttacttcttgtggacattgaccttttggaaagcaaacttcacttctccctgagaaatctgccaaaggccaaagcctccttaactgctgctagaacagcagcaaatgccatttatgttccacctgctcagcaaggcactattgatctccagagtggaatcctccatgctgaagaaaaggattacaagactgcttacagctacttctttgaagcatttgaagctttcagtgcactggaggacccgaaggccatctttagcctgaagtacatgctcttgtgtaagataatggttaaccaagctgacgatgttgcaggaataatctcgtctaaggctggcctaaaatatctgggtcctgatgttgatgctatgaaggctgttgctgatgcatactctaaaagatctctcaagtattttgaaactgcccttcgtgattataagtcccagctggaggaggaccctattgtccacaggcatctttcttctctgtatgatacactgctggagcagaatctctgcaggttgattgagccctactcaagggtggagattgcacatatagcggagatgattgaattgttgattgagccctactcaagggtggagattgcacatatagcggagatgattgaattgccgattgaccatgttgagaagaagctgtcgcagatgatccttgacaagaaatttgctgggacactagatcaaggtgctggctgcctcattatctttgaggattctaagaccgaggaaatcttccctgccactctcgaaaccatttcgaatgtcgggaaggttgtggacagcctttatgtgaggtcggccaagatcatggcttgaaagcagctagtcttacctgtttgctctgatttcatttccagtctgtcgatgtcctcagacatttattccttcaatattgacagtttattgtgaccgctacaggttcatgtgaccaaaggctagctatttttacgactgaatgagttatgcatgtattggtcttttaatatcagcgtgcagagtcggacggatgttattgtgtgttaattaatctaccatgttatcgaaatgcatgtctttagctccactgcggcttctgtctacagatggacaattagcacttatacgatgtgctgaattaggcacaacacaaaaaagcaccaggctaaccgtcatctcggcccgagcac

SEQ ID NO: 218742 - DNA, 1602 bp, Zea Mays
ggaagaattgttctcctggattgaattcacaaaacaactgtttgttattttcttctcccgttcacttctctttggcccgaaaccgagagctagtgcttgattcggtcgtttttgggcaccgaacacgttcttgggaccgccgccgccgccctacttccagtcccagctgctcaggtctccatcggcctcgagccctttgccggcgacgagcactcacaacaccagtcaggctgagcagcagcagcagtggtgtgttctggcttgtgtgggacctagaggaagcttacacaacagggaagagtattgtgttagggtgtaacaatgtcttcttcaatggaatcgtcataccttcctgctacaactgagtcattagcccaagctcaagaggctaaggatgcttcagagtccatttcaatcctttaccgtgtcattcaggacccatcttcttctgctgatgcactgagaacaaaagaagttgcaattacaaatcttacaaactacctcactaaagaaaacagagctgaggagctgcgtaatcttttgacccagctcagaccattttttgcagttattcctaaggcaaagactgcaaaaattgtccgtggaataattgatgctgtcgccaagatacctggaacatcagatcttcagatttcactctgcaaggaaatggtagaatggacccgtgcagagaagcgtactttcctccggcaacgtgtggaggcaaggttggcagctctcctgttagagaatcaggagtatactgaagcccttaccctgcttactagtcttatcaaggaagtcaggagacttgatgacaagttacttcttgtggacattgaccttttggaaagcaaacttcacttctccctgagaaatctgccaaaggccaaagcctccttaactgctgctagaacagcagcaaatgccatttatgttccacctgctcagcaaggcactattgatctccagagtggaatcctccatgctgaagaaaaggattacaagactgcttacagctacttctttgaagcatttgaagctttcagtgcactggaggacccgaaggccatctttagcctgaagtacatgctcttgtgtaagataatggttaaccaagctgacgatgttgcaggaataatctcgtctaaggctggcctaaaatatctgggtcctgatgttgatgctatgaaggctgttgctgatgcatactctaaaagatctctcaagtattttgaaactgcccttcgtgattataagtcccagctggaggaggaccctattgtccacaggcatctttcttctctgtatgatacactgctggagcagaatctctgcaggttgattgagccctactcaagggtggagattgcacatatagcggagatgattgaattgccgattgaccatgttgagaagaagctgtcgcagatgatcgttgacaagaaatttgctgggacactagatcaaggtgctggctgcctcattatctttgaggattctaagaccgaggaaatcttccctgccactctcgaaaccatttcgaatgtcgggaaggttgtggacagcctttatgtgaggtcggccaagatcatggcttga

SEQ ID NO: 218743 - DNA, 1723 bp, Zea Mays
atccgtgataacgtagttctcaacaaaacgaaccggtttcatcgaccgctctcgcttgcaaagaaaaagaaataaagaaattggtccagtagccctggaagaattgttctcctggattgaattcacaaaacaactgtttgttattttcttctcccgttcacttctctttggcccgaaaccgagagctagtgcttgattcggtcgtttttgggcaccgaacacgttcttgggaccgccgccgccgccctacttccagtcccagctgctcaggtctccatcggcctcgagccctttgccggcgacgagcactcacaacaccagttttgtaagaggggatctgtaccagtcaggctgagcagcagcagcagtggtgtgttctggcttgtgtgggacctagaggaagcttacacaacagggaagagtattgtgttagggtgtaacaatgtcttcttcaatggaatcgtcataccttcctgctacaactgagtcattagcccaagctcaagaggctaaggatgcttcagagtccatttcaatcctttaccgtgtcattcaggacccatcttcttctgctgatgcactgagaacaaaagaagttgcaattacaaatcttacaaactacctcactaaagaaaacagagctgaggagctgcgtaatcttttgacccagctcagaccattttttgcagttattcctaaggcaaagactgcaaaaattgtccgtggaataattgatgctgtcgccaagatacctggaacatcagatcttcagatttcactctgcaaggaaatggtagaatggacccgtgcagagaagcgtactttcctccggcaacgtgtggaggcaaggttggcagctctcctgttagagaatcaggagtatactgaagcccttaccctgcttactagtcttatcaaggaagtcaggagacttgatgacaagttacttcttgtggacattgaccttttggaaagcaaacttcacttctccctgagaaatctgccaaaggccaaagcctccttaactgctgctagaacagcagcaaatgccatttatgttccacctgctcagcaaggcactattgatctccagagtggaatcctccatgctgaagaaaaggattacaagactgcttacagctacttctttgaagcatttgaagctttcagtgcactggaggacccgaaggccatctttagcctgaagtacatgctcttgtgtaagataatggttaaccaagctgacgatgttgcaggaataatctcgtctaaggctggcctaaaatatctgggtcctgatgttgatgctatgaaggctgttgctgatgcatactctaaaagatctctcaagtattttgaaactgcccttcgtgattataagtcccagctggaggaggaccctattgtccacaggcatctttcttctctgtatgatacactgctggagcagaatctctgcaggttgattgagccctactcaagggtggagattgcacatatagcggagatgattgaattgccgattgaccatgttgagaagaagctgtcgcagatgatcgttgacaagaaatttgctgggacactagatcaaggtgctggctgcctcattatctttgaggattctaagaccgaggaaatcttccctgccactctcgaaaccatttcgaatgtcgggaaggttgtggacagcctttatgtgaggtcggccaagatcatggcttga

SEQ ID NO: 218744 - DNA, 478 bp, Zea Mays
ctcgagctctactcacagaccactgcatgggtgttgaggttcttgtattcctgctagtgatgaccctctaccacagccaccaagtctgctctgtccagagcatcaagtgccagtggtgaccacgctcacaattcttcaccccaccatagccagaacattctagggagttgctggcctgtatgaagcttgttccgtaatcatctcaggtactagatctatgctgctgttgatggtgctaagtgtcggtgggctcggcgttcttataggttaaagtagctcttctatacttctttatgaggatgatcacttaagctagcatgtatttcaaacttatgaaaattatacatgcttcaaagtgaaatactttggatttactttataatcactctgatcttgtatagtataatcttaatgtaacttgtaactttttgtaataaagaaatttcgctacaagtgttggtgtgtgatttgtgtttac

SEQ ID NO: 218745 - DNA, 2320 bp, Zea Mays
atttacggtggctgcacctcaagcgcttcggcaaggtggacagcgccaacaagtacgagaccttgctggaggtggtttaggtgatgaccgacctgaagttgatcatcaagcgggcctacatttcctccgacgacgagtggttcatgaacggtgagtggcgctgcctccccctgctgtctttaggaagttaagataggttaaaggaagatggaacctttctagggtgatgcaaagcctgacttttacttggattgtgtaatatttctattttctttcctccccctcccccgaacctgatgtgtgatgtgtgttgggctttgcttcgcctttctgcaggtactaaaccaacttttattcatgttgctttctaaatatattgtgtctatgtatctacatataaattatgtttactaagcatgtactgttttcgagtaccaggttatatacttatagagtgtggatacatgtttgcaatagctccagatcaattgcaaatgaaccttgtgagacatctcctctctggcccaactgcttcatactaagacacattatttttagtttactttttattagcttttttgcttacaatcctgtgaagtgtggtgtcaacagcggaatgatgtatccttgcaaataatatttgttaaaacattttgttaactttctaaaattgtcaatatttctttggttcctgacaaatatagtggtctatttactactgattttagagttttctatttactaatacacccatatagggcagagcttagttgagtctgccgtctgccctggttccacagacatgaaagagaactctatcaatttgtgaagataattttgtgaatcacttgaagttttgactgcttgtatcatacttgactgcctggtttcagtttatttattatcatctttgcgtcaccagtgctttacccatactactcttgaattggcgtaccttgattctaatgtaatttattttagcctaatttgtgtgaatcattgaatttatagaccactgctataggctgatccattatagctgagaactcattactcctaattgaagttaaaattgagttttgtagttttgaagttagttttcactgttgcagactgataatgtgtaacatcttatgagttttgattattgaagattcttcttggtctttattattaaagaatccattttgacatgtttaggtgttttttattacttatgttctgcaggttgatatcgtgattattcacggcattgtcttattggatgttcttgacaaggagctcatcacttatgccattagagttcgctaatggctttattcagagctctaaagaaaagcattctacacccaagtatgggctcatctaccatgcatcctcaattgggaaggcttctcaaaagcataacggaaaaactctcggtctctatctgcaaaagctgctcttgctatccgataggatgcccttggtgttgatgaggacaactccattggcactaagagtcgactgaaggttgagacacagtttcaaattcttgaaggtcgtgacggttgggctggagagcacgctggtaggggaggacctcaacgaccgtgcctttgtctatggcttccttagcttcctggacaagatctcttgcgtaatcgtcctatttgtcttggaattgtacgaagacacgaatgagatgtagcgagatgaggggacacggtgagcaggtacgagatgggcctgatctcctcatacttcaccgtcctctccctggtggtcacatccattctgaggctataggtcaccactccgaaagccattgcaatggaagccccactgcttgtctgacaaactgaagaaaccggtgagtgtagatgtcgatcgggttggaagaaagaagaaagaaatgtgcatcctcttcaattagtttcaattagatttgaaagcaggtcactttgtaatagtatgtgtcttgtcatcgtgttggcacaacacagatgtgtatgatgtagttacgtataactcaagattctcattgctatgctttattataccaacaaagttcagatgtttggatatttctagcttattagggtctgatgcggaacatgtttaaacaaatatatcaaatttgaataatgtcaacatgtgtgatatatagaaactatagcaacacatgagccacattagattttgtcattaaattttcttgttacaacttatataatacacaacattttgaatgatgctaacaaaagaagaataacaattaatgtttttaattattggttccatagcaacgcacgggcatacacctagtaaggtagaaaag

SEQ ID NO: 218746 - DNA, 1908 bp, Zea Mays
cagcgcacggccaccctgccgcgctcccggtccctgcgcgtgtttatccacgcctcacgccgcgctcgcttcggccacggcggtaatggcggcggcccgacgcctcttctccttccacctccaagcgcgtcctctcgccgccggtgttgccgtcgcgaccccgcactgccacggaaagcatgacgcggtctcgtgcaaggccacggggaaaaccaagcccaaggcgaaggcgggcaagggcggcgagcggcagcataggcgggcgctggaggagcatctcaagcggcgcacccgttccgcagctgccttcgatgccgacctgtacggtcggcgcgcccacgagcaccatatccccgtcttgcttggcgaggtcctcgccgccttccgcaggccccgcccgctccgctccttcgtcgactgcaccctcggcgccgcaggacactccctcgccatgatggaggcgcacccggagttggagttgtacattggcatggacgtcgacccctccgctctggggattggccatgggcacattgaggccttccttgctggtagggaaagggaagcgaatggaggggaagacgatgccttgcttgggacgctgcgtgcctacactcatgtcaagaacttcaagtgaataaatctaataggggattcagtgtactccaggatggtcctcttgatatgcgcatggaccctaaggcaactttaagagcagaggacattttgaattcttggccggagcttgaacttgggcgtatcctgcgtgaatatggggaggaaagcaactggcaatccgtccagaagcaaattgttaaagcccggtctgtgggcggtttacactctactggggatcttgtcaaactaatccaaaggatgtgtaccatatcaagcgggcggcagggctggatcaagacttcaacaagagtgtttcaggccctcaggattgcagtcaatgatgagctccgggttctagaagattcactccattcatgctttgactgtctggcgacaggtggtcggcttgctgtaatctcattccacagtctggaggatagaattgtgaagaaaactttcttggagctcatccatgggggtgaagcaaatgaagaagacgacaaagacgaccaggcactcactgatatcgaagacggagatgaaccatggtctggccagagagtgcaaggaaggaatggaaccgtcctcacaaaaagaccaataaccccctcgcaagaggaggaaaaactaaaccagaggtgcagaagcgcaaagcttagagtcattcagaagacctgaataatttcggataaattttgaaggattcctgggcacatcggcgtgtagttgtttatagccagagaaatgtgaatgggattctcacttgcgtgcacagccagctgcagtctggatcaccagaaattttacatcagccggatgtggtggtgctatttatcctcgacaagaaatctagaggcttaggttagtcgaaaaaaaactcactgtatctgcatcagtttctgaacttcgttcatgtatatcgcctcatgaactctgtaaacctttcacttgcaagacacgataatcagtttaggccctgtttgggaacaaagtttttgaaaactacagtttttgaaatactatactatactttagttatgacaataccgtagtttataataccgcagttttgaaaactgaggtccagagctaagtttagaatgccttaaaacaactatagtatttgcaatacttcagttttgaaaacagagattttacccagcttgccaaacaccattatgtatataatactgcagtatttgagaatactgcagtattcttccaaaactgcagaaaaactttgttcccaaacacccccttagggttttcgagccctccttcactcctggt

SEQ ID NO: 218747 - DNA, 993 bp, Zea Mays
cgtacacgaaaaagacggcccgttggcccggaattattaccgtctgtttgtcctcgtctccctccgctgtccgattgtgcgctgtcgcagcctctgccctctcccagcccgctcctccatctccggtgagacgcgaattgaatcgcatcgaatccatgggcagctcctcgaataccaacacgagcggcggggccagcgacaaggaggagaagaagaaggaggacaagatcaaaggcaaggactcgtcggggccatccttcaaggagaacgaaagggtcctcgcctaccacggccccctcctctacgaggccaaggttcaaaggatcgaaaaccatgaagatgaatggcgctactttgtccattatctcggttggaataagaactgggatgaatgggttgcaaatgaccgcttgttggaattgacggaggaaaacgtgcgcaaacaacaagagcttgataagaatcaggtagttgacaaaacaatgaagtctggacggtcaacacagcataaaccaaaagtctccaatgcggatgcaaaagctgataaagatgacactaagagtctcatttcagtgaaggggaagaaacgtaaaagtcagcttgggactgagattcaggacaaggaaaaaagatcatcacatagtctactagtgttgcagtttcctttgccactgaagaagcaacttgtggatgattgggagtttgttacgcagatggcttgtgaagctaccacgatcacctactgttgatgatattctaaagaagtacttggaacaccgggcaaagaaggatggcaagataaatgactcctatgctgagattctgaaaggattacgctgctactttgataaagcattgcctgcaatgcttttatataagaaagagcgagatcagtatgctgaagaagttaaaggtgatgtctcaccatcaactgtatatggagctgagcatctattgcgcctttttgacttactatggtgcgaggtagcccct

SEQ ID NO: 218748 - DNA, 1389 bp, Zea Mays
attaccgtctgtttgtcctcgtctccctccgctgtccgattgtgcgctgtcgcagcctctgccctctcccagcccgctcctccatctccggtgagacgcgaattgaatcgcatcgaatccatgggcagctcctcgaataccaacacgagcggcggggccagcgacaaggaggagaagaagaaggaggacaagatcaaaggcaaggactcgtcggggccatccttcaaggagaacgaaagggtcctcgcctaccacggccccctcctctacgaggccaaggttcaaaggatcgaaaaccatgaagatgaatggcgctactttgtccattatctcggttggaataagaactgggatgaatgggttgcaaatgaccgcttgttggaattgacggaggaaaacgtgcgcaaacaacaagagcttgataagaatcaggtagttgacaaaacaatgaagtctggacggtcaacacagcataaaccaaaagtctccaatgcggatgcaaaagctgataaagatgacactaagagtctcatgaaggggaagaaacgtaaaagtcagcttgggactgagattcaggacaaggaaaaaagatcatcacatagtctactagtgttgcagtttcctttgccactgaagaagcaacttgtggatgattgggagtttgttacgcagatggcttgtgaagctaccacgatcacctactgttgatgatattctaaagaagtacttggaacaccgggcaaagaaggatggcaagataaatgactcctatgctgagattctgaaaggattacgctgctactttgataaagcattgcctgcaatgcttttatataagaaagagcgagatcagtatgctgaagaagttaaaggtgatgtctcaccatcaactgtatatggagctgagcatctattgcgcctttttgtaaaattgccagagctacttgcttctgtcaatatggaggaagatgcgttgaacaagctacagctgaaactgctggacgttctcaaaagaatcagatcaccttctttacctctgcgtacgatggttcttgtaaaggtgcagatgaggataaaaccaaatgattgcatgtgaacgttttatatcatgtaacatctttcgatggacttgtctggcactattgttgatatgaatgtcgcttaggacaacaatcggtttatgtaggatagatgctgcagattcctgaaagacggtacttgaactgcccggagcatgttgtattttcttaagatgctggaactaagacggcttagttgaattttcactatcaagtgagtctcggtcttgccccaaaaagaatgttttgtacctcctctgtcccaatttatacgacaatttataattcgtatgacttttttggaccaagt

SEQ ID NO: 218749 - DNA, 1404 bp, Zea Mays
gtctgtttgtcctcgtctccctccgctgtccgattgtgcgctgtcgcagcctctgccctctcccagcccgctcctccatctccggtgagacgcgaattgaatcgcatcgaatccatgggcagctcctcgaataccaacacgagcggcggggccagcgacaaggaggagaagaagaaggaggacaagatcaaaggcaaggactcgtcggggccatccttcaaggagaacgaaagggtcctcgcctaccacggccccctcctctacgaggccaaggttcaaaggatcgaaaaccatgaagatgaatggcgctactttgtccattatctcggttggaataagaactgggatgaatgggttgcaaatgaccgcttgttggaattgacggaggaaaacgtgcgcaaacaacaagagcttgataagaatcaggtagttgacaaaacaatgaagtctggacggtcaacacagcataaaccaaaagtctccaatgcggatgcaaaagctgataaagatgacactaagagtctcatttcagtgaaggggaagaaacgtaaaagtcagcttgggactgagattcaggacaaggaaaaaagatcatcacatagtctactagtgttgcagtttcctttgccactgaagaagcaacttgtggatgattgggagtttgttacgcagatgggtaagcttgtgaagctaccacgatcacctactgttgatgatattctaaagaagtacttggaacaccgggcaaagaaggatggcaagataaatgactcctatgctgagattctgaaaggattacgctgctactttgataaagcattgcctgcaatgcttttatataagaaagagcgagatcagtatgctgaagaagttaaaggtgatgtctcaccatcaactgtatatggagctgagcatctattgcgcctttttgtaaaattgccagagctacttgcttctgtcaatatggaggaagatgcgttgaacaagctacagctgaaactgctggacgttctcaagtttcttcagaagaatcagatcaccttctttacctctgcgtacgatggttcttgtaaaggtgcagatgaggataaaaccaaatgattgcatgtgaacgttttatatcatgtaacatctttcgatggacttgtctggcactattgttgatatgaatgtcgcttaggacaacaatcggtttatgtaggatagatgctgcagattcctgaaagacggtacttgaactgcccggagcatgttgtattttcttaagatgctggaactaagacggcttagttgaattttcactatcaagtgagtctcggtcttgccccaaaaagaatgttttgtacctcctctgtcccaatttatacgacaatttataattcgtatgacttttttggaccaagt

SEQ ID NO: 218750 - DNA, 1346 bp, Zea Mays
gtttgtcctcgtctccctccgctgtccgattgtgcgctgtcgcagcctctgccctctcccagcccgctcctccatctccggtgagacgcgaattgaatcgcatcgaatccatgggcagctcctcgaataccaacacgagcggcggggccagcgacaaggaggagaagaagaaggaggacaagatcaaaggcaaggactcgtcggggccatccttcaaggagaacgaaagggtcctcgcctaccacggccccctcctctacgaggccaaggttcaaaggatcgaaaaccatgaagatgaatggcgctactttgtccattatctcggttggaataagaactgggatgaatgggttgcaaatgaccgcttgttggaattgacggaggaaaacgtgcgcaaacaacaagagcttgataagaatcaggtagttgacaaaacaatgaagtctggacggtcaacacagcataaaccaaaagtctccaatgcggatgcaaaagctgataaagatgacactaagagtctcatgaaggggaagaaacgtaaaagtcagcttgggactgagtttcctttgccactgaagaagcaacttgtggatgattgggagtttgttacgcagatgggtaagcttgtgaagctaccacgatcacctactgttgatgatattctaaagaagtacttggaacaccgggcaaagaaggatggcaagataaatgactcctatgctgagattctgaaaggattacgctgctactttgataaagcattgcctgcaatgcttttatataagaaagagcgagatcagtatgctgaagaagttaaaggtgatgtctcaccatcaactgtatatggagctgagcatctattgcgcctttttgtaaaattgccagagctacttgcttctgtcaatatggaggaagatgcgttgaacaagctacagctgaaactgctggacgttctcaagtttcttcagaagaatcagatcaccttctttacctctgcgtacgatggttcttgtaaaggtgcagatgaggataaaaccaaatgattgcatgtgaacgttttatatcatgtaacatctttcgatggacttgtctggcactattgttgatatgaatgtcgcttaggacaacaatcggtttatgtaggatagatgctgcagattcctgaaagacggtacttgaactgcccggagcatgttgtattttcttaagatgctggaactaagacggcttagttgaattttcactatcaagtgagtctcggtcttgccccaaaaagaatgttttgtacctcctctgtcccaatttatacgacaatttataattcgtatgacttttttggaccaagt

SEQ ID NO: 218751 - DNA, 1367 bp, Zea Mays
ctccgctgtccgattgtgcgctgtcgcagcctctgccctctcccagcccgctcctccatctccggtgagacgcgaattgaatcgcatcgaatccatgggcagctcctcgaataccaacacgagcggcggggccagcgacaaggaggagaagaagaaggaggacaagatcaaaggcaaggactcgtcggggccatccttcaaggagaacgaaagggtcctcgcctaccacggccccctcctctacgaggccaaggttcaaaggatcgaaaaccatgaagatgaatggcgctactttgtccattatctcggttggaataagaactgggatgaatgggttgcaaatgaccgcttgttggaattgacggaggaaaacgtgcgcaaacaacaagagcttgataagaatcaggtagttgacaaaacaatgaagtctggacggtcaacacagcataaaccaaaagtctccaatgcggatgcaaaagctgataaagatgacactaagagtctcatgaaggggaagaaacgtaaaagtcagcttgggactgaggacaaggaaaaaagatcatcacatagtctactagtgttgcagtttcctttgccactgaagaagcaacttgtggatgattgggagtttgttacgcagatggcttgtgaagctaccacgatcacctactgttgatgatattctaaagaagtacttggaacaccgggcaaagaaggatggcaagataaatgactcctatgctgagattctgaaaggattacgctgctactttgataaagcattgcctgcaatgcttttatataagaaagagcgagatcagtatgctgaagaagttaaaggtgatgtctcaccatcaactgtatatggagctgagcatctattgcgcctttttgtaaaattgccagagctacttgcttctgtcaatatggaggaagatgcgttgaacaagctacagctgaaactgctggacgttctcaagtttcttcagaagaatcagatcaccttctttacctctgcgtacgatggttcttgtaaaggtgcagatgaggataaaaccaaatgattgcatgtgaacgttttatatcatgtaacatctttcgatggacttgtctggcactattgttgatatgaatgtcgcttaggacaacaatcggtttatgtaggatagatgctgcagattcctgaaagacggtacttgaactgcccggagcatgttgtattttcttaagatgctggaactaagacggcttagttgaattttcactatcaagtgagtctcggtcttgccccaaaaagaatgttttgtacctcctctgtcccaatttatacgacaatttataattcgtatgacttttttggaccaagt

SEQ ID NO: 218752 - DNA, 1303 bp, Zea Mays
gtccgattgtgcgctgtcgcagcctctgccctctcccagcccgctcctccatctccggtgagacgcgaattgaatcgcatcgaatccatgggcagctcctcgaataccaacacgagcggcggggccagcgacaaggaggagaagaagaaggaggacaagatcaaaggcaaggactcgtcggggccatccttcaaggagaacgaaagggtcctcgcctaccacggccccctcctctacgaggccaagctgggatgaatgggttgcaaatgaccgcttgttggaattgacggaggaaaacgtgcgcaaacaacaagagcttgataagaatcaggtagttgacaaaacaatgaagtctggacggtcaacacagcataaaccaaaagtctccaatgcggatgcaaaagctgataaagatgacactaagagtctcatgaaggggaagaaacgtaaaagtcagcttgggactgagattcaggacaaggaaaaaagatcatcacatagtctactagtgttgcagtttcctttgccactgaagaagcaacttgtggatgattgggagtttgttacgcagatgggtaagcttgtgaagctaccacgatcacctactgttgatgatattctaaagaagtacttggaacaccgggcaaagaaggatggcaagataaatgactcctatgctgagattctgaaaggattacgctgctactttgataaagcattgcctgcaatgcttttatataagaaagagcgagatcagtatgctgaagaagttaaaggtgatgtctcaccatcaactgtatatggagctgagcatctattgcgcctttttgtaaaattgccagagctacttgcttctgtcaatatggaggaagatgcgttgaacaagctacagctgaaactgctggacgttctcaagtttcttcagaagaatcagatcaccttctttacctctgcgtacgatggttcttgtaaaggtgcagatgaggataaaaccaaatgattgcatgtgaacgttttatatcatgtaacatctttcgatggacttgtctggcactattgttgatatgaatgtcgcttaggacaacaatcggtttatgtaggatagatgctgcagattcctgaaagacggtacttgaactgcccggagcatgttgtattttcttaagatgctggaactaagacggcttagttgaattttcactatcaagtgagtctcggtcttgccccaaaaagaatgttttgtacctcctctgtcccaatttatacgacaatttataattcgtatgacttttttggaccaagt

SEQ ID NO: 218753 - DNA, 1848 bp, Zea Mays
tttttccttttatttttgtttgtttggattctctatatttttttttctattgttatgcatcctttagccaaatatcatcttaaacaaaagatggaccaagccaagagctaacagttctgtgtcttgtaggtgcagaggcatcttctgaccaatgaaaatggtgaaaccaggtagagtatctgactcaaagataacaacgtttacatgcagatacaagacaacaatatcattgttctctgaacacacatgacctccattgtgatcaatactcttgttcatcctcctccagtgacccagcctgtgatgtcttctcgtggtcattctcaagctggctgaagttccccttctccttgatcagctggatgtggtggtgcttgcagtacagcttcccctcgtgcgcaatgtagttagaagggctgatggtgcaccctccatggcagcacttgaagcagctcttgtggtacatagtgttattaacagtgacctggatgcttaaccggttgtcaagtgaagaaggctcaaactaccggaagaatgattgagatggttgaacacagaatcttaccctctcagttggatagactgtcttgctgcatccaacacatttctctctggtgccagcaaaggcgcttgagactttagtagcattctgccaaataatatgcaatcatgatgagcatcatctagtgccagttgttcataaagaacaaaacatgaatggtgtcaactggatgggtgatatgaaacatgtttaaaaccatatacagcactgatctagtcatatacctcatgaatatcaagttttttttttgtgatctgttaaatatctggtgttctgatctttttattggacaagatttactctgttctgatccaagcataacagttaggttttgagtggatctttctctctctaaccattgggattgctgtgcattcaagatccaagcatctcacatcatgtttaaggagttgtttgtgcatcaatgattgaatgtatttgtttcctgtgctactctggactgaaaaagtgaaggaaaaaaatgcaaactttgtaggcactgagaaaaacacataaacacatgaatattaaggcgttgcatatacctcattcccaacgtttctttctggcttgacaaccttcggagttcctgaagccatttgtaggtgaggagacacgcaagaacaccactggatctatttcgtactgcaaagggaaggggggaaaacgatgataccttcgaagctcttgtccaagctccctgtcctcttgaacagctggtcgaagtgaggcctgcagtagagcactccctcgaaggagttgtagttggcgagctgcggcggagaacatacatcctcagacgcacacacaaaccaatgctggtctcagctttgcagatgaagcatgcaggtcgtggtaccttgagggtgcccttgcagtggtggcagcggaagcaggccttgtggtagatgcggttgtcggcggtgagcttgtccacaaggtacaccgtcttgtcgcaggcggtgcacttggtggtcgtcccctggaaggaggtcgccatggccgccgtcgtctctcttccaacgacacactctgcttacggaggcgaggctgtgtagccgatggctgcctatatgggaactgtgggttggttggttggtggtggtggtgagctgcagccgggtattgataccgctaggtaggcaggacacagctagctagtgagggagaatgttgggggtgtcaccgtgtcaggcatcagccatgggaaggagagagagagagagagagcatacgaggtggaggtgggggtcggtcctgcacgaatgccgccataccaccatgat

SEQ ID NO: 218754 - DNA, 425 bp, Zea Mays
ttaatttgtgcagcatgaaacagtattttctcaatgaccttgtagtcttgatgtgaaattatggcagtaacatgatgtaccgactactgtctgcatttttcaggagcatttgttatctctattctctcatcaccgctagactaacattgagttgtgttactttgacgagtttgagacttctcagagctcagatactctaaggaggagcaaattcccgttgaagaatttgagagaaggaatttcacctatctactgaagtgagttttattagtttgttcaaatggaccgtgctgtcatttcggatgcggataccaaacaagttttttaatgcttggagcaacttttgttcattcgataatatttgatgaattcaacatcgtgatgctttagtgctctatcccttatcccgggcatgtgaaagtgaa

SEQ ID NO: 218755 - DNA, 644 bp, Zea Mays
ccaagagcgtcaccgccgctgccatcttcaccgccgcggacctctcttcccagatgctcacgcttgatcctgaggattcacttgattttcttaggacggcacgtatggctacttatgtgtttctgatctctggacctaccctccatctttggttcaattttatctcaaaattgttccccaaaaaggatgtagtgaacacattgaagaagatggctctagggcaagcagtctatggaccaattatgaagtcagttttcttctcgtataatgcaggattacaaggcgagactcttcctgagatcattgcaagattgaagagggatctagttcccgccatcacaagcgggcttttatattggccaacttgtgatctcattactttcaagtttgttccagttcatttacagccgctagtgagcaattcattctcattcctttggaccatctacataacatatatggccagcttgaagaaagcagatgcatgtggatgtggccacgagtacgtagctgttgtcaaatgactccaacatggctgttgtctgtcgattctttgtacaaggcagacttaatggacatctcttggatctctaggacgttatctgtcgttttattatcgaccaacgattacagattttagatag

SEQ ID NO: 218756 - DNA, 1290 bp, Zea Mays
caattattgtatatttaccatcatcaaacttattaggttttttgttcaaaaaacgcgcaaaagcaaatgattggagcaagcgatggtttgttctaaatgagaaaagtggaaagcttggatacacaaagaaacaagaggagagacattttcggggtgtcattaatttggaggattgtaatcttgaggataatttagacgatgaagatgctccaagaagttcgaaggattccaaaaaggcaaatatggtagataccggaaaagattctagccttatgttcaagattacccacaagattgcatataaaaatgtgttgaaagctcatagcgctgttatactgaaagctgaaagcatgagtgataaaactgaatggatcgccaagattaagggcatcgtcgacccaaaagggctttctgcaaagaaaccaagcgcttcagaaggcggtgccccagtgaggcaaagccatccagatggttccctaattttccacagatattcatgcatactatccttccaggaaccagtactcaagaaacctgtgaaccatgaagaagagcttcgatggatatcccaggaagtccgtgcatatgtggaagcagtcctcaacaatcttgcaggaaatgtccccaagctgtggttctctgccaagtagagaaagccaaagaagatatgctcagccagttatatacttctataagcacgcaaagcttagccaaaatcgaagagctaatccaggaggaccacaacgtgaagcggaagcgtgaaaagttccagctgcagtcgtcgcttctttccaaggtcactcggctgctcagcatccatgacagccggtcgggcagtgctggtctgtcgacagattctgctggatcagcccgaggaacggcggacactctggtgacgactggagatctgcattcggagctggatcggccagttggtctactggagcagccattgccggccgccgcgtaccgagtcgaggtccgccgccgcctccaccaaatgttggctgattgtgagcttttttagcagaacatgtattactcaaaacaaggtgaacgtatataggcttatgaatcgcagatcgtggattaatagaagaggtagattttttttcaactattcacattaattagtcctgtactaggatcgattcagcgtctgtccgatcgaggcattccgccaccggatacttttttttcatcttctcaaatatcaactgttgtctcccgttccgtcgtcataagttcatatactactaatattattttacgcacttctttctattacag

SEQ ID NO: 218757 - DNA, 2935 bp, Zea Mays
atggaggaactggcggagctcgccgacaccatcctgcagggcaccgcattgctcgcggacgacgacccctccgaagatcgcccgagccgccgcggctcgtccttcctcacggtcgtcgcgatcggcaacgtcggcgcgggaaaatcagcggtgctcaatgggctcatcggccatcccgtgctcgtgagtacagtcctccccctttctttcttttcgcaattgtctgtgttgcctaccggggagaatggcgccacaagagccccaatctgtgtcgagctgcagcgggacgcatcactcagcagcaaggccatcgttctgcagatcgatagcaagtcgcagcaggtttccgcgagttccatcaggcactcgttgcaggacaggttgagtaaggtttccggcaaggggcggccggatgagatcactgtgaaattgtgcactagcacagcccctccattaaaactaattgacataccgggcgttgaccaacggagcacggatgaatcaataagcaactatgctgcacgcaacgatgcaattctactagttatcattccagctcttcaagcgcccgatgtggcatcttctcgagctctaaggattgccagagaattggactcagaaggcccaagaactgcagcggacatccaatgggtagctacaattggccattctgttcctactgcctctgctcagtctgaagcaggttctgaaacaccgccggaagcttattggcaagcagaagttaaaacccttgtatctactcttggtggagctcccgaaagtaagcttgggagagtagctttagttgattcactttctaagcagataaaagcaaggataaaagctaggctgccaaatcttctaaatggtctccaagggaagtctcaagttgtccaagatgaattagcaaagcttggagaacatatggtccaaagttctgatggaaccaaagcaattgctttaggactttgtcgagaatttgaggataagtttctggaaaacattgctgggggtgagggtgccggttggaaagttgttgctagttttgagggaaagtttccaactaggatcaaacaactacctgtggaaaagcattttgatatgaaaaatgtcaaaaaggttgttttggaggctgatggttatcagccatacctgatatcacctgaaaaaggcttaaggttcctcataaaagggcttctcgaattagcaaaagaaccatcgatactccttgtggatgaggttcaccgtgtattgctagacatagtatcatctgcagcaaatgcaactccaggacttggtagataccctgcatttaaacgagaggtaattgcaatagcatctactgctctagatggtttcaagaatgaggcaagaaagatggtcgttgcactagttgacatggagagggcattcgtacctccccaacattttattcgcttagtgcaaagaaggatggaaaggcaacgccaggaggaggagctgaagaaccgctctacaaggaggggccaggatccagaccaaagcagagatacaaccccacaaaaaaattcacatcaaggagagatgaaacaggcatcaaatttacaagttctaggtcctgcaggagaaattattgctggttttttgttcaaaaaacgcgcaaaagcaaatgattggagcaagcgatggtttgttctaaatgagaaaagtggaaaggattgtaatcttgaggataatttagacgatgaagatgctccaagaagttcgaaggattccaaaaaggcaaatatggtagataccggaaaagattctagccttatgttcaagattacccacaagattgcatataaaaatgtgttgaaagctcatagcgctgttatactgaaagctgaaagcatgagtgataaaactgaatggatcgccaagattaagggcatcgtcgacccaaaagggctttctgcaaagaaaccaagcgcttcagaaggcggtgccccagtgaggcaaagccatccagatggttccctaattttccacagatattcatgcatactatccttccaggaaccagtactcaagaaacctgtgaaccatgaagaagagcttcgatggatatcccaggaagtccgtgcatatgtggaagcagtcctcaacaatcttgcaggaaatgtccccaagttaagaccacaatctttgtccaggctttcctgtgtagcaggctgtggttctctgccaagtagagaaagccaaagaagatatgctcagccagttatatacttctataagcacgcaaagcttagccaaaatcgaagagctaatccaggaggaccacaacgtgaagcggaagcgtgaaaagttccagctgcagtcgtcgcttctttccaaggtcactcggctgctcagcatccatgacagccggtcgggcagtgctggtctgtcgacagattctgctggatcagctggggcgctgctacctggtgagttgagtttgcatggaaattgctccatcgccaaccgtgtctcttgcgcagagagtagcccgaggaacggcggacactctggtgacgactggagatctgcattcggagctggatcggccagttggtctactggagcagccattgccggccgccgcgtaccgagtcgaggtccgccgccgcctccaccaaatgttggctgattgtgagcttttttagcagaacatgtattactcaaaacaaggtgaacgtatataggcttatgaatcgcagatcgtggattaatagaagaggtagattttttttcaactattcacattaattagtcctgtactaggatcgattcagcgtctgtccgatcgaggcattccgccaccggatacttttttttcatcttctcaaatatcaactgttgtctcccgttccgtcgtcataagttcatatactactaatattattttacgcacttctttctattacag

SEQ ID NO: 218758 - DNA, 2955 bp, Zea Mays
atggaggaactggcggagctcgccgacaccatcctgcagggcaccgcattgctcgcggacgacgacccctccgaagatcgcccgagccgccgcggctcgtccttcctcacggtcgtcgcgatcggcaacgtcggcgcgggaaaatcagcggtgctcaatgggctcatcggccatcccgtgctcgtgagtacagtcctccccctttctttcttttcgcaattgtctgtgttgcctaccggggagaatggcgccacaagagccccaatctgtgtcgagctgcagcgggacgcatcactcagcagcaaggccatcgttctgcagatcgatagcaagtcgcagcaggtttccgcgagttccatcaggcactcgttgcaggacaggttgagtaaggtttccggcaaggggcggccggatgagatcactgtgaaattgtgcactagcacagcccctccattaaaactaattgacataccgggcgttgaccaacggagcacggatgaatcaataagcaactatgctgcacgcaacgatgcaattctactagttatcattccagctcttcaagcgcccgatgtggcatcttctcgagctctaaggattgccagagaattggactcagaaggcccaagaactgcagcggacatccaatgggtagctacaattggccattctgttcctactgcctctgctcagtctgaagcaggttctgaaacaccgccggaagcttattggcaagcagaagttaaaacccttgtatctactcttggtggagctcccgaaagtaagcttgggagagtagctttagttgattcactttctaagcagataaaagcaaggataaaagctaggctgccaaatcttctaaatggtctccaagggaagtctcaagttgtccaagatgaattagcaaagcttggagaacatatggtccaaagttctgatggaaccaaagcaattgctttaggactttgtcgagaatttgaggataagtttctggaaaacattgctgggggtgagggtgccggttggaaagttgttgctagttttgagggaaagtttccaactaggatcaaacaactacctgtggaaaagcattttgatatgaaaaatgtcaaaaaggttgttttggaggctgatggttatcagccatacctgatatcacctgaaaaaggcttaaggttcctcataaaagggcttctcgaattagcaaaagaaccatcgatactccttgtggatgaggttcaccgtgtattgctagacatagtatcatctgcagcaaatgcaactccaggacttggtagataccctgcatttaaacgagaggtaattgcaatagcatctactgctctagatggtttcaagaatgaggcaagaaagatggtcgttgcactagttgacatggagagggcattcgtacctccccaacattttattcgcttagtgcaaagaaggatggaaaggcaacgccaggaggaggagctgaagaaccgctctacaaggaggggccaggatccagaccaaagcagagatacaaccccacaaaaaaattcacatcaaggagagatgaaacaggcatcaaatttacaagttctaggtcctgcaggagaaattattgctggttttttgttcaaaaaacgcgcaaaagcaaatgattggagcaagcgatggtttgttctaaatgagaaaagtggaaaggattgtaatcttgaggataatttagacgatgaagatgctccaagaagttcgaaggattccaaaaaggcaaatatggtagataccggaaaagattctagccttatgttcaagattacccacaagattgcatataaaaatgtgttgaaagctcatagcgctgttatactgaaagctgaaagcatgagtgataaaactgaatggatcgccaagattaagggcatcgtcgacccaaaagggctttctgcaaagaaaccaagcgcttcagaaggcggtgccccagtgaggcaaagccatccagatggttccctaattttccacagatattcatgcatactatccttccaggaaccagtactcaagaaacctgtgaaccatgaagaagagcttcgatggatatcccaggaagtccgtgcatatgtggaagcagtcctcaacaatcttgcaggaaatgtccccaagttaagaccacaatctttgtccaggctttcctgtgtagcaggctgtggttctctgccaagtagagaaagccaaagaagatatgctcagccagttatatacttctataagtcaactatagccattgaattcgaagtgttcgaagtatttctcaccaagaaaaccaaagcaacaaactcacggctctctcatgtggttattagcacgcaaagcttagccaaaatcgaagagctaatccaggaggaccacaacgtgaagcggaagcgtgaaaagttccagctgcagtcgtcgcttctttccaaggtcactcggctgctcagcatccatgacagccggtcgggcagtgctggtctgtcgacagattctgctggatcagagagtagcccgaggaacggcggacactctggtgacgactggagatctgcattcggagctggatcggccagttggtctactggagcagccattgccggccgccgcgtaccgagtcgaggtccgccgccgcctccaccaaatgttggctgattgtgagcttttttagcagaacatgtattactcaaaacaaggtgaacgtatataggcttatgaatcgcagatcgtggattaatagaagaggtagattttttttcaactattcacattaattagtcctgtactaggatcgattcagcgtctgtccgatcgaggcattccgccaccggatacttttttttcatcttctcaaatatcaactgttgtctcccgttccgtcgtcataagttcatatactactaatattattttacgcacttctttctattacag

SEQ ID NO: 218759 - DNA, 2358 bp, Zea Mays
ccacaacccaccgccactcgtacttgcctgctcccacgggctagccgatcggtaccatttgaaacccatcgcctcccttggcggcgcgacactcgcggcctcgccgatcagcctgaatccctcgcctcgccacaccgtccgtcgttggtccacaccgccgattatattcgccgggctgtgtcgcgctgaccggtaacggtaacgcctccgcgctccatccgttcccacgcaccacgcgggaccgtaaccgatggaggaactggcggagctcgccgacaccatcctgcagggcaccgcattgctcgcggacgacgacccctccgaagatcgcccgagccgccgcggctcgtccttcctcacggtcgtcgcgatcggcaacgtcggcgcgggaaaatcagcggtgctcaatgggctcatcggccatcccgtgctcgtgagtacagtcctccccctttctttcttttcgcaattgtctgtgttgcctaccggggagaatggcgccacaagagccccaatctgtgtcgagctgcagcgggacgcatcactcagcagcaaggccatcgttctgcagatcgatagcaagtcgcagcaggtttccgcgagttccatcaggcactcgttgcaggacaggttgagtaaggtttccggcaaggggcggccggatgagatcactgtgaaattgtgcactagcacagcccctccattaaaactaattgacataccgggcgttgaccaacggagcacggatgaatcaataagcaactatgctgcacgcaacgatgcaattctactagttatcattccagctcttcaagcgcccgatgtggcatcttctcgagctctaaggattgccagagaattggactcagaaggcccaagaactgcagcggacatccaatgggtagctacaattggccattctgttcctactgcctctgctcagtctgaagcaggttctgaaacaccgccggaagcttattggcaagcagaagttaaaacccttgtatctactcttggtggagctcccgaaagtaagcttgggagagtagctttagttgattcactttctaagcagataaaagcaaggataaaagctaggctgccaaatcttctaaatggtctccaagggaagtctcaagttgtccaagatgaattagcaaagcttggagaacatatggtccaaagttctgatggaaccaaagcaattgctttaggactttgtcgagaatttgaggataagtttctggaaaacattgctgggggtgagggtgccggttggaaagttgttgctagttttgagggaaagtttccaactaggatcaaacaactacctgtggaaaagcattttgatatgaaaaatgtcaaaaaggttgttttggaggctgatggttatcagccatacctgatatcacctgaaaaaggcttaaggttcctcataaaagggcttctcgaattagcaaaagaaccatcgatactccttgtggatgaggttcaccgtgtattgctagacatagtatcatctgcagcaaatgcaactccaggacttggtagataccctgcatttaaacgagaggtaattgcaatagcatctactgctctagatggtttcaagaatgaggcaagaaagatggtcgttgcactagttgacatggagagggcattcgtacctccccaacattttattcgcttagtgcaaagaaggatggaaaggcaacgccaggaggaggagctgaagaaccgctctacaaggaggggccaggatccagaccaaagcagagatacaaccccacaaaaaaattcacatcaaggagagatgaaacaggcatcaaatttacaagttctaggtcctgcaggagaaattattgctggttttttgttcaaaaaacgcgcaaaagcaaatgattggagcaagcgatggtttgttctaaatgagaaaagtggaaagcttggatacacaaagaaacaagaggagagacattttcggggtgtcattaatttggaggattgtaatcttgaggataatttagacgatgaagatgctccaagaagttcgaaggattccaaaaaggcaaatatggtagataccggaaaagattctagccttatgttcaagattacccacaagattgcatataaaaatgtgttgaaagctcatagcgctgttatactgaaagctgaaagcatgagtgataaaactgaatggatcgccaagattaagggcatcgtcgacccaaaagggctttctgcaaagaaaccaagcgcttcagaaggcggtgccccagtgaggcaaagccatccagatggttccctagactttaggaagccttccactaacggcagaaaaaggatgaattctgt

SEQ ID NO: 218760 - DNA, 1771 bp, Zea Mays
cagccgcagagtgcggacaacccacaacccaccgccactcgtacttgcctgctcccacgggctagccgatcggtaccatttgaaacccatcgcctcccttggcggcgcgacactcgcggcctcgccgatcagcctgaatccctcgcctcgccacaccgtccgtcgttggtccacaccgccgattatattcgccgggctgtgtcgcgctgaccggtaacggtaacgcctccgcgctccatccgttcccacgcaccacgcgggaccgtaaccgatggaggaactggcggagctcgccgacaccatcctgcagggcaccgcattgctcgcggacgacgacccctccgaagatcgcccgagccgccgcggctcgtccttcctcacggtcgtcgcgatcggcaacgtcggcgcgggaaaatcagcggtgctcaatgggctcatcggccatcccgtgctccctaccggggagaatggcgccacaagagccccaatctgtgtcgagctgcagcgggacgcatcactcagcagcaaggccatcgttctgcagatcgatagcaagtcgcagcaggtttccgcgagttccatcaggcactcgttgcaggacaggttgagtaaggtttccggcaaggggcggccggatgagatcactgtgaaattgtgcactagcacagcccctccattaaaactaattgacataccgggcgttgaccaacggagcacggatgaatcaataagcaactatgctgcacgcaacgatgcaattctactagttatcattccagctcttcaagcgcccgatgtggcatcttctcgagctctaaggattgccagagaattggactcagaaggtactagaaccattggtgttctaagcaaaatcgatcaagcttctggagaacagaaagccctgggtgctgttcaggccttgcttgtgaaccaaggcccaagaactgcagcggacatccaatgggtagctacaattggccattctgttcctactgcctctgctcagtctgaagcaggttctgaaacaccgccggaagcttattggcaagcagaagttaaaacccttgtatctactcttggtggagctcccgaaagtaagcttgggagagtagctttagttgattcactttctaagcagataaaagcaaggataaaagctaggctgccaaatcttctaaatggtctccaagggaagtctcaagttgtccaagatgaattagcaaagcttggagaacatatggtccaaagttctgatggaaccaaagcaattgctttaggactttgtcgagaatttgaggataagtttctggaaaacattgctgggggtgagggtgccggttggaaagttgttgctagttttgagggaaagtttccaactaggatcaaacaactacctgtggaaaagcattttgatatgaaaaatgtcaaaaaggttgttttggaggctgatggttatcagccatacctgatatcacctgaaaaaggcttaaggttcctcataaaagggcttctcgaattagcaaaagaaccatcgatactccttgtggatgaggttcaccgtgtattgctagacatagtatcatctgcagcaaatgcaactccaggacttggtagataccctgcatttaaacgagaggtaattgcaatagcatctactgctctagatggtttcaagaatgaggcaagaaagatggtcgttgcactagttgacatggagagggcattcgtacctccccaacattttattcgcttagtgcaaagaagttag

SEQ ID NO: 218761 - DNA, 227 bp, Zea Mays
ttggaagcccatcatccgactgatattcgtccaggggaagcctttttccggttggaaacagccctggcctcttccgaccagctacccgcgaccgcaactctagcctctagagctctcccctagcgacgccaatcctagcctcaggagctcttccctgagacccggctccatcgtcttctgtgacatcgtccccttctcctcgataagttctgcgtgtctggtctggc

SEQ ID NO: 218762 - DNA, 296 bp, Zea Mays
tttttccggttggaaacagccctggcctcttccgaccagctacccgcgaccgcaactctagcctctagagctctcccctagcgacgccaatcctagcctcaggagctcttccctgagacccggctccatcgtcttctgtgacatcgtccccttctcctcgataagtcatggcggtgagtagggtggtggcctactagcctatggtgggagtttggtttggggatccgctgacctgcatcactgtctgcttctgagaaaaacacgatgaccttgacgcactggatgttagatgttgt

SEQ ID NO: 218763 - DNA, 1453 bp, Zea Mays
ttgggggttcccgtggttgttcacttaaagatcatatcctctttctaaacatggaccagtaacagagtaacttgtggtggagttgctgagtaggctccgatcaccgtatttattgggcctgattggccattgttcggaaggtgaacactgtctacttgtatatgagttcatggccaatgggggtctccaggagcatctctatccaaacagagacttacctggctgataatgcccaaaagcatgtgtgtgctttaaccgactgatagaagatgagcaatagaaggttatgtacttttattgtgttgatgtgctgctttttgctaatatacgaagtaaataacctttttttaggttcacatgtaaacatgaagttggctgaagtgtcttcctaccacttaacacagcggataacttgggttcatgtggtggaatctcaaaattggactgggacacaagaatgagaattgcacttgaagcagccaaaggtttggaatatcttcatgaacatgttaatccacctgttatacatagagacttcaagagtagcaatattctcctggacaaggacttccatgcaagaatttcagactttggtctagccaaacttggatctgatagagctggtggtcatgtctcaactcgagttttgggcacacaaggctatgttgcaccagagtatgcattggctgggcatttgactaccaaatcagatgtgtacagttatggtgttgtgcttttggaattgcttactggcagagtaccagttgatatgaagaggtctcctggagaaggtgttttagttaactgggcattgcctatgctcactgaccgagataaagttgtgcggatcttggatccagcatcggaaggtcaatattccttgaaagatgctgtccaagtggctgctattgctgccatgtgtgttcaaccagaggctgactataggccattaatggctgatgttgtccaatcgctggttccacttgtcaagaaccgttataatcagaaatcttgcaatcccaatgtgcaaccatcgaagccacttgactaggagaaaagctagtgtttgatctgcagtttgtgctcgtccttctggaacccttctcgagttctcgtctataacgaactactgttgagacagattcacacgcttcctaacaatgatttcgtctgctggtgccctcctgattttgttgttttttgtaggggtgtgttgtgtgcaggtaggttgcaaatttaaaggggatatagttgaacggtcctgagaacttatttgagtctgaaggcaagtttctgtcacctaaaattaggtgcatgttgatggtgggctgttgggattaatggttgtaggggagttcattattcggctggatccaacacatgcctatatcaaccgatgatatggcgtggcattgacgatcggtacggcattaacgtcggtggggatgtcggc

SEQ ID NO: 218764 - DNA, 1306 bp, Zea Mays
gtgaagctctgccgtccacatcagtgattatcgttagtgcaaatgggtcactgtgcgttgggggttcccgtggttgttcacttaaagatcatatcctctttctaaacatggaccagtaacagagtaacttgtggtggagttgctgagtaggctccgatcaccgtatttattgggcctgattggccattgttcggaaggtgaacactgtctacttgtatatgagttcatggccaatgggggtctccaggagcatctctatccaaacagaggttcatgtggtggaatctcaaaattggactgggacacaagaatgagaattgcacttgaagcagccaaaggtttggaatatcttcatgaacatgttaatccacctgttatacatagagacttcaagagtagcaatattctcctggacaaggacttccatgcaagaatttcagactttggtctagccaaacttggatctgatagagctggtggtcatgtctcaactcgagttttgggcacacaaggctatgttgcaccagagtatgcattggctgggcatttgactaccaaatcagatgtgtacagttatggtgttgtgcttttggaattgcttactggcagagtaccagttgatatgaagaggtctcctggagaaggtgttttagttaactgggcattgcctatgctcactgaccgagataaagttgtgcggatcttggatccagcatcggaaggtcaatattccttgaaagatgctgtccaagtggctgctattgctgccatgtgtgttcaaccagaggctgactataggccattaatggctgatgttgtccaatcgctggttccacttgtcaagaaccgttataatcagaaatcttgcaatcccaatgtgcaaccatcgaagccacttgactaggagaaaagctagtgtttgatctgcagtttgtgctcgtccttctggaacccttctcgagttctcgtctataacgaactactgttgagacagattcacacgcttcctaacaatgatttcgtctgctggtgccctcctgattttgttgttttttgtaggggtgtgttgtgtgcaggtaggttgcaaatttaaaggggatatagttgaacggtcctgagaacttatttgagtctgaaggcaagtttctgtcacctaaaattaggtgcatgttgatggtgggctgttgggattaatggttgtaggggagttcattattcggctggatccaacacatgcctatatcaaccgatgatatggcgtggcattgacgatcggtacggcattaacgtcggtggggatgtcggc

SEQ ID NO: 218765 - DNA, 1275 bp, Zea Mays
aaagcctgtctagaaccaaacacccctctccaccgactgcaaataatccgactcccactgctgggtgccctgtcccctacctcgggttccgcgcagaggaaggtggagttgctgagtaggctccgatcaccgtatttattgggcctgattggccattgttcggaaggtgaacactgtctacttgtatatgagttcatggccaatgggggtctccaggagcatctctatccaaacagaggttcatgtggtggaatctcaaaattggactgggacacaagaatgagaattgcacttgaagcagccaaaggtttggaatatcttcatgaacatgttaatccacctgttatacatagagacttcaagagtagcaatattctcctggacaaggacttccatgcaagaatttcagactttggtctagccaaacttggatctgatagagctggtggtcatgtctcaactcgagttttgggcacacaaggctatgttgcaccagagtatgcattggctgggcatttgactaccaaatcagatgtgtacagttatggtgttgtgcttttggaattgcttactggcagagtaccagttgatatgaagaggtctcctggagaaggtgttttagttaactgggcattgcctatgctcactgaccgagataaagttgtgcggatcttggatccagcatcggaaggtcaatattccttgaaagatgctgtccaagtggctgctattgctgccatgtgtgttcaaccagaggctgactataggccattaatggctgatgttgtccaatcgctggttccacttgtcaagaaccgttataatcagaaatcttgcaatcccaatgtgcaaccatcgaagccacttgactaggagaaaagctagtgtttgatctgcagtttgtgctcgtccttctggaacccttctcgagttctcgtctataacgaactactgttgagacagattcacacgcttcctaacaatgatttcgtctgctggtgccctcctgattttgttgttttttgtaggggtgtgttgtgtgcaggtaggttgcaaatttaaaggggatatagttgaacggtcctgagaacttatttgagtctgaaggcaagtttctgtcacctaaaattaggtgcatgttgatggtgggctgttgggattaatggttgtaggggagttcattattcggctggatccaacacatgcctatatcaaccgatgatatggcgtggcattgacgatcggtacggcattaacgtcggtggggatgtcggc

SEQ ID NO: 218766 - DNA, 759 bp, Zea Mays
cctcagtcctcactttcgtccaccgccttctcccgccgccgcggcgttttcccgtctccgtcttcgctcaccgacctctgggccaggagtttgcgctccgattccccgccaatgctcgggccagggcgttctgctaccgccttgctgtttctggcggcgacggcgggagatgtcaagtttgtcatggataggccgcgagctggtcaggctgcggagaggacatgggcacagggcacagggcgggcttgcggcggtacggagagcgcgcgggtgcttaccaccatcatggcgcctgatcaactctctgccatgccacggaatgcttgcatgatcacggatgtgattaccaccattaaactgcggtcctgcctcgatcgatggatgaaatttgcaaggttagcggggagctgagattctactgtatctgcacttttctgcctcattttgtgcatttgcgtgatattggtttccatgtaactcttgacaactgaaaaaaggctgtatgttattaagcctccgcgctgtattgacctgccagctggtcattccagagctacactatgacggaactagagtgattttccttgttgtccatgcacagctagactgtaatgtattgcaacttgtggaaaggtgaacaccaggaaagaactgttctgcaaagagaacatatattgccaagcggttcataagaaaacaggcaatttgggaaccataccttggtatttaagacctcttgacgacttatttttatgtggg

SEQ ID NO: 218767 - DNA, 896 bp, Zea Mays
gtcctcctctggaaaaccacctcttctcctagacttcttccgttgcatcttctcttctgttctccacgacgcagttcggctgccagacaaaaaccctaaacgccgccgccgccgccgctcttcctcgagatgggaggcaagtgcccgcaccgcaaggtaaagaagcgccgcctatcccacaagacggctcgccgcggcaagttcctcctgaaggccgacgatgccgtctatgacgagctcgtcaagctggccgaccagggcaaggacgctgaagccaaggagctccccgtcgatgaggacctcccaggcctgggacagttctactgcctccactgcgatcgctactttgcaagtgaaagcgtgaaggatgatcactaccgctcaaagcgccacaagaaaaggtaatgtctggaccggccccgcacacgcagcttgatgcagaactcgctgcagggatgggaaagcctgacaacggcctgaagctcatgtccatgtgaaggaacctcttgctggtactggtacttgttccgtgcctttgttgctgccgtacaattgaagctgctttgcgcagtaagtaatagcaagagttatagcagacggtttttttttgttgtacgcaagactttcgaagtgggtgtaagttgttttagagtggtggcagagggggggggggggggtgtcaatgcatgtatcatgaaaccatttatcgacccataccagtgatgatgatgatgatgtctcgtatcatttggcctcagactgcgctcgtgtgatgtatcatgtatggtagtaccacaaagacagacggatggacgcgagaggcgtccaggccaggacagcagcgctcgcttgtcagctttccgttctgtgcgaagattttccaagatctgtgtctg

SEQ ID NO: 218768 - DNA, 875 bp, Zea Mays
attggcttggtttctaatgtccactttcccatccctgttttcccctccttcaggacttcttcagtgatcttttggtacatcgctgctgatacaaacagcctacccagactgcttttgtgaagcacattgctttctgagaagccatttgcagtgcaaggatgaaacttggtcagagtgtttaccatatggattggcagtgaaaccaaaaaagaaggcgtgctactgttcttccgtattcatgtcaatgcaacaacagattactgatatagctatgcctggtgagtggagataagtggaggtggcactaccaattccttaatgtaccaggaatgtttggattgttgtattctgacattgtttggttcaacatattcaagttggagtgtcaggtctccaacaattaaacaagatacggaatctgtgtaagcaagagcattcataccttgttagcttccttctctctctctcaagatcgatctagagaccaacaagatcatggacttcttcaagtttgacgtcgataacgtggtcatggtgaccggcgggaggaacaccgggcgtgtaggagtgatcaagaactaggagaagcacaagggcagcttcgaggtcatcgacgtgctgcttggagctttttgcatgctatgtctagttttctcctatttgttgtacaggaaaacatagaatggaattcaaatttggtggtcgcaaaagtgtggagacttgaattcatataaagttaggcttaacattagtgcaaacagttgtattttagtttagatttagagtacacttatgtatgccttgtttgacaatgcttatttatgatatattgaatggtacttatttatattatattaattataatgttgttcaat

SEQ ID NO: 218769 - DNA, 2360 bp, Zea Mays
gctaaataaagcaagtagcagataggggaaagtctgctcgcaagttgcatccgccctgcgccaagaaaagccatcgttcttcccacaaacgcacacatagaagcatcattcccctctcggctagcttcttcctctctctccctcctcctcctcttcctcttcctcctcccttgggaaacctgctgcctttgagctttcttcttcgagagctcccaccagatctcctcctccttaccttctttggcacgttcggcggcgcgcgcggagaaagatagatcccgccatcgtcgtcgtcggtccttgcttccgatcggagggccacaaccacaacctctcgctccatagcgtgcaagcgcgagccagggtcaagaagagagctagctagctataggccggagatcgatggggaggggaaagatcgtgatccgcaggatcgataactccacgagccggcaggtgaccttctccaagcgccggaacgggatcttcaagaaggccaaggagctcgccatcctctgcgatgcggaggtcggcctcgtcatcttctccagcaccggccgcctctacgagtactctagcaccagcatgaaatcagttatagatcggtacggcaaggccaaggaagagcagcaagtcgtcgcaaatcccaactcggagcttaagttttggcaaagggaggcagcaagcttgagacaacaactgcacaacttgcaagaaaattatcggcagttgacgggagatgatctttctgggctgaatgtcaaagaactgcagtccctggagaatcaattggaaacaagcctgcgtggtgtccgcgcaaagaaggaccatctcttgatagatgagattcacgatttgaatcgaaaggcaagtttatttcaccaagaaaatacagacttgtacaataagatcaacctgattcgccaagaaaatgatgagttacataaaaagatatatgagactgaaggaccaagtggagttaatcgggagtcaccgactccattcaactttgcagtagtagaaaccagagatgttcctgtgcaacttgaactcagcacactgccacagcaaaataacattgagccatctactgctcctaagctaggattgcaattaattccatgaagaagagtaaaactgccgtcttatgatgctgaaggaaactatttattgtgaagagatgatactcagagaaagacatatttgtggcagggagatttgagatatgaacttataaatgtaatgcaaataattttcagaccggaatggggtcgtggaattcagaggatgattgctttctagttgcatttgatgtttgatgagacttttctcatgtgaaacgtttattaaaacttcaaaatggtgcagatgttgctactacacttgttaggcttgtataaatatctgaccatgtgtactagcattacgaaaacagaaaagaagacagacagccctgtcgaacatcttgacgtgtttctaaaaggtttgataggggacaatgatgcgatctaggagtacaaacagagtctagtttccactcagttgagttttatattgctctcaagcgttatcaagggtttagtaggatacagatataatatgaagatgcagttagatgtattggtcatttgttgggccatatgggaaagccaaagcacagcctgattcgacaggaaaaataatattatacccatgtaaaatactctcaagcctgtgtttatttgaagtattaggcaggtttatacaaatcagggctaaaggaagctaccgtcgaaagggctgggcgtcattccacaggcagccatcaggatcgtgacattgcaggtgcaggtgcatgagacattgaatctgatcaagtgctaggaagcaagctactgtgttcaggtccagcacggaagtggaatacaaagttctaaccaatgccatcgccaagatcatgtgggtacagaaattgtttactgagttgggcatacaacatccacagatggctcatccagtaagcgataacctgggggctaagtatttgttgtcaaatcctatcttccatgatcagcctaaacatattgagaaagaatttcatttcgttcatgaaagggtggcacaaaagttgttggatatgtcttgattagttcagaggatcagatagaggatgcattcaccaaagagtgtctactcggcagttggaaacttcaggcacaatctcaacttaccggcattgtggagttgctagggttgcgtgtgtgtttgttgtaaactgaaccagcctatacttttgcataaagatgcaaggtctggcagttctagtctagattgagttcgttagagttgtgtacacttcgtggttaagccatagagatgat

SEQ ID NO: 218770 - DNA, 2876 bp, Zea Mays
cgcaggcatgtttgctagtcattagtaataaaacatcaatgcatcttatttacatgttctcaaatcaaaatttacatgttggtgactaggaatccttaacacaccagttagccttttcacagaagttaattaggagatccaacagagaacagtgtgtcttacgaacttgaattctactgctgtatgttatctggaactcatattgcatcacgaaaacaatatgtcagcagatgctttatccagtaaatgttaggaattctttttgccacttcagttgtgtcacatgacactggattgtcagaattctagtgctgttgcagaacatcccatgaactccgaagtaccaggccgcaggccgtatagtttacatgccagaagctgccctcaaatataccagtcgtcttctacaaccttgcaaaaaaaaaaagaacgtagaataaaactgtgtatgccaatccagccggttgattgtgctctaaaatatacgtagcagtgaaattaagttggaacaggtccaagctctactaacatcaaaggttgtcgtagaatagatactgaacactctgaacacgtaacggtagaagaaccagcattgactaattgactaaaaggcactcggcacccttcaaatcataaaatcaggagatcatttacttatactgacatgttcttgtaagaattagcactcgccttgttatgacttcatgaagtctgcttgcaacatcctaacacaacagtacccgctgtaatatcgtaccgtactgcttgtttatccagaaagtaaacgaaggcgcattaaaatagcctccacgttgcaaaattggacatgtcagattgcaatttctagttctagtaataaatattgttccctcttagttttgtactctttccattccaatttataagatgttttggcttttctagacattaatttttgccatgcacttagatatataccatgtctagatgcgtagtaaaatcaatgtatctagaaaacccaaagcacctcataatacctaaaacatcttataatttggtatgaatgaagtacctaagagctgctgtgtgtaattgtgtatcatgctgcaagattccaactaaacgtcatgtcttaccaacatataccagttaaaatctgtgccaatgtgttcattgataacataacctgtttcttcatagttttggcaaagggaggcagcaagcttgagacaacaactgcacaacttgcaagaaaattatcggcagttgacgggagatgatctttctgggctgaatgtcaaagaactgcagtccctggagaatcaattggaaacaagcctgcgtggtgtccgcgcaaagaaggaccatctcttgatagatgagattcacgatttgaatcgaaaggcaagtttatttcaccaagaaaatacagacttgtacaataagatcaacctgattcgccaagaaaatgatgagttacataaaaagatatatgagactgaaggaccaagtggagttaatcgggagtcaccgactccattcaactttgcagtagtagaaaccagagatgttcctgtgcaacttgaactcagcacactgccacagcaaaataacattgagccatctactgctcctaagctaggattgcaattaattccatgaagaagagtaaaactgccgtcttatgatgctgaaggaaactatttattgtgaagagatgatactcagagaaagacatatttgtggcagggagatttgagatatgaacttataaatgtaatgcaaataattttcagaccggaatggggtcgtggaattcagaggatgattgctttctagttgcatttgatgtttgatgagacttttctcatgtgaaacgtttattaaaacttcaaaatggtgcagatgttgctactacacttgttaggcttgtataaatatctgaccatgtgtactagcattacgaaaacagaaaagaagacagacagccctgtcgaacatcttgacgtgtttctaaaaggtttgataggggacaatgatgcgatctaggagtacaaacagagtctagtttccactcagttgagttttatattgctctcaagcgttatcaagggtttagtaggatacagatataatatgaagatgcagttagatgtattggtcatttgttgggccatatgggaaagccaaagcacagcctgattcgacaggaaaaataatattatacccatgtaaaatactctcaagcctgtgtttatttgaagtattaggcaggtttatacaaatcagggctaaaggaagctaccgtcgaaagggctgggcgtcattccacaggcagccatcaggatcgtgacattgcaggtgcaggtgcatgagacattgaatctgatcaagtgctaggaagcaagctactgtgttcaggtccagcacggaagtggaatacaaagttctaaccaatgccatcgccaagatcatgtgggtacagaaattgtttactgagttgggcatacaacatccacagatggctcatccagtaagcgataacctgggggctaagtatttgttgtcaaatcctatcttccatgatcagcctaaacatattgagaaagaatttcatttcgttcatgaaagggtggcacaaaagttgttggatatgtcttgattagttcagaggatcagatagaggatgcattcaccaaagagtgtctactcggcagttggaaacttcaggcacaatctcaacttaccggcattgtggagttgctagggttgcgtgtgtgtttgttgtaaactgaaccagcctatacttttgcataaagatgcaaggtctggcagttctagtctagattgagttcgttagagttgtgtacacttcgtggttaagccatagagatgat

SEQ ID NO: 218771 - DNA, 1277 bp, Zea Mays
cgcctttctagctcctgcagtcctgctgttagtgctgttcccctctctcttccccgtcctgcaggctccaggcgctgctgctctcgtcctccgctagcgagcgaatcgctgacgctggcccgacgccgcggcgggaggtatctcgctttcgatcagtggcggtggcagcgtctggtgggaaccatgagcttcgtgttccgaggaagcagggccgacatcgaggccggtggcttcacagggttcgcccccgagcgccgcaccatgcgaattcatgcagggagcaggccggtgaatagcaattccttggtttttcttctaactgtttttgttttgttcatggtactgaactcacaccagatgtctcccaatcttttgctttggatagtcttgggagccttcctaatggccacgagccttagaatgtatgccacgtgccagcagcttgctcatgctgcagctgccaacagttttcttggccacactgagctgcgtgtgcatgtaccgccgaccattgcccttgctacgagaggccagttacagagccttagacttcaactggctcttcttgaccgtgaatttgatgatttagattatgacactctgagagcactggatgctgacaatagcctgcatgttccttctatgagtgaagaagaaataaattctcttcctgtcttcaaatataaagtccaggcacagcagggaaatgcccctgcccgaaaaagtgatgaggcatcgcagctatcggtttcttcaactggctccggcaatgagaaaaagcaggatggtttaaaagcagatggaactggcaaaactccacaggatgaactaacatgtagtgtttgcttagagcaagtcatggtgggtgatctgttgagaagcctaccatgcttgcatcagtttcacgtaaactgcatcgacccatggctgcgccaacagggtacatgcccaatctgcaagcaccaggtcagtgatgggtggcatgccacaggcaacggtgaagaggatgcttcatacatggtgtaagtagctgcccaggagtaggccataggtaactagtagctgctaacagaatccgtggaacgctgttttggaggtgacggtttggacttgcaatctagggatgtggtctaatccctgtctaccctaacaaaaaaccgagtgtggaatcagctgtccagtgcactgagttcttgtacaactcatgtttatttctctcattctctgtgatgttgatgcataaaaaggttgctgataatcttcttacccgtcctttc

SEQ ID NO: 218772 - DNA, 1434 bp, Zea Mays
ccatgttgtgctggcgccatcaaagtcttctctactgtgaaccggccgagctcaatcactttgcactacccttttatctagtcgctgcagggccagggcagtgaagtctcttctcgttcttgagttctagcgagagtgcatcgtgtgagtgttgtggttcatgttcacgtcggtgtttactctccccggccatcagtgtctcattgggaacgccgcggtgccgccggtgaacgccgctgggaatgatctcgacatggcagaccttgtttggggccggttgcgtgcgtgatctagggttggtctgctctatggagaagttttattcccttatcttttggttagttacttcatgtggaggccttgaagcttagaatgtttatgtatacatcttatggaaaggcttcacccttccaattattgtaataagttatgcactttgggtactatcaggacttgtaataattacaattcttcttatgttgtaaaacttgagatttggaaatgtaaaatatattttgtaaagtcttccgctctatctctgaagtgtgtatgtatcgagtgtgattactgtaatatgcatgaatgtgggagatccttgggataatgagttcaagttgttgaactcgtgatagccttgttaagttacccggtacacatgcacagccatctgaggccgttaatggcaagggttggtgcatgtgtgcctgataacttgggaggactgtcacagcaacgcagcagaagacgcgttgtcgaaactaggatccagtcgagctcaggtcccacccagagttttcgtccaggaagtgccacgcccaagcattctttcagatcaggcggaagagtgcaacgctttgagccagccagagtcagactctaatgactggagagagcctatcatcaagtatataaaaaatgaagaagaaccggatgacaaggccgcagcagagcgtatcgcaagacagtaggcccactacaccctcataggggaggcactatacagaaggggtgcaacaggagtcctcataaaatgcatttcctcgatcactaggagacagctactagatgagattcacgctggacagtgtggaatacacgcaacatctagaactctggttgggaaagtcttcaggtctggtttctactagccgacaacaaagagtgatgcggtcgagttagtccagaaatgtgaagcttgccaattcttgtcaaagcaacaacattttaccagcacagcaactgcagaccatacctgtaacatggtcgtttgcgtgctagggactggacatgattggacccttcaagaaagctcagggaggctatactcacgtgttggtcgccattgataaattcaacaaatggatagaatacaaacccattgcttctctaacttcagccaaggcagtgtaattcataaaagatataatattcagg

SEQ ID NO: 218773 - DNA, 3126 bp, Zea Mays
cgccctcgtctactgcgacaacgtcagcgcggtctacctctccaccaatcccgtgcaacatcagtgcacggagcacgtggacatcgacccgcacttcgtccgcgagcgtgtcgttgctggtgacgttcgggttctcagtatccggaccacgttgcagttcgccgacatcttcaccaaaggggctgccgtcaagtgttttcgctagaggctattataccgtgaaggccgtgtagttagcttcagactttggtacagggagggaacacagctagacagtatatataattttaaggggcttcattgaaaattcaaagaccgtctctgcaaaccaccatgtttgtgccaatgtgttgtcgcaccaactgcctaatgactatagaccattagttgattcaatttgtttagtgacctagatgtgcaagtttggagtgcatgtacccaattgaacctatatgatacgtcacaagtctcatgacccttaatgcaatttacttgcatttacaactttaacacaattggtagcttgttctctagtggcctaaggtaacacatacatgacttagatatgagcatcatattttacaactgcaaagcagcacttgcatgttgcatcacctgaaggttgttgtggttccacaatttcttatgttaaattgtttcaagaccatcctaattttggattaataccattttttacttcattgaagacagactttttttgcaggttatcaccaaacgggacagactgctgactctgaagcttggtgtttctgaacataacttgccaaatcctaataattttggtgagctaactgttcaggctgaagaaagttcaggttcaaaagcaataatggagatgatattccgctgttcggatcttgaaatcaaggatcttctaacaaagagtgatacttttttgctaatatctggaatatcagatagtggaatgcctgttccaatttgcaagacagaagtaagaaagaatgatctcaatcctaggtggaggccagtgagtctgaatctgcaacagattggaagtaaggagaaccctctaattgtagagtgctttaacttcagtagcaatggcaaacatgacctagtcggataccctttgtaattcgacagcaagatagtcaagtcagttgcagaattggaaaatatgtaccataggaagaatggtgaaaatttctttgttcctgccagcaatgcacatgaatgtcacagtaaggaggtgttgaagagccagctatatgtagagaaatatgttgagagtaacagacatactttcctagattatatttctgttgggtgccagttgaattttatggtaggcgtagatttcacagcttcaaatggaaatccacggcttccagattctttgcattatattgacccctcaggtcggccaaatgtatatcagaaggcaatactggaaattggtgatgttctacaatattatgacccaccgaagcgtttccccgcttggggctttggagcaagacctattgacggtcctgtttctcattgttttaatttgaatggcagcacttatcaacctgaggttgacggaatacaaggaattatgtcagcttatatcagcgctcttcgtaatgtatcattagctggtcctaccctctttggtcagttgataagcaccgccatggcgatagctagccaatctcttgctgagaatcaacataaatacttcattttgttaatagtcactgatggcgtggtaactgattttcaagagactattgatgcgatcataaaggcatcagattttcctatatccataattgttgttggagttggaggggctgatttcaaggaaatggagtttctagatccaaacaaaggagagaaactggaaagctcaaccgggagagttgcatcaagggatatgatacagtttgccccgatgaaggatatgcacggcactgggatatccacacttcaatcacttcttgctgaggtaccagggcaattcatgacatacatgaggacaagagaaacccaaacagacagttagtacatgcatgctgccttcaatcagtacaagatgcaccttggaatattctttgttaatatcattttcgtccttcccgttacatagtggtgcaagtttcaagtcatgggtgtgagatagatagtatggacgtgtcaagtgtaggtgagacatcgatctcctggagacgccaacatcaaattggttagctgagcttgtttaaaatcgtcgccgttaaaaaaaaatgctgcttgttaagagaaatgaggacctccaccagcccaccttaattccatggcatctttttttttattattattctgtgtcaagttggattcctaggctgtaccgcccatctttctctacctgtttgtaagatatgactttaggggtttcggcctttattatccctagtaggcccattggaataggaacttttttggcattgcacattagaattttcaagtgttggcatggctgtttagttctatggtggtgactcgtgacctgtataatataatttagacaatggaatatacagcatttgtggtacagccatgtgacaatgtcagattaagatttgaggcatctggttgcaatacgtttatgtatcgttttctcttttaactatgtatagcaccgatggaacctggagtctgaactagaaattggcagtggctgttctcggacagtttccggaagagaaacccctagctactatgcaagacggtaggactacaaaggaacaactagacccccggcccaaattgcatcctggggaatgccgagggcggagggagatcgatcgatgctccggttccacgactatgtgcgtggtccttgtagaaaagaaaagaaaaagtatgcgtaatctgggtgaaagcaccagcagagtagttaatttggttcagacgttcagtggacaatcgaatcgagcaagcagtggaaggaatccatttcgatacgctgtggaggcaaaggcgccactccaacgatcccagcgatatctacgagaggaacttttcagaagatcttacgtggacaaacatgccaataagccaatcaggcttcggttacggtctcactcaggacatttccctgtgtccacccaacatccc

SEQ ID NO: 218774 - DNA, 3123 bp, Zea Mays
gtcgccctcgtctactgcgacaacgtcagcgcggtctacctctccaccaatcccgtgcaacatcagtgcacggagcacgtggacatcgacccgcacttcgtccgcgagcgtgtcgttgctggtgacgttcgggttctcagtatccggaccacgttgcagttcgccgacatcttcaccaaaggggctgccgtcaagtgttttcgctagaggctattataccgtgaaggccgtgtagttagcttcagactttggtacagggagggaacacagctagacagtatatataattttaaggggcttcattgaaaattcaaagaccgtctctgcaaaccaccatgtttgtgccaatgtgttgtcgcaccaactgcctaatgactatagaccattagttgattcaatttgtttagtgacctagatgtgcaagtttggagtgcatgtacccaattgaacctatatgatacgtcacaagtctcatgacccttaatgcaatttacttgcatttacaactttaacacaattggtagcttgttctctagtggcctaaggtaacacatacatgacttagatatgagcatcatattttacaactgcaaagcagcacttgcatgttgcatcacctgaaggttgttgtggttccacaatttcttatgttaaattgtttcaagaccatcctaattttggattaataccattttttacttcattgaagacagactttttttgcaggttatcaccaaacgggacagactgctgactctgaagcttggtgtttctgaacataacttgccaaatcctaataattttggtgagctaactgttcaggctgaagaaagttcaggttcaaaagcaataatggagatgatattccgctgttcggatcttgaaatcaaggatcttctaacaaagagtgatacttttttgctaatatctggaatatcagatagtggaatgcctgttccaatttgcaagacagaagtaagaaagaatgatctcaatcctaggtggaggccagtgagtctgaatctgcaacagattggaagagaaccctctaattgtagagtgctttaacttcagtagcaatggcaaacatgacctagtcggataccctttgtaattcgacagcaagatagtcaagtcagttgcagaattggaaaatatgtaccataggaagaatggtgaaaatttctttgttcctgccagcaatgcacatgaatgtcacagtaaggaggtgttgaagagccagctatatgtagagaaatatgttgagagtaacagacatactttcctagattatatttctgttgggtgccagttgaattttatggtaggcgtagatttcacagcttcaaatggaaatccacggcttccagattctttgcattatattgacccctcaggtcggccaaatgtatatcagaaggcaatactggaaattggtgatgttctacaatattatgacccaccgaagcgtttccccgcttggggctttggagcaagacctattgacggtcctgtttctcattgttttaatttgaatggcagcacttatcaacctgaggttgacggaatacaaggaattatgtcagcttatatcagcgctcttcgtaatgtatcattagctggtcctaccctctttggtcagttgataagcaccgccatggcgatagctagccaatctcttgctgagaatcaacataaatacttcattttgttaatagtcactgatggcgtggtaactgattttcaagagactattgatgcgatcataaaggcatcagattttcctatatccataattgttgttggagttggaggggctgatttcaaggaaatggagtttctagatccaaacaaaggagagaaactggaaagctcaaccgggagagttgcatcaagggatatgatacagtttgccccgatgaaggatatgcacggcactgggatatccacacttcaatcacttcttgctgaggtaccagggcaattcatgacatacatgaggacaagagaaacccaaacagacagttagtacatgcatgctgccttcaatcagtacaagatgcaccttggaatattctttgttaatatcattttcgtccttcccgttacatagtggtgcaagtttcaagtcatgggtgtgagatagatagtatggacgtgtcaagtgtaggtgagacatcgatctcctggagacgccaacatcaaattggttagctgagcttgtttaaaatcgtcgccgttaaaaaaaaatgctgcttgttaagagaaatgaggacctccaccagcccaccttaattccatggcatctttttttttattattattctgtgtcaagttggattcctaggctgtaccgcccatctttctctacctgtttgtaagatatgactttaggggtttcggcctttattatccctagtaggcccattggaataggaacttttttggcattgcacattagaattttcaagtgttggcatggctgtttagttctatggtggtgactcgtgacctgtataatataatttagacaatggaatatacagcatttgtggtacagccatgtgacaatgtcagattaagatttgaggcatctggttgcaatacgtttatgtatcgttttctcttttaactatgtatagcaccgatggaacctggagtctgaactagaaattggcagtggctgttctcggacagtttccggaagagaaacccctagctactatgcaagacggtaggactacaaaggaacaactagacccccggcccaaattgcatcctggggaatgccgagggcggagggagatcgatcgatgctccggttccacgactatgtgcgtggtccttgtagaaaagaaaagaaaaagtatgcgtaatctgggtgaaagcaccagcagagtagttaatttggttcagacgttcagtggacaatcgaatcgagcaagcagtggaaggaatccatttcgatacgctgtggaggcaaaggcgccactccaacgatcccagcgatatctacgagaggaacttttcagaagatcttacgtggacaaacatgccaataagccaatcaggcttcggttacggtctcactcaggacatttccctgtgtccacccaacatccc

SEQ ID NO: 218775 - DNA, 2508 bp, Zea Mays
cttcctgaatgtcgcactgctatcaacagttttcgacatcttgctcctcctcagctccgataccaattgttggaaactgcgccggagagacaaccctgcaggttgccggcgagttcctacctcccaggttatcaccaaacgggacagactgctgactctgaagcttggtgtttctgaacataacttgccaaatcctaataattttggtgagctaactgttcaggctgaagaaagttcaggttcaaaagcaataatggagatgatattccgctgttcggatcttgaaatcaaggatcttctaacaaagagtgatacttttttgctaatatctggaatatcagatagtggaatgcctgttccaatttgcaagacagaagtaagaaagaatgatctcaatcctaggtggaggccagtgagtctgaatctgcaacagattggaagtaaggagaaccctctaattgtagagtgctttaacttcagtagcaatggcaaacatgacctagtcggcaagatagtcaagtcagttgcagaattggaaaatatgtaccataggaagaatggtgaaaatttctttgttcctgccagcaatgcacatgaatgtcacagtaaggaggtgttgaagagccagctatatgtagagaaatatgttgagagtaacagacatactttcctagattatatttctgttgggtgccagttgaattttatggtaggcgtagatttcacagcttcaaatggaaatccacggcttccagattctttgcattatattgacccctcaggtcggccaaatgtatatcagaaggcaatactggaaattggtgatgttctacaatattatgacccaccgaagcgtttccccgcttggggctttggagcaagacctattgacggtcctgtttctcattgttttaatttgaatggcagcacttatcaacctgaggttgacggaatacaaggaattatgtcagcttatatcagcgctcttcgtaatgtatcattagctggtcctaccctctttggtcagttgataagcaccgccatggcgatagctagccaatctcttgctgagaatcaacataaatacttcattttgttaatagtcactgatggcgtggtaactgattttcaagagactattgatgcgatcataaaggcatcagattttcctatatccataattgttgttggagttggaggggctgatttcaaggaaatggagtttctagatccaaacaaaggagagaaactggaaagctcaaccgggagagttgcatcaagggatatgatacagtttgccccgatgaaggatatgcacggcactgggatatccacacttcaatcacttcttgctgaggtaccagggcaattcatgacatacatgaggacaagagaaacccaaacagacagttagtacatgcatgctgccttcaatcagtacaagatgcaccttggaatattctttgttaatatcattttcgtccttcccgttacatagtggtgcaagtttcaagtcatgggtgtgagatagatagtatggacgtgtcaagtgtaggtgagacatcgatctcctggagacgccaacatcaaattggttagctgagcttgtttaaaatcgtcgccgttaaaaaaaaatgctgcttgttaagagaaatgaggacctccaccagcccaccttaattccatggcatctttttttttattattattctgtgtcaagttggattcctaggctgtaccgcccatctttctctacctgtttgtaagatatgactttaggggtttcggcctttattatccctagtaggcccattggaataggaacttttttggcattgcacattagaattttcaagtgttggcatggctgtttagttctatggtggtgactcgtgacctgtataatataatttagacaatggaatatacagcatttgtggtacagccatgtgacaatgtcagattaagatttgaggcatctggttgcaatacgtttatgtatcgttttctcttttaactatgtatagcaccgatggaacctggagtctgaactagaaattggcagtggctgttctcggacagtttccggaagagaaacccctagctactatgcaagacggtaggactacaaaggaacaactagacccccggcccaaattgcatcctggggaatgccgagggcggagggagatcgatcgatgctccggttccacgactatgtgcgtggtccttgtagaaaagaaaagaaaaagtatgcgtaatctgggtgaaagcaccagcagagtagttaatttggttcagacgttcagtggacaatcgaatcgagcaagcagtggaaggaatccatttcgatacgctgtggaggcaaaggcgccactccaacgatcccagcgatatctacgagaggaacttttcagaagatcttacgtggacaaacatgccaataagccaatcaggcttcggttacggtctcactcaggacatttccctgtgtccacccaacatccc

SEQ ID NO: 218776 - DNA, 2562 bp, Zea Mays
ctcacctcacgaattactcgctggaccactgctccatctttggaggtgtcgtcgccgggcttcctgaatgtcgcactgctatcaacagttttcgacatcttgctcctcctcagctccgataccaattgttggaaactgcgccggagagacaaccctgcaggttgccggcgagttcctacctcccaggttatcaccaaacgggacagactgctgactctgaagcttggtgtttctgaacataacttgccaaatcctaataattttggtgagctaactgttcaggctgaagaaagttcaggttcaaaagcaataatggagatgatattccgctgttcggatcttgaaatcaaggatcttctaacaaagagtgatacttttttgctaatatctggaatatcagatagtggaatgcctgttccaatttgcaagacagaagtaagaaagaatgatctcaatcctaggtggaggccagtgagtctgaatctgcaacagattggaagagaaccctctaattgtagagtgctttaacttcagtagcaatggcaaacatgacctagtcggcaagatagtcaagtcagttgcagaattggaaaatatgtaccataggaagaatggtgaaaatttctttgttcctgccagcaatgcacatgaatgtcacagtaaggaggtgttgaagagccagctatatgtagagaaatatgttgagagtaacagacatactttcctagattatatttctgttgggtgccagttgaattttatggtaggcgtagatttcacagcttcaaatggaaatccacggcttccagattctttgcattatattgacccctcaggtcggccaaatgtatatcagaaggcaatactggaaattggtgatgttctacaatattatgacccaccgaagcgtttccccgcttggggctttggagcaagacctattgacggtcctgtttctcattgttttaatttgaatggcagcacttatcaacctgaggttgacggaatacaaggaattatgtcagcttatatcagcgctcttcgtaatgtatcattagctggtcctaccctctttggtcagttgataagcaccgccatggcgatagctagccaatctcttgctgagaatcaacataaatacttcattttgttaatagtcactgatggcgtggtaactgattttcaagagactattgatgcgatcataaaggcatcagattttcctatatccataattgttgttggagttggaggggctgatttcaaggaaatggagtttctagatccaaacaaaggagagaaactggaaagctcaaccgggagagttgcatcaagggatatgatacagtttgccccgatgaaggatatgcacggcactgggatatccacacttcaatcacttcttgctgaggtaccagggcaattcatgacatacatgaggacaagagaaacccaaacagacagttagtacatgcatgctgccttcaatcagtacaagatgcaccttggaatattctttgttaatatcattttcgtccttcccgttacatagtggtgcaagtttcaagtcatgggtgtgagatagatagtatggacgtgtcaagtgtaggtgagacatcgatctcctggagacgccaacatcaaattggttagctgagcttgtttaaaatcgtcgccgttaaaaaaaaatgctgcttgttaagagaaatgaggacctccaccagcccaccttaattccatggcatctttttttttattattattctgtgtcaagttggattcctaggctgtaccgcccatctttctctacctgtttgtaagatatgactttaggggtttcggcctttattatccctagtaggcccattggaataggaacttttttggcattgcacattagaattttcaagtgttggcatggctgtttagttctatggtggtgactcgtgacctgtataatataatttagacaatggaatatacagcatttgtggtacagccatgtgacaatgtcagattaagatttgaggcatctggttgcaatacgtttatgtatcgttttctcttttaactatgtatagcaccgatggaacctggagtctgaactagaaattggcagtggctgttctcggacagtttccggaagagaaacccctagctactatgcaagacggtaggactacaaaggaacaactagacccccggcccaaattgcatcctggggaatgccgagggcggagggagatcgatcgatgctccggttccacgactatgtgcgtggtccttgtagaaaagaaaagaaaaagtatgcgtaatctgggtgaaagcaccagcagagtagttaatttggttcagacgttcagtggacaatcgaatcgagcaagcagtggaaggaatccatttcgatacgctgtggaggcaaaggcgccactccaacgatcccagcgatatctacgagaggaacttttcagaagatcttacgtggacaaacatgccaataagccaatcaggcttcggttacggtctcactcaggacatttccctgtgtccacccaacatccc

SEQ ID NO: 218777 - DNA, 2600 bp, Zea Mays
ccactccctgcactcacctcacgaattactcgctggaccactgctccatctttggaggtgtcgtcgccgggcttcctgaatgtcgcactgctatcaacagttttcgacatcttgctcctcctcagctccgataccaattgttggaaactgcgccggagagacaaccctgcaggttgccggcgagttcctacctcccaggttatcaccaaacgggacagactgctgactctgaagcttggtgtttctgaacataacttgccaaatcctaataattttggtgagctaactgttcaggctgaagaaagttcaggttcaaaagcaataatggagatgatattccgctgttcggatcttgaaatcaaggatcttctaacaaagagtgatacttttttgctaatatctggaatatcagatagtggaatgcctgttccaatttgcaagacagaagtaagaaagaatgatctcaatcctaggtggaggccagtgagtctgaatctgcaacagattggaagtaaggagaaccctctaattgtagagtgctttaacttcagtagcaatggcaaacatgacctagtcggataccctttgtaattcgacagcaagatagtcaagtcagttgcagaattggaaaatatgtaccataggaagaatggtgaaaatttctttgttcctgccagcaatgcacatgaatgtcacagtaaggaggtgttgaagagccagctatatgtagagaaatatgttgagagtaacagacatactttcctagattatatttctgttgggtgccagttgaattttatggtaggcgtagatttcacagcttcaaatggaaatccacggcttccagattctttgcattatattgacccctcaggtcggccaaatgtatatcagaaggcaatactggaaattggtgatgttctacaatattatgacccaccgaagcgtttccccgcttggggctttggagcaagacctattgacggtcctgtttctcattgttttaatttgaatggcagcacttatcaacctgaggttgacggaatacaaggaattatgtcagcttatatcagcgctcttcgtaatgtatcattagctggtcctaccctctttggtcagttgataagcaccgccatggcgatagctagccaatctcttgctgagaatcaacataaatacttcattttgttaatagtcactgatggcgtggtaactgattttcaagagactattgatgcgatcataaaggcatcagattttcctatatccataattgttgttggagttggaggggctgatttcaaggaaatggagtttctagatccaaacaaaggagagaaactggaaagctcaaccgggagagttgcatcaagggatatgatacagtttgccccgatgaaggatatgcacggcactgggatatccacacttcaatcacttcttgctgaggtaccagggcaattcatgacatacatgaggacaagagaaacccaaacagacagttagtacatgcatgctgccttcaatcagtacaagatgcaccttggaatattctttgttaatatcattttcgtccttcccgttacatagtggtgcaagtttcaagtcatgggtgtgagatagatagtatggacgtgtcaagtgtaggtgagacatcgatctcctggagacgccaacatcaaattggttagctgagcttgtttaaaatcgtcgccgttaaaaaaaaatgctgcttgttaagagaaatgaggacctccaccagcccaccttaattccatggcatctttttttttattattattctgtgtcaagttggattcctaggctgtaccgcccatctttctctacctgtttgtaagatatgactttaggggtttcggcctttattatccctagtaggcccattggaataggaacttttttggcattgcacattagaattttcaagtgttggcatggctgtttagttctatggtggtgactcgtgacctgtataatataatttagacaatggaatatacagcatttgtggtacagccatgtgacaatgtcagattaagatttgaggcatctggttgcaatacgtttatgtatcgttttctcttttaactatgtatagcaccgatggaacctggagtctgaactagaaattggcagtggctgttctcggacagtttccggaagagaaacccctagctactatgcaagacggtaggactacaaaggaacaactagacccccggcccaaattgcatcctggggaatgccgagggcggagggagatcgatcgatgctccggttccacgactatgtgcgtggtccttgtagaaaagaaaagaaaaagtatgcgtaatctgggtgaaagcaccagcagagtagttaatttggttcagacgttcagtggacaatcgaatcgagcaagcagtggaaggaatccatttcgatacgctgtggaggcaaaggcgccactccaacgatcccagcgatatctacgagaggaacttttcagaagatcttacgtggacaaacatgccaataagccaatcaggcttcggttacggtctcactcaggacatttccctgtgtccacccaacatccc

SEQ ID NO: 218778 - DNA, 559 bp, Zea Mays
gtttttcagtgtggacgcctctctggccggtggcataatcgacaagggtggggtcaacactaagcagagttacaggcgtcaagctatccatccgcgaccacgagtctaaccctaaccaaaagaacatcgagctggaaggcaattttgaccagatcaagcaagccagcgacttggtgcgtgatctcatcgcaaccatcagcgcaagcatgccagcaaaaaatccatcttctgctatggcgccagcaggaggaggccgaggcagtggtccggggggcacgagcagcaactacaagaagaagctgtgcgagaacttcttgaagctatgcgagaacttccaacatgactatgtatgagatattgtctcttattatgactggatgagatgtgtcttatggctatagatgagacttttgtggtgtaattgatgagactatggatttaaatattgttatgtgattgcgtgtgagatgttttatgtgaaaatatgttgtgctatagttgttgatatatttgttatgttgtggaatgtggtgtaaaataaaaataaaagcatttgtaa

SEQ ID NO: 218779 - DNA, 528 bp, Zea Mays
ggcacacgatcggcacgtgcacaacgtccgtcagatcaaaactcaacgcatctgattaaccctttcgagaaataggggaaccagagcaaagaagggaccgccgaccgccggatacctgacgctggcgggcggcggcggcggcggcggcgaagacgtccgttgcggctgcgacgaatccaagtaaccggggcccttgccgaactggcaggcgagataggtcccccgattcaagcggagatggttcactgatttcccttccccgccgccaattcgatcgggctcgcggctcgccgtctctgctctccccaaccggcaccaagccagccaatggcgctcgaggaggcacagcggccactgtccgccggcgtggcctggcgcctaaccggaagctggctaggctccgaactggttcgaggcttcaagccgatccgcatctatccagtgtccttctagaaatacatcacaacaacatacgccactcgaggctaaacacaccattatttgctaatggctctcggggtggttggg

SEQ ID NO: 218780 - DNA, 2089 bp, Zea Mays
cattgacctagtacacgtacacgcagatccatcgctcctactccccttccctatcgtatcgcgtcgtcctcgtcgccgccctacgccccaactaccttggtggctagggttcccaaccaacgcgcctccatcctgcacctacctagatcacctcctccacttgaagcattcgtgccggcgtgtggaaggacgccacgaaggcgactcgggggatagcggcctatgcggctcggtacagtcttcccatccccaacaaccagcttagaggttcggttcgagcagagatcgccgaagcgaagacctagagtcgaagcggcccaaatcgccgcttggcagattcatcttggtggaggatggactcaggattcgtcagggccagaggaggatgccagcaccagatccagcaagacctaactcagaggaagcagcgatcaagcgtagccgtcagatagacaatgacaaggacgagtccatgtcttcgcctactcccccgctggacgtaggtgctggcgcgctgtgggtggaggtgctacaggagtgcctgaggtccgctgtcgacctgagcttcgcccaggtcgtcgctaccactgataatcggcctccagcccactgctttagctttagtctttacttttggcgatgagttgacgactaggcaactgccaccgcccaaggtcaggtgctcgagtatccgttgaccccttcgctagtccattccccgttgacagcaagcattagtttaatctgattatgtggacgtcgttgtagttcaataattccaataaggatctcaagacctacagttagggaatgctatttgacaatgtaagtaacaattggttattttagttgtaggtgtccatcctgcgacctctggtttggtctgggatggagcacccatatgtatttgatagattcaactatggtgtgtgatttaaattgggtctttgagttgttttaataacaacctaaaatctttcagtttgtgaactgtaataaaatgtaacctgggcctgatgccatgtctctgtttgtctacatagtgtatggcgatgatgacaaagccaagacttgtttcttgacatttgcagtagccacccaagagctttctccctgctaggtttgagagctagtcctactaattccttcatgggatgtctgagccatacatatttctgtttttttagatttcaattgcaagtaatgttcaaatcagagcttgtttctctatattcgcagttgctgctgttgctattgttgtgtatcctgcaactagcagccctcaatctttatcacaggatatattcatcgtagtaatccagcaacactatttttatatagcaacttgtttgtctcttgccaaagaaagttattagtcaaagggagggtttactatgtgttgataatgggcatttggctgtgcgtcactattttcatatagttatctttgtagccaaagttttagacctactacatgtaccttttttgttgttcctacacttgaaagattaaatgtatgtttggttcgtgtctaactatgccacaatttgcttaaatgcctgtaatttttatttcctaaatatgtcttttcatgctaatttgaatacgctattacgcccaattactagatcacgcgtatgctccgctttgtaaacacgtagaccaccaatcctacattgttcttgttcttccttttgtgcttttacgatgatttgaattggtccttttcagaacaatgcacccccagtacctagtccactcttgagcagtatacgacagatacgtccagtacccccagtatggacctcggtggttttctccacattaggaaagctggaagagccttttgaactcagtttttttgctaacagtggtgttatggtgaaacagagttttgtgtgtatgtaccaacaactaaaatgtaaacacgacattatcatagttgagtacaggaataattaccttagatcacttcttgttgtatcttacaccaatttacgaaatttcttgatgcgttttatgacaacctcgtgcgctgagagatacattcggtctatattcgttattatgaaaaagatggacgatttac

SEQ ID NO: 218781 - DNA, 1114 bp, Zea Mays
cattgacctagtacacgtacacgcagatccatcgctcctactccccttccctatcgtatcgcgtcgtcctcgtcgccgccctacgccccaactaccttggtggctagggttcccaaccaacgcgcctccatcctgcacctacctagatcacctcctccacttgaagcattcgtgccggcgtgtggaaggacgccacgaaggcgactcgggggatagcggcctatgcggctcggtacagtcttcccatccccaacaaccagcttagaggttcggttcgagcagagatcgccgaagcgaagacctagagtcgaagcggcccaaatcgccgcttggcagattcatcttggtggaggatggactcaggattcgtcagggccagaggaggatgccagcaccagatccagcaagacctaactcagaggaagcagcgatcaagcgtagccgtcagatagacaatgacaaggacgagtccatgtcttcgcctactcccccgctggacgtaggtgctggcgcgctgtgggtggaggtgctacaggagtgcctgaggtccgctgtcgacctgagcttcgcccaggtcgtcgctaccactgataatcggcctccagcccactgctttagctttagtctttacttttggcgatgagttgacgactaggcaactgccaccgcccaaggtcaggtgctcgagtatccgttgaccccttcgctagtccattccccgttgacagcaagcattagaacaatgcacccccagtacctagtccactcttgagcagtatacgacagatacgtccagtacccccattcatgttacgtttgcaggtatggacctcggtggttttctccacattaggaaagctggaagagccttttgaactcagtttttttgctaacagtggtgttatggtgaaacagagttttgtgtgtatgtaccaacaactaaaatgtaaacacgacattatcatagttgagtacaggaataattaccttagatcacttcttgttgtatcttacaccaatttacgaaatttcttgatgcgttttatgacaacctcgtgcgctgagagatacattcggtctatattcgttattatgaaaaagatggacgatttac

SEQ ID NO: 218782 - DNA, 881 bp, Zea Mays
aggtgtttcaactgtttttcaacctcccatagggccgccctctactgtcgttgtccacgttgtttctgctgtctgggtcatcgcgtggggagcgaccgcaaggggtccatgacttgcgatgaaggggagaacaacggtggcgtccatataaaagtggaggagaacacacggcgtagcgcacgagagacagggaggtgagcgccccggaaagctgagcgcgtgcacaggagccggagtggggtgaggaacagggagaagcttgccgagctagaatagcgagggcagtgcaggtccaacacgagagcatgtgcgagatgacgacagcacaggaaggccgcacgggggggggggatcagcaccgagggtggaggtcgcatgccgggaggggccaggcaggccgcgccgtgcagatgtggcggcagaggtctggtgggccgtgccgcgcgggcaacggcggtggtccacacgtggaagcctgtgttttctcccgacaattctggttccagcttcttcagaaggtcggtctccagaagctgtgccacgaacctggaattgcttcctttggtgattggtggtggcatgctagtgaggcagtatctaggctctcaaggcatggtctgaattctatgattattttgggagcttggtccctctggaaacatcacaatagatgttatgcaaccgaaacatacaaattggcagatttgaacgcggaggctcaagaatctggagatgatgaagatgataatgtgtgggaagagggttaatgctgaaaagataactggcgacccctgctccctctcgaattttgaactgtctgcaggctgccatcgaaacctcgcatcgttgtcagattgcttccttttgtcatgagaccgtct

SEQ ID NO: 218783 - DNA, 1173 bp, Zea Mays
ctagaagtcctacgcacgctgagagcccgagccattactattactttactatatatgaaagaaggttcaaaacgaacacaatcacggtgtccacgtcgcccaaaataacactacgcgtctgatttgcatccaacggatgagcgcgtccaacaacaccgcccgcagcctcgttttatgtttctggaatcactcgctccactctctctctcttgttctctacgcctctcgattcttctcgccgacgccttctctctcagtgactcttttcaccttcgcgctacagttcttcctcctcgctctcacagcctcttcatcgcgatgattttctttggcctgcgaagcaccgctcccacgcattcctcctagaagcatcgcgagagtgcgagacacaaatctttcaaaagaaaaaaaaacgttgttgtcgctggagtttacgagttctgttttcgtcgcctggatgaggtgaggcgacgctgcgatggagatgaggtcgcgttgaggaggtgaggcgacggagacaaagtgaaaacacaaaaagagttgaagaacaactttaggaccatgtgacgctttgaagaataactaatttatataaaaaggcaagtcttatggcgttcaagtggcaatggatttattgatgggactatccttttaacctgcaaatggttggaatgactagagcaggagatattgttgttggagaattgggcttctttgctataggcctcaagtattcacatttcgaacaaaatcattacgcctgcaggcagatatgcatacggatggggacatactgctgaaatcagagttgatcgatccatcctcaaggagcctgcaccagacctttagttttggacaggaaagaaaaccctaatgagggtgtcctgctgaagcaagtgcctactaccatgatgcattgtcttcagttggattcatacctgtagagtgtcaagtttgtacgctgcttcacaagtccctgttgtatccaaacttgactaggacaacttgatcttagtctgctcaaaagagaagttgcaagaacaacttgatgtgcttgatcgccaatgtgatatgcgttcacaagtgcaccgtggttctgcccgtcctccccctcgtgcaatcccaggaatcatcgccactctcattaatgagccttacaatagcctcatataa

SEQ ID NO: 218784 - DNA, 621 bp, Zea Mays
catttagaagatagcctgccttatgtctgtagtgcgactgccatatttacctccgtaattttagctgagattgttgtgagttctcttcttcctcacaccaacgcagaccagtttctgccaacagcagcggcaccttcttcctcacgccaacgccggccagtttccggcaacagcagcggcacctcaggtttgagggctccatggccatgggaagggatcctcgctgctgccatgggagaagagaagagagggatggctccacagcagcgcaccaaggagagcccgagcagaggagagatggcgtgggggaagagaagggagagggcaggggctgccatttatagggccaagctttggacatgtcagactgcaccaacaggtggcaggtgctgcagtgacgaccttggacgacgtgtttcggcatttttcgcttggaatcggatcttggttgctgcacaaaatatcttccttgatctatactctacaattattgtaaaggacttagagagttatagatccacaaaaattggtttgtcactgggttagaaaacagtggaaacttgtgaaaacggaatgtcaaagcatgtcaaacggaatcggatgaatgcgatcttttaatat

SEQ ID NO: 218785 - DNA, 398 bp, Zea Mays
gctggaagccatggaggacaggctcgtcccgaacgccgtgccccgcgaggtgttctctttcagttagtactctcgtccagagaagttggccatggcggacaggctagtccagagaagtcgcacggcgcacggcgtaccaagaaatctgacgataaggtggctgagatactgaataagtctcagacggtagccaccagcaggcatcaagatccctggtgcagactgatttcacaatattcatggaaaacgatgtgcccacaaaagaagcaagaggaacaaatcaaaggatccatttctccaaccaaggtttgtttactagcgccattagtaggtttgttcagtttggcgtacacaaaaccggctttgccaattcatggagacatgttcattgtattatt

SEQ ID NO: 218786 - DNA, 1247 bp, Zea Mays
tccttgactttgccaagtgaccacgtggactggcggagggaaccgagcgagtggcccagacgtcgcgactcgcgaggccgaggcgcggcggcagcgacgactccaacaaccacgcgcggaggctgcagtgctccagccaagtgttacaagtacgtgttgctttatgggtgatagagatagcaagaggtgcagaaagaggtgtagtggaaatgaaagctacagttataaagaaaaaacaaaacaagctagacaacttgaggtatctcattcattttggaggcaaatttaatttgtagtttgatcctgctggaggacattcactttgtattagtctgccagtgcacttacattaggcaacatttgaatttggaaggaacctcatcccttgtggaaatggaaagagctatttgccttttttgactgaaataccactacttgcctacttggctctacattctttcgccctgacagaaacagaacacgcccacgtactgcactgcactgcacattttcgttccagggtttcgcgctcggtatcttagctggagcaggcgtgatcaaatcccaccatttctggcgggacgtggagcacatccaggaggccatccagaacgtgctggtgatcctcgagatggtcgtgtttttcgtcgtcccctctacgggcttgttcggttctaccccaatccatatggattgagggggtttcaatccctgcggcgctgacagggccaaattcgagaagaagaacgaatgaaccaggtttccggaaggaattggggggggggggggggggggggaaccccgtgctgcttctctctgctctctggtctgccggccggaaatggagcaccagtattttcctcacggatggacatacacaggtcccttagcaagggactggtcgtcttgtacgtacgctattctcagctggggactggccgaggccgactgcgggatccttttgcgaataaatctacagtcctgttctacagtggccgcactggactgattgattccgatgaggttgcctgcaactaccactaccactgctaggggatgatcttgcaatctgcaactaccgctcgttgtttattggcggtatagtgtatagctacgtggttttgaggtctctgaggctgatttccagagttcatcacaagtggcaggagtacatgactgatgggagtttttctacttgctgtgtgcctgtacgatgagaaatcgtggtatgggttcatgggcagcct

SEQ ID NO: 218787 - DNA, 1899 bp, Zea Mays
gccagatcgtcactgcaaatctgcaattagtccttgactttgccaagtgaccacgtggactggcggagggaaccgagcgagtggcccagacgtcgcgactcgcgaggccgaggcgcggcggcagcgacgactccaacaaccacgcgcggaggctgcagtgctccagccaagtgatagggtcgtgacaggcagccccgcaacgtcttggagcacaagacattgaagcttctaaagtattggacctggcaatttgttattgtcaggacagtatgttccattctgattattgcacttcaggttcttgggctgtaccccagctaggtgagctggacgtttagtattatactgaacttctcagtctacatggccttatatgccttggttcttttctaccacttgtttgctaaagagttggcacctcacaagcctcttgcaaagtttttgtgcatcaaagggatcgtattcttctgtttctggcaggtatatcatctaaagtgtttctgaaagctttatataaagtttgcacgggtgattgtcttgattgcttatagacaactctctggatggattaatgtgtacttattagatagtatctgcttgccatgacttaagatgaagcttcatttctctttaatattttgatttagttagattttatgtatgagtatgactgtatgaccacctcatgttcacttccgtgccataatttctgttttataaaccccacttacagttttacttgatgtaatcacatcatatgtaaatttgagataataatttctttataaaacagtgttacaagtacgtgttgctttatgggtgatagagatagcaagaggtgcagaaagaggtgtagtggaaatgaaagctacagttataaagaaaaaacaaaacaagctagacaacttgaggtatctcattcattttggaggcaaatttaatttgtagtttgatcctgctggaggacattcactttgtattagtctgccagtgcacttacattaggcaacatttgaatttggaaggaacctcatcccttgtggaaatggaaagagctatttgccttttttgactgaaataccactacttgcctacttggctctacattctttcgccctgacagaaacagaacacgcccacgtactgcactgcactgcacattttcgttccagggtttcgcgctcggtatcttagctggagcaggcgtgatcaaatcccaccatttctggcgggacgtggagcacatccaggaggccatccagaacgtgctggtgatcctcgagatggtcgtgtttttcgtcgtcccctctacgggcttgttcggttctaccccaatccatatggattgagggggtttcaatccctgcggcgctgacagggccaaattcgagaagaagaacgaatgaaccaggtttccggaaggaattggggggggggggggggggggggaaccccgtgctgcttctctctgctctctggtctgccggccggaaatggagcaccagtattttcctcacggatggacatacacaggtcccttagcaagggactggtcgtcttgtacgtacgctattctcagctggggactggccgaggccgactgcgggatccttttgcgaataaatctacagtcctgttctacagtggccgcactggactgattgattccgatgaggttgcctgcaactaccactaccactgctaggggatgatcttgcaatctgcaactaccgctcgttgtttattggcggtatagtgtatagctacgtggttttgaggtctctgaggctgatttccagagttcatcacaagtggcaggagtacatgactgatgggagtttttctacttgctgtgtgcctgtacgatgagaaatcgtggtatgggttcatgggcagcct

SEQ ID NO: 218788 - DNA, 989 bp, Zea Mays
cgtggatcggtggatgctaccagaaaccagatggcagtatggcacgcctcagacgtcagacagttaatctgagggttcacctccacctgcagccagatcgtcactgcaaatctgcaattagtccttgactttgccaagtgaccacgtggactggcggagggaaccgagcgagtggcccagacgtcgcgactcgcgaggccgaggcgcggcggcagcgacgactccaacaaccacgcgcggaggctgcagtgctccagccaagggtttcgcgctcggtatcttagctggagcaggcgtgatcaaatcccaccatttctggcgggacgtggagcacatccaggaggccatccagaacgtgctggtgatcctcgagatggtcgtgtttttcgtcgtcccctctacgggcttgttcggttctaccccaatccatatggattgagggggtttcaatccctgcggcgctgacagggccaaattcgagaagaagaacgaatgaaccaggtttccggaaggaattggggggggggggggggggggggaaccccgtgctgcttctctctgctctctggtctgccggccggaaatggagcaccagtattttcctcacggatggacatacacaggtcccttagcaagggactggtcgtcttgtacgtacgctattctcagctggggactggccgaggccgactgcgggatccttttgcgaataaatctacagtcctgttctacagtggccgcactggactgattgattccgatgaggttgcctgcaactaccactaccactgctaggggatgatcttgcaatctgcaactaccgctcgttgtttattggcggtatagtgtatagctacgtggttttgaggtctctgaggctgatttccagagttcatcacaagtggcaggagtacatgactgatgggagtttttctacttgctgtgtgcctgtacgatgagaaatcgtggtatgggttcatgggcagcct

SEQ ID NO: 218789 - DNA, 2914 bp, Zea Mays
tccttgactttgccaagtgaccacgtggactggcggagggaaccgagcgagtggcccagacgtcgcgactcgcgaggccgaggcgcggcggcagcgacgactccaacaaccacgcgcggaggctgcagtgctccagccaaggtgagagctctcccgcttacctcaggcggtggacgccgggtttcccatgtacatgtggcctttctggtctggatgccatgctcctgctcgccctgaggtttctcgccggggtattgatccaaagcgggtgcgactgcgaccctagtcggcagccgccgtgctctcgcgacttgcggtcacgagattcggttcatagggcggcttgttgattgacgtagaggcacatgactggaaccgtgagctttgagttgtcaagtagtaacaacctaccttttgccatcggcttctggtttgctttactttgcagagttaatgcatttgacaaaacagttccaggaatcgctgtggcaacacgactgaatgcaatagcatgctaagacccctatttatgtttatgtgttgtctgatgtaggattgcagctaggattcgtgtatcatgtagccctggttcccaatccttgcttgattttgaaaatattatgtgaatttctacttgtaacatctctttctacttgttgagaagtccaaggttaaattctgatgcgctttttactagaaaagaaacgaaaacttaggtctgcaaatttgttaaattatttcatatgtgtctagtgctcaggccactgtgtcggcgcagaaatcctgcttgcttgattatcttcccatcgagcagtggctgtatgtcctacttactcgagtggctttggataattaattttgccaatttgctgcacaaattataggtgttcaaaagtcaaaacacagtctgttttgtttttatattcttgtacatgtacaggggtgaagtgtcccattccatataccctgagacgaagctgaggtgtgggtcagttaagagtggaatactcttagttgaatgactttggtgtcctgtcttgcacatatgtgaaaggctatgctgatattgtgatatgcggttcacaaaaagctatttagaaaatgtcctagctgagagtcctttcattctctgatgaatgagatccttgctctaaacagtagtttttaacttatagcaccctgcacataattggcaagttccttatttttcaaccaatgaaacagtgtgccttaattggctccattttagttaagtgtggattatgccaagtcattagttggtgatcaatagagacatggtgccatttgctctcttgaaaaaaaactgaatttcagttactgtaactgaacatgtaccctaataaaggagcataagatagtttccttcatcaagcctcctacagaagtattcaactgtttaggaaatagtcttcttaccacactctagttaagtaaataaactaggaggctagaaaaaactattttcaggattcagatttatatttaattacttgaaatgtatatagcacatatcatatggcactgcttttattcacagtcatgcccactgcacagtggttctttcccacagttgcttctttctcttgccaccctaatactctaccatcaatttgtccttgctccctcttgccttgcagtagcttttggtgtgctgaatccaacaccagctcctcctccctttgttatgtatcctgagatctccatggagggaacgcaagctcaggacacagttattacagtcacacaatatactgtacctattctatagtgaagctctgaatttcatttctttttaaatatttatacttcggctgtttgtattattgtagctaccatgaaaacagttgcttaatgcatctctagatcatttctattagttcaaaaatcaattatacaggcttttggttctgtggttggtcttcattagaaaaatctagttacagaagaatggtcactggattaatctaaattttgaacccaaaacctggctctaactaaataaaaatcgtgcttgcaaaacatttgattgacaacctgttcagtggagtgcagttaagctgagctcaaggtcacatatgtatgccctcttaaaagtgcacttctgacatttgtgagaaaaaaagaaatagatacaaaaatctgtagattttttttggcaatatgtgctacactgcttgttccaaaaaagacaaataacttgtttcatatttgtgggggcaaatcaaattatttctcctgtctttcgtgtaactcgcgtatggtctagtttttccacaaaaattatctgtgttgacatacttgttcatggtctacatgtgtttatttgttttttagaaattttggaagttcacaaagtgcatgtttcaaatatttgtgccgcattgtgttgtattaatgtcctcgactcctctgttaataagggttatgtttgacttgtcattagcataaatgtatccttcgataaaaaaacctaatctatagttttcaggcaccatgttactcatgtctccattcccggggatggatctaagtaaaatggatcccgcgactctgaccctccttggggcagctggttgtgtaatgctgactatgcatttcactgtgcaactggtgtcacaacatctcttctattggaaaaacccctaggagcagaaagctagacttattattgtgctaatggctccactatatgctatctcttcctttgtgggtcttcttgatatccagggtagcaagacattttttacattcttggatgctgttaaggaatgctatgaagcactggtgggtcaaccatatgattataagcctaaatgaatcttgctgtttcactaacacttcaatttccttacaattacgaaggtgattgctaagtttatggcattgatgtaca

SEQ ID NO: 218790 - DNA, 1849 bp, Zea Mays
atccgaagtcgcctcctcgtccttccttcgctagatgttctccttcgccggcggtcttgttgctagaggcgcccccgacctgtgcatccgtttcaacgccaactcctccaccagctaactcattcggagtaggtttagaaattgattgggattcaattcagctagaccctagatgggaggaggaagactacaagaagttgttaacgtggaagtggtgtatgatacactgggcctgacaaatgaggtgatgggtggaaccaattgtgatggttggcaaaacgattatggtgatgcaggggcagctatagaatgcaaggacattgacgatgacattgtaatgtttgatatgaaaaatccagttatgaggcttggtaacatatatatatagtagcatgaaggagtttaggctcgcaatgatccaatatgcaattaacaaggaatttgagctaggcattgaagctactagtactcgaaggtatagaggttattgtaaaggggatgattgtccatggagtattcatgccagaaaagaagtagaagaatcgcctatcatcattgttactgccatgacagatatccacacttgtacatctagtggtaggtgaaggacaaagacacctactagtggttgggttgctgcccaagcaatacctctcttgaagaagaaacctggcatgggagccaaggagttgcaaaatgcactacatgacacttataatgttcagattgcatatctaactctttggagagggagagagaaggctttgtatgagttgtttggtagttaggaggatagtttccaactttgttctcttggaaggaagctgtgttggagaaaagtttaagaaagcttacgagggaagaatagagcaactaggagataagtctttttggccaaaagtggagatggcaaatgaggtgggggcaccactgggtaggagaggtgtgggcagacaaaggaaaaatagaatcaaaggttgcctagaaggcggtaggggcaagaaagcatgtgcaaacgaaactgtaaagcaatggaaggtaattcggggacaataaggatgtctttggtttgaagtcaaagtaggatgaggcgggggcgacaccgtcccctcaattttttgggatcacgccgtcaccaaaaaattactccggtatttatttcaccccacgtgattctcatccaaacactatagaaactgtagccatccccttccatccctccttatacatccaaccaaacacaccctaaatgtttatattgtggggagctaggccacaagaagaacagccctaaatgtcctttaaatggcacgaagaagaggcgtgtgttttatgtgttgatctttgttcctgtttcctgttctgttttttttttcaaaaacttacagctggtgtgtattcttataggccaaggaagcagcgacataactctactcaaaaatggttttatgtgttgatctttgttcctgtttcctgttctgtttttttcaaaaacttacagctggtctgtattcttataggccaaggaagcagcgacattactcaaaaatggtttcctcgcgacgacagatttacacaagaacctagaacaccgcatttcgacaaagttatacaagaccctggtacaccacatgaacagccatcgtcttcgcagccacttccaaggtggaagtctcaatgccctgggaaaagaagaagagagccacgagaaaggaaggggcaaaactggaagtctcaatgtcgctccctggttaacgcccagcgttctcagttccaaatgtgaaagaacatcagctttcaaccattgatagtcatggatctcctcctcttggtggtggtaaggaatttc

SEQ ID NO: 218791 - DNA, 1961 bp, Zea Mays
atccgaagtcgcctcctcgtccttccttcgctagatgttctccttcgccggcggtcttgttgctagaggcgcccccgacctgtgcatccgtttcaacgccaactcctccaccagtcagttcaatttctacagcctatggtcatgctaactcattcggagtaggtttagaaattgattgggattcaattcagctagaccctagatgggaggaggaagactacaagaagttgttaacgtggaagtggtgtatgatacactgggcctgacaaatgaggtgatgggtggaaccaattgtgatggttggcaaaacgattatggtgatgcaggggcagctatagaatgcaaggacattgacgatgacattgtaatgtttgatatgaaaaatccagttatgaggcttggtaacatatatatatagtagcatgaaggagtttaggctcgcaatgatccaatatgcaattaacaaggaatttgagctaggcattgaagctactagtactcgaaggtatagaggttattgtaaaggggatgattgtccatggagtattcatgccagaaaagaagtagaagaatcgcctatcatcattgttactgccatgacagatatccacacttgtacatctagtggtaggtgaaggacaaagacacctactagtggttgggttgctgcccaagcaatacctctcttgaagaagaaacctggcatgggagccaaggagttgcaaaatgcactacatgacacttataatgttcagattgcatatctaactctttggagagggagagagaaggctttgtatgagttgtttggtagttaggaggatagtttccaactttgttctcttggaaggaagctgtgttggagaaaagtttaagaaagcttacgagggaagaatagagcaactaggagataagtctttttggccaaaagtggagatggcaaatgaggtgggggcaccactgggtaggagaggtgtgggcagacaaaggaaaaatagaatcaaaggttgcctagaaggcggtaggggcaagaaagcatgtgcaaacgaaactgtaaagcaatggaaggccaaggaagcagcgacattactcaaaaatggtttcctcgcgacgacagatttacacaagaacctagaacaccgcatttcgacaaagttatacaagaccctggtacaccacatgaacagccatcgtcttcgcagccacttccaagggtattgataaaaaaaatcactccaagaaagaggaagtcggttccactaagcatggacgagatgtagtatctgttagttgtatcatccatgtgttgtcagcatgtgactgcagacatgtgccatgtatcagacttattgtatcagactacgttcagcctactttggaagtctcaatgccctgggaaaagaagaagagagccacgagaaaggaaggggcaaaactggaagtctcaatgtcgctccctggttaacgcccagcgttctcagttccaaatgtgaaagaacatcagctttcaaccattgatagtcatggatctcctcctcttggtggtggtactatcacaggcagcaaattgggtagataatggtatggtgaagaggataagggatgtttcgttctccaggagagtatctccatagttggaaagccacattatatatgatgcacgtgggtttgggatccacttgtggaattttgttttatcatactttcctgtgggttttggaatccactatgatactagcaacaggctagacacatgaatctagagaatgtttcccacagttcgtattgtgcctaggggaaaactataaatggaaaaggtgcaaaacagaaatttgaaccataagactaatttatataagcctagtagtaaaagactccaattctattatagtagcatcatcttggaaacaaactatgattcttgatctatacctataggatcgtatgacgctagaatagac

SEQ ID NO: 218792 - DNA, 1912 bp, Zea Mays
atccgaagtcgcctcctcgtccttccttcgctagatgttctccttcgccggcggtcttgttgctagaggcgcccccgacctgtgcatccgtttcaacgccaactcctccaccagtcagttcaatttctacagcctatggtcatgctaactcattcggagtaggtttagaaattgattgggattcaattcagctagaccctagatgggaggaggaagactacaagaagttgttaacgtggaagtggtgtatgatacactgggcctgacaaatgaggtgatgggtggaaccaattgtgatggttggcaaaacgattatggtgatgcaggggcagctatagaatgcaaggacattgacgatgacattgtaatgtttgatatgaaaaatccagttatgaggcttggtaacatatatatatagtagcatgaaggagtttaggctcgcaatgatccaatatgcaattaacaaggaatttgagctaggcattgaagctactagtactcgaaggtatagaggttattgtaaaggggatgattgtccatggagtattcatgccagaaaagaagtagaagaatcgcctatcatcattgttactgccatgacagatatccacacttgtacatctagtggtaggtgaaggacaaagacacctactagtggttgggttgctgcccaagcaatacctctcttgaagaagaaacctggcatgggagccaaggagttgcaaaatgcactacatgacacttataatgttcagattgcatatctaactctttggagagggagagagaaggctttgtatgagttgtttggtagttaggaggatagtttccaactttgttctcttggaaggaagctgtgttggagaaaagtttaagaaagcttacgagggaagaatagagcaactaggagataagtctttttggccaaaagtggagatggcaaatgaggtgggggcaccactgggtaggagaggtgtgggcagacaaaggaaaaatagaatcaaaggttgcctagaaggcggtaggggcaagaaagcatgtgcaaacgaaactgtaaagcaatggaaggccaaggaagcagcgacataactctactcaaaaatggttttatgtgttgatctttgttcctgtttcctgttctgtttttttcaaaaacttacagctggtctgtattcttataggccaaggaagcagcgacattactcaaaaatggtttcctcgcgacgacagatttacacaagaacctagaacaccgcatttcgacaaagttatacaagaccctggtacaccacatgaacagccatcgtcttcgcagccacttccaaggtggaagtctcaatgccctgggaaaagaagaagagagccacgagaaaggaaggggcaaaactggaagtctcaatgtcgctccctggttaacgcccagcgttctcagttccaaatgtgaaagaacatcagctttcaaccattgatagtcatggatctcctcctcttggtggtggtactatcacaggcagcaaattgggtagataatggtatggtgaagaggataagggatgtttcgttctccaggagagtatctccatagttggaaagccacattatatatgatgcacgtgggtttgggatccacttgtggaattttgttttatcatactttcctgtgggttttggaatccactatgatactagcaacaggctagacacatgaatctagagaatgtttcccacagttcgtattgtgcctaggggaaaactataaatggaaaaggtgcaaaacagaaatttgaaccataagactaatttatataagcctagtagtaaaagactccaattctattatagtagcatcatcttggaaacaaactatgattcttgatctatacctataggatcgtatgacgctagaatagac

SEQ ID NO: 218793 - DNA, 2179 bp, Zea Mays
atccgaagtcgcctcctcgtccttccttcgctagatgttctccttcgccggcggtcttgttgctagaggcgcccccgacctgtgcatccgtttcaacgccaactcctccaccagtcagttcaatttctacagcctatggtcatgctaactcattcggagtaggtttagaaattgattgggattcaattcagctagaccctagatgggaggaggaagactacaagaagttgttaacgtggaagtggtgtatgatacactgggcctgacaaatgaggtgatgggtggaaccaattgtgatggttggcaaaacgattatggtgatgcaggggcagctatagaatgcaaggacattgacgatgacattgtaatgtttgatatgaaaaatccagttatgaggcttggtaacatatatatatagtagcatgaaggagtttaggctcgcaatgatccaatatgcaattaacaaggaatttgagctaggcattgaagctactagtactcgaaggtatagaggttattgtaaaggggatgattgtccatggagtattcatgccagaaaagaagtagaagaatcgcctatcatcattgttactgccatgacagatatccacacttgtacatctagtggtaggtgaaggacaaagacacctactagtggttgggttgctgcccaagcaatacctctcttgaagaagaaacctggcatgggagccaaggagttgcaaaatgcactacatgacacttataatgttcagattgcatatctaactctttggagagggagagagaaggctttgtatgagttgtttggtagttaggaggatagtttccaactttgttctcttggaaggaagctgtgttggagaaaagtttaagaaagcttacgagggaagaatagagcaactaggagataagtctttttggccaaaagtggagatggcaaatgaggtgggggcaccactgggtaggagaggtgtgggcagacaaaggaaaaatagaatcaaaggttgcctagaaggcggtaggggcaagaaagcatgtgcaaacgaaactgtaaagcaatggaaggtaattcggggacaataaggatgtctttggtttgaagtcaaagtaggatgaggcgggggcgacaccgtcccctcaattttttgggatcacgccgtcaccaaaaaattactccggccaaggaagcagcgacattactcaaaaatggtttcctcgcgacgacagatttacacaagaacctagaacaccgcatttcgacaaagttatacaagaccctggtacaccacatgaacagccatcgtcttcgcagccacttccaagggtattgataaaaaaaatcactccaagaaagaggaagtcggttccactaagcatggacgagatgtagtatctgttagttgtatcatccatgtgttgtcagcatgtgactgcagacatgtgccatgtatcagacttattgtatcagactacgttcagcctacttgttagtagctgagttattgtgtttcctactacgttcagactacatctatcagacttattacatctcgttcagacttatgtgtttcctgtttgtgccatgtatcagtggaagtctcaatgccctgggaaaagaagaagagagccacgagaaaggaaggggcaaaactggaagtctcaatgtcgctccctggttaacgcccagcgttctcagttccaaatgtgaaagaacatcagctttcaaccattgatagtcatggatctcctcctcttggtggtggtactatcacaggcagcaaattgggtagataatggtatggtgaagaggataagggatgtttcgttctccaggagagtatctccatagttggaaagccacattatatatgatgcacgtgggtttgggatccacttgtggaattttgttttatcatactttcctgtgggttttggaatccactatgatactagcaacaggctagacacatgaatctagagaatgtttcccacagttcgtattgtgcctaggggaaaactataaatggaaaaggtgcaaaacagaaatttgaaccataagactaatttatataagcctagtagtaaaagactccaattctattatagtagcatcatcttggaaacaaactatgattcttgatctatacctataggatcgtatgacgctagaatagac

SEQ ID NO: 218794 - DNA, 1799 bp, Zea Mays
atccgaagtcgcctcctcgtccttccttcgctagatgttctccttcgccggcggtcttgttgctagaggcgcccccgacctgtgcatccgtttcaacgccaactcctccaccagtcagttcaatttctacagcctatggtcatgctaactcattcggagtaggtttagaaattgattgggattcaattcagctagaccctagatgggaggaggaagactacaagaagttgttaacgtggaagtggtgtatgatacactgggcctgacaaatgaggtgatgggtggaaccaattgtgatggttggcaaaacgattatggtgatgcaggggcagctatagaatgcaaggacattgacgatgacattgtaatgtttgatatgaaaaatccagttatgaggcttggtaacatatatatatagtagcatgaaggagtttaggctcgcaatgatccaatatgcaattaacaaggaatttgagctaggcattgaagctactagtactcgaaggtatagaggttattgtaaaggggatgattgtccatggagtattcatgccagaaaagaagtagaagaatcgcctatcatcattgttactgccatgacagatatccacacttgtacatctagtggtaggtgaaggacaaagacacctactagtggttgggttgctgcccaagcaatacctctcttgaagaagaaacctggcatgggagccaaggagttgcaaaatgcactacatgacacttataatgttcagattgcatatctaactctttggagagggagagagaaggctttgtatgagttgtttggtagttaggaggatagtttccaactttgttctcttggaaggaagctgtgttggagaaaagtttaagaaagcttacgagggaagaatagagcaactaggagataagtctttttggccaaaagtggagatggcaaatgaggtgggggcaccactgggtaggagaggtgtgggcagacaaaggaaaaatagaatcaaaggttgcctagaaggcggtaggggcaagaaagcatgtgcaaacgaaactgtaaagcaatggaaggccaaggaagcagcgacattactcaaaaatggtttcctcgcgacgacagatttacacaagaacctagaacaccgcatttcgacaaagttatacaagaccctggtacaccacatgaacagccatcgtcttcgcagccacttccaaggtggaagtctcaatgccctgggaaaagaagaagagagccacgagaaaggaaggggcaaaactggaagtctcaatgtcgctccctggttaacgcccagcgttctcagttccaaatgtgaaagaacatcagctttcaaccattgatagtcatggatctcctcctcttggtggtggtactatcacaggcagcaaattgggtagataatggtatggtgaagaggataagggatgtttcgttctccaggagagtatctccatagttggaaagccacattatatatgatgcacgtgggtttgggatccacttgtggaattttgttttatcatactttcctgtgggttttggaatccactatgatactagcaacaggctagacacatgaatctagagaatgtttcccacagttcgtattgtgcctaggggaaaactataaatggaaaaggtgcaaaacagaaatttgaaccataagactaatttatataagcctagtagtaaaagactccaattctattatagtagcatcatcttggaaacaaactatgattcttgatctatacctataggatcgtatgacgctagaatagac

SEQ ID NO: 218795 - DNA, 3334 bp, Zea Mays
cctcgaagctcctcgtctgatcgtctcgcccggcgcccgccaccaccgccagtccaccagagcagagcggagcggcagcaccccagccggcgccgtctgaccgacccccgctccacccattccaacactgcccacatccttccccgtgtccgaccgtcggctttctcctccccctcccagccgccccagtctttgcccgtggccaagcgtcgacttcctcttcctttcgtcctccagttcgattctagtgaatctgctgttgcttctccgtcgcgcgagactaagacactggagttgaaatccgaggcacgtgggaagcctctctctcaatttttttggggattcaaaagagttcccgatgcccggagctaaggtggcccaagctcctggcggccaggccaggtgttcgacgaaactcccctgagagggatctgtcatgttcttggccaaacgaccgccttggtcgtctcagattagcaggttctgcatccttcccttccacgctgttccctggatcgttttgtggacaaggcgggtgcgatacagtggcggcagcggcgataatgccactccagtggcctctgggcggctgtccaagctgttttggccggctcggatgcacgtggctgacgttattgggcgagttctggaacgggggcagtcgttggattcggtggagctggagctggagaggctccatgtcgacctggacccctttgttgtcaaccgggtgctccggagcatctcggactcggagatggcagtgcggttctactggtgggcagagtccaggcctgggtttgatcacacccagttcgcgatagcgtatgttgtcagcctgctctttgtagacagcaactttttcctgctgtcggagttcctcgagagagtgaggagtcagggggttgcattgcatcgctctctctatcggatcctcttgtcgggctatgtaagggcaggcaagttcgattctgtcatccatacatttgatgagatggttacatctggatgccgtgagtttggtgtggactacaacaggttcattggtgttctagttaagaattgctgctttgatttggtcgagaagtattatagtgtggcacttgataaaggtttttgcttgacttcattcacttattcgaggtggatatctgcactgtgccaatcagaaaggattgagctcgtagagagactccttgccgatatggataagtttggctgttttccagatatttgggcatgtaacatatatgtggactgtttgtgtaaacataacaggttgcatgatgccttgaagacgcttgagaatatgtggatcagaggaaccaatccagatgttgtcacttacacaacagttgttggatgtttatgtgataacaagcagtttgcagaagcggtcgagctttgggaagaaatggtgaggaggggcctcaaacctgatatcgttgcctgtggcgtattgatatttgggctgtgcaagagtgacaaggttgatgaggcttttgagctggcattgaggatgctgagtcttaatttagaactcaatgtctgtatttacaatgccctgataagtggcttcttgagatccggaagcattaataaagcattcaaaatcatatccgtcatgcggacaaatggttgtgagccagacgttgtcacatataatatccgtttgaaccattactgcaacacaggtatgataaaggaagctgaaaagttgatcgaggagatggaaatgagtgggattgtaaatcctgatcggtacagctataatcaaatgttaaagggattgtgcaaagctcatcaattggacagggcatttggttttgtttcagatcatatggaggttggtgggttctgtgatattgtatcttgtaacatactgattgatgcattctgtaaggcaaagaaagtaagttctgctttgaagctgttcaaagaaatgggttataagggaatacaagcagatgctgtgacatatggaactctaattaatggtctttacggtgtaggatactactacctagctgaggaaatttttgagcagatgctgaaagctcgggttgttccaaatgttaatctgtacaatattatgctccataacctgtgcaaagctggtcagtttgaacaggctcagaaaattttcttgcagatgattcagaaggaagtgtcgccagatattattacttttaacacgctcatatattggcttggtaaatgctcaagggcaattgaagctattgatctgttcagggatatgacagctagagggatagaacctgatagcttgacatttaggtatctgatcagtggcctcctagaggaggggaaagctacacaggcttatgaggtatgggaatatatgttggagaatggcataattctcgacagagatgtttctgacaggctgataagtatgtttaaatcaaacaacaagtaacaactgactgggtttcttgagagtttcagcctctaggacattttaatcatgtcactagaactcaaaggtccgagcttgtttagttgcttctaagctcatcgctgtgccggtgccgcggaacacatctttgctgattaactcgatttgatggatgcattataactggaccagacccaaaagcagacacaccagagaaacagtggacaaggtacttctgttttgaccttctgctgtatcatgctagcttttggggcagtttggtatagctcccagagcaggttccaggctgaatccaagagaagctccgccgaatagttttttaccgagaagtgattctttgctgatttcatgaagcgattctctaaaatgaactagggtgccgggagctgaataaaggtacgcatccaagattcttggttgacaaatttgatgttgctaagaaagcatgtctcaattttctcgataagtttaaggcgtcagtcgttactggtgaacaactcttaggacaaagttgtataaaggattggctgatcagatgatggatattgttgtgaatgcaaagcaccaatgcgttgtggggtcctatggcgcagtagcaatgggaagagaggcaggagaaggccaaatttgatatggggagaggtagtaaaaggagacttgaaacttgaaaggatggaatatattcaaatatttagccttaaataggactataggagtgcatacaccataggaaacagttatacatgtgcctgaatcttgacttgtgatttatgttgggtttcaactctaacctacctgaactttcttgtgactaaaagacactgttgttgatggtggtggataatgcacatgtgccatttatggtgaaaataaataaaaaaagtttatgtatca

SEQ ID NO: 218796 - DNA, 3405 bp, Zea Mays
cctcgaagctcctcgtctgatcgtctcgcccggcgcccgccaccaccgccagtccaccagagcagagcggagcggcagcaccccagccggcgccgtctgaccgacccccgctccacccattccaacactgcccacatccttccccgtgtccgaccgtcggctttctcctccccctcccagccgccccagtctttgcccgtggccaagcgtcgacttcctcttcctttcgtcctccagttcgattctagtgaatctgctgttgcttctccgtcgcgcgagactaagacactggagttgaaatccgaggcacgtgggaagcctctctctcaatttttttggggattcaaaagagttcccgatgcccggagctaaggtggcccaagctcctggcggccaggccaggtgttcgacgaaactcccctgagagggatctgtcatgttcttggccaaacgaccgccttggtcgtctcagattagcaggttctgcatccttcccttccacgctgttccctggatcgttttgtggacaaggcgggtgcgatacagtggcggcagcggcgataatgccactccagtggcctctgggcggctgtccaagctgttttggccggctcggatgcacgtggctgacgttattgggcgagttctggaacgggggcagtcgttggattcggtggagctggagctggagaggctccatgtcgacctggacccctttgttgtcaaccgggtgctccggagcatctcggactcggagatggcagtgcggttctactggtgggcagagtccaggcctgggtttgatcacacccagttcgcgatagcgtatgttgtcagcctgctctttgtagacagcaactttttcctgctgtcggagttcctcgagagagtgaggagtcagggggttgcattgcatcgctctctctatcggatcctcttgtcgggctatgtaagggcaggcaagttcgattctgtcatccatacatttgatgagatggttacatctggatgccgtgagtttggtgtggactacaacaggttcattggtgttctagttaagaattgctgctttgatttggtcgagaagtattatagtgtggcacttgataaaggtttttgcttgacttcattcacttattcgaggtggatatctgcactgtgccaatcagaaaggattgagctcgtagagagactccttgccgatatggataagtttggctgttttccagatatttgggcatgtaacatatatgtggactgtttgtgtaaacataacaggttgcatgatgccttgaagacgcttgagaatatgtggatcagaggaaccaatccagatgttgtcacttacacaacagttgttggatgtttatgtgataacaagcagtttgcagaagcggtcgagctttgggaagaaatggtgaggaggggcctcaaacctgatatcgttgcctgtggcgtattgatatttgggctgtgcaagagtgacaaggttgatgaggcttttgagctggcattgaggatgctgagtcttaatttagaactcaatgtctgtatttacaatgccctgataagtggcttcttgagatccggaagcattaataaagcattcaaaatcatatccgtcatgcggacaaatggttgtgagccagacgttgtcacatataatatccgtttgaaccattactgcaacacaggtatgataaaggaagctgaaaagttgatcgaggagatggaaatgagtgggattgtaaatcctgatcggtacagctataatcaaatgttaaagggattgtgcaaagctcatcaattggacagggcatttggttttgtttcagatcatatggaggttggtgggttctgtgatattgtatcttgtaacatactgattgatgcattctgtaaggcaaagaaagtaagttctgctttgaagctgttcaaagaaatgggttataagggaatacaagcagatgctgtgacatatggaactctaattaatggtctttacggtgtaggatactactacctagctgaggaaatttttgagcagatgctgaaagctcgggttgttccaaatgttaatctgtacaatattatgctccataacctgtgcaaagctggtcagtttgaacaggctcagaaaattttcttgcagatgattcagaaggaagtgtcgccagatattattacttttaacacgctcatatattggcttggtaaatgctcaagggcaattgaagctattgatctgttcagggatatgacagctagagggatagaacctgatagcttgacatttaggtatctgatcagtggcctcctagaggaggggaaagctacacaggcttatgaggtatgggaatatatgttggagaatggcataattctcgacagagatgtttctgacaggctgataagtatgtttaaatcaaacaacaagtaacaactgactgggtttcttgagagtttcagcctctaggacattttaatcatgtcactagaactcaaaggtccgagcttgtttagttgcttctaagctcatcgctgtgccggtgccgcggaacacatctttgctgattaactcgatttgatggatgcattataactggaccagacccaaaagcagacacaccagagaaacagtggacaaggtacttctgttttgaccttctgctgtatcatgctagcttttggggcagtttggtatagctcccagagcaggttccaggctgaatccaagagaagctccgccgaatagttttttaccgagaagtgattctttgctgatttcatgaagcgattctctaaaatgaactagggtgccgggagctgaataaaggtacgcatccaagattcttggttgacaaatttgatgttgctaagaaagcatgtctcaattttctcgataagtttaaggcgtcagtcgttactggtgaacaactcttaggacaaagttgtataaaggattggctgatcagatgatggatattgttgtgaatgcagcttataggttctgtgcatctgcaattcagatgactcagttgatctttttatgtccaacggagacctccagaagcaccaatgcgttgtggggtcctatggcgcagtagcaatgggaagagaggcaggagaaggccaaatttgatatggggagaggtagtaaaaggagacttgaaacttgaaaggatggaatatattcaaatatttagccttaaataggactataggagtgcatacaccataggaaacagttatacatgtgcctgaatcttgacttgtgatttatgttgggtttcaactctaacctacctgaactttcttgtgactaaaagacactgttgttgatggtggtggataatgcacatgtgccatttatggtgaaaataaataaaaaaagtttatgtatca

SEQ ID NO: 218797 - DNA, 2000 bp, Zea Mays
ccccaccactgtgcgtctgtgcctagggttcgtacggggacgacaggacagcggcctccgccgtccctccgccgccgtaggtgccctgttcgtgccgcacgggcgctgccaaagcgccctccatatctggcatgcctctgagccgccgcagccgcgtcaccagagggttcgcagacaaggtccaggtggtgtattagacatgtctttcaggaagcgccaaccttccagtaacggagcttccattaatttagctcccctgggttttccaagtcaggaacttgagaaggttaatcctgtaaattcagtgatgtcaaccgattttgaatccatggatggtgttgatattgatatgagggaagtttactttctcattatgcattttttatctcatggtccattcaaacggacctttggagaattgtgcaatgaactcctagaacatcaactgctacctagaagataccatgcttggtattcacgtggtggtttccatagtggcgaagaaaatgatgatggcatatcactccctttggattatgtaaagctagctgagaggtacccccacattggtaaagaccacttggtgaagctattaaagcaactgatggctagttcttatcacccacacaacttgattggaagagtttctccaaatgctgctgatgtcccaacacttcttggctccaactccttttcacttcttccatctgacaggcaagataagggaactcccaggctgccaagttatcttcgttggcctcacattcagactgatcaagttcatggtctaagtttgagagagataggtggtttcactaagcattgtcgagctccctctgtacgtgcatcttgctatgccatcgcgaagccatccacccttgttgaaaagatgcaaatcataaagagattgagggggcatcaaaatgctgtgtattgtgctacctttgatcgcacagggcgttatgttattactggttctgatgaccgccttgttaaaatatgggcgatggaaacagcgttctgcctggctagctgccggggccatgaaggtgatattaccgatcttgcagtgagttccaataattctgtggtagcatcttcatctaatgatttcattattagagtgtggcgtatgcctgatggaatgccagtctcagtgctcaaggggcatacaggggcagttactgctattgcatttagtccaaggccaggtgctgctttccagctgttgtcgtcatcagatgatgggacatgcaggatttgggatgccagatactctcaacaacctccaagactgtatacaccaaagcccccagatgttgcccctggtaagagtggtgatgcatcttccagcgccgctcaagttcagccaacaaatcaccagatcttatgttgtgcatttaatgctaatggaaccgtgtttgtcactggcagctcggacacttatgcaagggtctggaatgcttgcaagagttcttctgatgaacatgagcaaccgattcatgagatggatctattatgtgggcatgaaaatgatgtaaactatgtgcagtttagtggatgtgcagttgcatcaagatctttttcatctgattccagtcatacctctaaggaagaaaatagcctgaagttaagaaattcttggttcacgcataatattgttacctgctcccgtgatggcagtgcaattatatgggttccacgatctcggaggtcacatggaaagattggacgttggacgcgtgcttaccatcttaaagttcccccacctccaatggctcctcaaccacctcgaggtggtcctcgtcaaagataccagccaactcctcgtggtgtcaatatgatagtttggagtctggacaaccgctttgtgcttgctgctatcatggattgcagaatttgcgtatggaatgcttctgatgggagcttggtgcattcactgattggccataaggaatcagagaactgcgtatccttataacaattagggaatggaaaca

SEQ ID NO: 218798 - DNA, 209 bp, Zea Mays
atgggttatctccttatacagttactgttacaagttcttctccatccagatcagtattgggaggctgcacttgatgtgactatattttgcaagaaatcctttcttgtcattgctcaagtgcattttgagaaggataaggctttggctcgtagattccagccagtattggtgaatgagcctagccagctggcagtagagctcggatggaa

SEQ ID NO: 218799 - DNA, 927 bp, Zea Mays
aggaaaaaatcaccttagaaggaaacacatcccctcgccgctatccacgcctcgcagcaatccagcacgcaggaatcccattgccgacgacgcgcaggaccactcattgcccaatcgttcttctcatgcaccgcggatgccccacccatatcctgctcgccccaaacgcaatccacgtctcgccgccatggaaggaatcgcaacccaatcccctcatcgtcatccagcgcacaggaccaccatcggcctgcatcccatcgcaagtgcaggaccaccccgccatctcattcttcccattctacgcgccaaccccgcctggatcttccgatgctcgagtacttcccattctacgcaccagccccgcccagatcttgggatgctcaagtatgagatggaagacacctctctgagcgctcaaatctgaacaccacacctctctgaaacacaaacagacttggtttataaaatagagaactactcatgtgactgttcatctgacaatttcagtatgaagcaaagctcttgcctggcttgatctatcgaatgaagcagccaaaaatcgtgctactgatttttgtttcaggcaagattgttctgacaagagctaaggtgagagatgagacattgcttttgaaattatctatccagttctcgtaaagtcataaaagtccggcaatgctaagtacatggtaattgctaatggacaagaataattagggtatgttgttcaagtatgtgcccagttgttgttgttgtcccccttttatcgttttgttttctgatttcgacgataccattacctgggacgctcacgagacttatataatatactatccttctatggaatcaatgtgttgattaatattcgctacatatttatcattgtttattttttatcaatgacaaagcacatgttcaatcttatat

SEQ ID NO: 218800 - DNA, 1025 bp, Zea Mays
cttctctgtttcctccatcttttggcccatctgcaccctctcggtcgccgcgcgctccgccatcgaagcagccaactccgaccgaaccatcaactgttgttgggcgcgttccacttccttgagccgagcgcaaaccgcctccagagtctccatcatccgcccccaactctcctgcgttcctcgatcgtgatccgccatggcgttcaggatgaagcgggtctggacggatggctttgcagcgggcgccgtgatgaagcagtccgaacgccgggaagacgactccgccctgcgctcaccggaagccgcgcttgccgttgaagaccccaccgccgaggaccttgaatccgataccactgtcacaacccagggacggtggaacgcaagccaccgtcgtgagctgttgccaggcggaagaacaacttccagatgcgtttcaacagggaaaccgtgaaggactttggctctgcgtttggtgtgccacataaccacacgggcgcaagggaaggaagcttgagaaggcaagggggaggaggaaaacctctgcttccacctcggaagagaagcaacgaaacaacgaagagatgaaagagaatagcatcaaagaggggtgactgggctgtggcaccgaggtaacacggctcggcgtcatagatcttggcgttgaggtgcgtccttcgctggcaacaacagactgacgtggcgtcgacgtggccgagctcaagtcatgattcatggcactgaggtccagtcaaaatcggcacctgggcatgcatgttacgacgttacgtatgtagcgagcatgcatttggacttttggagcctcgtcgttttcgtactctagccatgcacctactaatgttgtctttgttgcttcaaccccaaccggtatggatgatggatcgcttcctcagctccctctttttttttcctttttttacagcagctagctagcaaggccctttttgaagcaccatgatcattcagccggggacgccgcagatgctcacttgtaacctacacatggc

SEQ ID NO: 218801 - DNA, 840 bp, Zea Mays
tatcatatcagtttttttttttgctgatgtgataatttaatacattcttcaagcattgtttactgtactctttctttctttctttcttttgtttcactgctatgtgataatagaatggcagatgatggataatcttatcctacacactgaatctaatgtgttgaccaatactccgcttattgtctgatgccatcaattaacaagatctctgttcattgcttcttgggcatttgaaggaactttgtggactaaaagggagcaaattgaggactttggctctgcgtttggtgtgccacataaccacacgggcgcaagggaaggaagcttgagaaggcaagggggaggaggaaaacctctgcttccacctcggaagagaagcaacgaaacaacgaagagatgaaagagaatagcatcaaagaggggtgactgggctgtggcaccgaggtaacacggctcggcgtcatagatcttggcgttgaggtgcgtccttcgctggcaacaacagactgacgtggcgtcgacgtggccgagctcaagtcatgattcatggcactgaggtccagtcaaaatcggcacctgggcatgcatgttacgacgttacgtatgtagcgagcatgcatttggacttttggagcctcgtcgttttcgtactctagccatgcacctactaatgttgtctttgttgcttcaaccccaaccggtatggatgatggatcgcttcctcagctccctctttttttttcctttttttacagcagctagctagcaaggccctttttgaagcaccatgatcattcagccggggacgccgcagatgctcacttgtaacctacacatggc

SEQ ID NO: 218802 - DNA, 4016 bp, Zea Mays
cccgttcctgctcccttgaatcgcgcagctcgcctcagcccagcccaccgtcctcaagctctctacactacaccctcctctctctcttcacctcaccccaactctctctttacctcctgctcgcttccattctttccttgcagttgcagcgctctttccgtcacacttcactgccatcttttgctccatcgatccatcccactgctgatcaaaggaggcctggactcggacttcgctcaagcctcacggtgatgccgcctttccgtccgcttgatcttttctagctgcctgcctacgcctacgcctacccgcaatggccgggggcttcgagtggagcagctctgcaagcacaaccagaggagtcgagctccagcagcttgttccttcctaacagtccattgtcgctctcaagaaaggcgcacatctcctgaaatgtgggaagagagggaagcccaaattctgcactgtcaggctgtcttatgatgagagagcactaatatggtactccaaagagaggggaaaacgtttgagcttgaattcagtgtccagtgtagttctcggacagaagactacaaaacttttgcgtctacattggccagaaaaggaatctcactccttgtcaattatatacaagaacggtgaatcctcacttgacttggtctgcaaagatagggatcaagctgaatgctggtacttaggccttacagccgtaatatcagcaccatgcacccctttacttctgattgattcaacaaacagccgtcggataaacagctgcacgaatagccctcctagctatattcagcaaaggagtaggctttttgctgtgcatgatggaagaaatttcccaaaggtaaattcgctatatggcagtcctaggttgatacagaacaagtatctgcgtaacaatttggattgctccgaaccattcttttctccaagacagagagcatggtcagaactagatttctacttggaaaagattagtcccgaattggtagatcgagtaaaaaataatttgagagacataaaatctgcagaaataattaacgaccaaagaattatgcaaatacctaagctcaaacaatctgagggatccaatgcagcagcagattctctgaaggacatttttgtctggggtgatgctctgggtcgtatgtcagatcatggacatgtatcagcaagcaatatatcacttccaaggttattgaaatcgtcagagattcttgatgtgcagagcattgcctgtggagagaaacacgcagcaatagttactaagcagggtcaggtattctcttggggtgaggaaaatggagggagactgggacacaagacaagtgacagtgtctctgaccctaaaatcatcgactcactttcctccacgcctgtgaagactattgcatttggggcaaagttcacctgtgcagtttcagtttcaggagaactttatgagtggggtgaagggattgacagcctagggttcgggaccaatcagtgtcaaagaagcccatggttcccgcataaattgatcagaacttcagatggcatatctgtggcgaagattgcatgtggtcagtggcacacagctatagtatcctccacaggtaagctgttcacatatggacatggagcatttggtgttcttggacatggtgacacacgtagttttgttcagccgaaagaagtggagtccttgagagggttaagagtcaagtccgtcgcatgtggaccatggcacaccgctgctattgtggaaacatcaggaacactcaagagcaatgctcctggtgggaagctgttcacatggggtgacgcaggcggagagaagctgggccatactgacaaaaagtcaaagcttgtaccaactcgtgtcgaatcgctcgttgattgtgattttactcaggtgtcatgtggtatttcattaacagctgtgctaaccataacgggtgttgtatttaccattggaagcaaggaccatgggcaattagggaatcctcgatctgacactgacagcgcatgtatttgtatggttgaagggccacttaagactgagtttgtcaaagatatatcctgcggaagttcccatgtcgcagtcttggcaatgaatggaaaagtgtttacctggggcaaaggcacagaagggcaacttggtttaggggattacgttgacaggagctccccaactctagtggaggccctggaagataaacaagtggacagtatagtttgttcttccaattccactgctgcaatttgcgtgcacggggaaatctcaagcaaggatcaatctgtgtgcagcagttgcaggttggcatttcggtttacaaggaagaagcacaactgctacaactgtggttccatggtctgcaattcttgcagcagcaacaaggttcatagggctgcccttgcaccagacaagagcaaaagatgccgcgtctgtgatgcttgtttcaacgagctgaataaaacagccgagcacggtaaaatgagctgtggatcaaagatccaaaaagaaccgtcttatttagcagaaacaaggacatacacaccaaagttatcacggatgctgaaggaagcaaatttcatcatggagaaaatgggttcctccgcacaaagtcccggccagagaaatcaggaacccgccactccgaatcaaatgcaaaaggaaaggtggggacaggtagaatgccccgatcgattcaaatgcgcaagagacaacattccacatcgtttgacaccaaagaagcagacaattgatgattatcctatgaggagaatggctgatccagtctcacaaaagactgctgcccctttaacacaaactactagtgataggaggaaagaacaagatttgatagaaaagatactgctggaggaggtgaaacagcttcaagcacaggtaaccacgctagcagaagaatgccggcacaggagcctgaaagttcggttgtacaaacggaaacttgaggaaacctggttgatagtgagggacgaggccacgaagtgcgaagctgcagaagagattataaaggttttaacgaatcagaggaacgctttgtcaaacaaacttttagatggtctggaactagatggttccagtatcgtgcctaacccacccgacaaagctcttgccacctgcaaaaccccaccgctaaacagcatcagggatcaacacaacgcagaggcagaggaagttttggatacgcgatccacagcgtcttccaacaccgtcgcggtggatgactcagctgcgcatcagaacggcagatctagagcctccagtagcagcagaggctactacgacgatgggggaacagatagcacagctgctcctactgactccaacggggtcatcgagcaaattgagcgtggtgtgtacattacagtcgttacgtcccccagcggtaagaagggaatcaagcgcatccggttcagccggaagcatttcggggaggccgaggcacagaaatggtgggagcggaatgagagcagggtattcgcgaagtacgacagcgtggaatacctggcagcgtaatctcgataaggaagatgtacaggagtagccagtagttcttttgtctcagtgtctgcctgcatattgttcagtaaagtcgtaggatagatgagatagaagggaccatgatagcttccttttcctagcgaggagataaactgcataataccatgtcctcgttgtggattaacttagggccatagttgactcgataacgattcaattctacacgactgggggtttgtgttcgatgggaacaacaattatatcacacttcgaataattatcattccattagcatcaaatgataatttcagcaccgaacaacatgttatggataaaaattgaaaaatgagaatttatgataataccattaaatccggatggctatgttagatatacattggataacggtatggatactggatatccatacccaccaaaaaaatatcacggatacattattatatccataaccgtacctgcggatactaaattcaac

SEQ ID NO: 218803 - DNA, 2805 bp, Zea Mays
cacggctccacgaccacgagcccaaccgggtagcttcttcttcgtccgctgttacccacaccgcgggaagcctccatgcgatcccctgggcggcgcctaccagcgccggcgcggctcgtcgcggctgccctcctcctcgcagctctcaccgggggagccgtcggcgccgatgggtacgggcgggcgaggagggtgtacatgaagaacaaggtcctggagatgttttaccatgcctatgacaactacatgacttatgcattccctcatgatgaattgaagcctcttactaaaagtttcacggactcgcttagtgagcttggcaatttaaatcttgaacacttgccacaggattatagtggatccgcgttgacactggttgagtcattatcaagtcttgttgtcttaggtaacctcacagagtttgagagaggagttctctggctttcagaaaatctgacatttgatgttgatgctcggattaatctttttgagtgtaacataagacttcttggggggcttatttctgctcatattcttgcaaaagactacagcagccagtttaagcatgggctgtatcaagatcaattactacgtcttgctgaaagtttaggcaatcgttttctaccggcatttgagacacctactggattgccgtattcatggattaatcttaaggttcatataccgaactttggcttttttcagactttaaaatcttaattttttgcatgcatgaatcaatcgtaagattcctttacaacctgaaatcgtatggccacttgaatgccatcatttattgtgtgtacatatctgtgtacattcaacaggtcaaactgagaaagggtcttctgcaaagagttaccacatttgtctgaaagcagactacaacaaacattgagtttcttctccaataatttttgaaaaaggacgtgtatagttattaagacaagcatgctcattagtacaattttaacatctatcaacgtttaccttaggaaaactgggatattacttgctatcagctaaaatgataagaatggcaaattataagcatgctatggtagaatgaagaaccacagaatgattactttgtttgaaaaactcaaagttcacatatattagaactctggtactcattacttttgcaattggcatgatacaacaacctttttcagtatggggtgatggaaaatgaaacaactgaaacaagcacatcagggtgtggctcccttatacttgaaatgggtgtgttgtcacgtttgactggtgattctagatatgaagctgcagctcttcgtgctctccgcaagttatggagcatgagaagttcactgaatctagtaggcaccacacttgatgtttttactggcaagtggattcagtattcatccggaattggtgctggtgttgattcattttatgagtatctgattaaagcatatattcttttcggaagtgatgagtactgggatatgtttcattcagcttatcttgcggtgcagaagtacttccgacatggtccatggtatcatgaggctgatatgaggactggagaagcaacgcactggcagctaactagccttcaggctttctggccaggtcttcagacacttcttggagacgtaactgctgcaaatctatcacaccgtgagttttacaatatatggcaaagatttggtgtgctacctgaaagatatcttttggactatggaatgttgcatcctacagagaagtactatcccttgcgtcctgagtttgctgagtcaacattttatctttatcaagctactaaagatccttggtacctagaagtgggtgaaaccattgtgaggtcacttaattactatactaaagtggatggaggttttgctagcatcagagatgtttcaacaatgaaacttgaagatcaccagcacagcttctttctttcagaaacgtgcaaatatctttttcttctgtatgatgattcattcttgaggaatcaaaattacatatttacaacagagggtcatccccttccaataagaagcacgtggcatgagaaatttcctgcagcatatgttcccagcaattggacatctgttaaggatgagatccaaccaattcgcgcgagcgcattatcgtctcaagtttgtcccgagacgattttcggaagaagtgttggtaccccatgggagagtgcgtgccatgttccagatgcgcacgctagccacagatgcaggactgacgatgactgtggaatagaagcaataacatgcaagaagaggacctgcagtatggctggctactgcggcttatttttttataatggaaacaagagttccggctttagcatgataatgcgtacagccaatacaagtcgattattacaattaagaactgctgcatgaatagtgatactaactcaaaggaactaaattacaatactatgactaacactagtcatactcaattcttgaatttgagcgccatccatggtttgcgaagacttccatcgccaccacttccaaaacttgcgaagcaatgaggatttgttgttgcgattcctccttttgtagcagtctccagaatcttaaccagtgagtacatctgaaaataacctgcacaattgatggaattggtttatgattaaaagccacctcatttcgactgagccaaatagcccaaaataaagcagctattccagagagtaaaacttttttataccccggacccctatttgttccccaagacccgataatatgattaatgctaacgggcatttctaattttaaggcaaagtaaattactctccatatgcttttg

SEQ ID NO: 218804 - DNA, 2285 bp, Zea Mays
cacggctccacgaccacgagcccaaccgggtagcttcttcttcgtccgctgttacccacaccgcgggaagcctccatgcgatcccctgggcggcgcctaccagcgccggcgcggctcgtcgcggctgccctcctcctcgcagctctcaccgggggagccgtcggcgccgatgggtacgggcgggcgaggagggtgtacatgaagaacaaggtcctggagatgttttaccatgcctatgacaactacatgacttatgcattccctcatgatgaattgaagcctcttactaaaagtttcacggactcgcttacttgaacacttgccacaggattatagtggatccgcgttgacactggttgagtcattatcaagtcttgttgtcttaggtaacctcacagagtttgagagaggagttctctggctttcagaaaatctgacatttgatgttgatgctcggattaatctttttgagtgtaacataagacttcttggggggcttatttctgctcatattcttgcaaaagactacagcagccagtttaagcatgggctgtatcaagatcaattactacgtcttgctgaaagtttaggcaatcgttttctaccggcatttgagacacctactggattgccgtattcatggattaatcttaagtatggggtgatggaaaatgaaacaactgaaacaagcacatcagggtgtggctcccttatacttgaaatgggtgtgttgtcacgtttgactggtgattctagatatgaagctgcagctcttcgtgctctccgcaagttatggagcatgagaagttcactgaatctagtaggcaccacacttgatgtttttactggcaagtggattcagtattcatccggaattggtgctggtgttgattcattttatgagtatctgattaaagcatatattcttttcggaagtgatgagtactgggatatgtttcattcagcttatcttgcggtgcagaagtacttccgacatggtccatggtatcatgaggctgatatgaggactggagaagcaacgcactggcagctaactagccttcaggctttctggccaggtcttcagacacttcttggagacgtaactgctgcaaatctatcacaccgtgagttttacaatatatggcaaagatttggtgtgctacctgaaagatatcttttggactatggaatgttgcatcctacagagaagtactatcccttgcgtcctgagtttgctgagtcaacattttatctttatcaagctactaaagatccttggtacctagaagtgggtgaaaccattgtgaggtcacttaattactatactaaagtggatggaggttttgctagcatcagagatgtttcaacaatgaaacttgaagatcaccagcacagcttctttctttcagaaacgtgcaaatatctttttcttctgtatgatgattcattcttgaggaatcaaaattacatatttacaacagagggtcatccccttccaataagaagcacgtggcatgagaaatttcctgcagcatatgttcccagcaattggacatctgttaaggatgagatccaaccaattcgcgcgagcgcattatcgtctcaagtttgtcccgagacgattttcggaagaagtgttggtaccccatgggagagtgcgtgccatgttccagatgcgcacgctagccacagatgcaggactgacgatgactgtggaatagaagcaataacatgcaagaagaggacctgcagtatggctggctactgcggcttatttttttataatggaaacaagagttccggctttagcatgataatgcgtacagccaatacaagtcgattattacaattaagaactgctgcatgaatagtgatactaactcaaaggaactaaattacaatactatgactaacactagtcatactcaattcttgaatttgagcgccatccatggtttgcgaagacttccatcgccaccacttccaaaacttgcgaagcaatgaggatttgttgttgcgattcctccttttgtagcagtctccagaatcttaaccagtgagtacatctgaaaataacctgcacaattgatggaattggtttatgattaaaagccacctcatttcgactgagccaaatagcccaaaataaagcagctattccagagagtaaaacttttttataccccggacccctatttgttccccaagacccgataatatgattaatgctaacgggcatttctaattttaaggcaaagtaaattactctccatatgcttttg

SEQ ID NO: 218805 - DNA, 2288 bp, Zea Mays
ggctccacgaccacgagcccaaccgggtagcttcttcttcgtccgctgttacccacaccgcgggaagcctccatgcgatcccctgggcggcgcctaccagcgccggcgcggctcgtcgcggctgccctcctcctcgcagctctcaccgggggagccgtcggcgccgatgggtacgggcgggcgaggagggtgtacatgaagaacaaggtcctggagatgttttaccatgcctatgacaactacatgacttatgcattccctcatgatgaattgaagcctcttactaaaagtttcacggactcgcttagtgagcttggcaatttaaatcttgaacacttgccacaggattatagtggatccgcgttgacactggttgagtcattatcaaggtaacctcacagagtttgagagaggagttctctggctttcagaaaatctgacatttgatgttgatgctcggattaatctttttgagtgtaacataagacttcttggggggcttatttctgctcatattcttgcaaaagactacagcagccagtttaagcatgggctgtatcaagatcaattactacgtcttgctgaaagtttaggcaatcgttttctaccggcatttgagacacctactggattgccgtattcatggattaatcttaagtatggggtgatggaaaatgaaacaactgaaacaagcacatcagggtgtggctcccttatacttgaaatgggtgtgttgtcacgtttgactggtgattctagatatgaagctgcagctcttcgtgctctccgcaagttatggagcatgagaagttcactgaatctagtaggcaccacacttgatgtttttactggcaagtggattcagtattcatccggaattggtgctggtgttgattcattttatgagtatctgattaaagcatatattcttttcggaagtgatgagtactgggatatgtttcattcagcttatcttgcggtgcagaagtacttccgacatggtccatggtatcatgaggctgatatgaggactggagaagcaacgcactggcagctaactagccttcaggctttctggccaggtcttcagacacttcttggagacgtaactgctgcaaatctatcacaccgtgagttttacaatatatggcaaagatttggtgtgctacctgaaagatatcttttggactatggaatgttgcatcctacagagaagtactatcccttgcgtcctgagtttgctgagtcaacattttatctttatcaagctactaaagatccttggtacctagaagtgggtgaaaccattgtgaggtcacttaattactatactaaagtggatggaggttttgctagcatcagagatgtttcaacaatgaaacttgaagatcaccagcacagcttctttctttcagaaacgtgcaaatatctttttcttctgtatgatgattcattcttgaggaatcaaaattacatatttacaacagagggtcatccccttccaataagaagcacgtggcatgagaaatttcctgcagcatatgttcccagcaattggacatctgttaaggatgagatccaaccaattcgcgcgagcgcattatcgtctcaagtttgtcccgagacgattttcggaagaagtgttggtaccccatgggagagtgcgtgccatgttccagatgcgcacgctagccacagatgcaggactgacgatgactgtggaatagaagcaataacatgcaagaagaggacctgcagtatggctggctactgcggcttatttttttataatggaaacaagagttccggctttagcatgataatgcgtacagccaatacaagtcgattattacaattaagaactgctgcatgaatagtgatactaactcaaaggaactaaattacaatactatgactaacactagtcatactcaattcttgaatttgagcgccatccatggtttgcgaagacttccatcgccaccacttccaaaacttgcgaagcaatgaggatttgttgttgcgattcctccttttgtagcagtctccagaatcttaaccagtgagtacatctgaaaataacctgcacaattgatggaattggtttatgattaaaagccacctcatttcgactgagccaaatagcccaaaataaagcagctattccagagagtaaaacttttttataccccggacccctatttgttccccaagacccgataatatgattaatgctaacgggcatttctaattttaaggcaaagtaaattactctccatatgcttttg

SEQ ID NO: 218806 - DNA, 448 bp, Zea Mays
agtatcgatacaaagactgtctgaaatcttctagaaacgacatcgaaaggaacttcaagctgaacaagcgaaagcatctatacaaagattgtctgaaatcttctaaaaaaacctaaaccctatcgggaatggagacgctctcggcgaagcaggagggcacggtggacgtgaagctgaagccgacttctaaccaatccaactcgtaggcgggcggggagcggatgtgccaactagaagagtggtctctcttggcgcttgcttgacaaacgtgtgttattaaccgttgtatataatgttattaattaatgtcctttattccctgatgcttctgctgtggctcacattctcaactttgtatctgatgatgaaagaccagatgttttcttgcagttttcgaaaaagtcttctagagacaacttaattttgattaacaacacaacacatggcc

SEQ ID NO: 218807 - DNA, 3657 bp, Zea Mays
cttggcaacactaaacacctgatgttaaaattagcacctcatgatgaaattacatgggaaaaagtgtccccgttattagttttatatttacatagcatgtaattaagatgctggagggcgaggaatttgctggcctgcgcgcacgttgcgatcatggaggtaaacaattgaggaatgcggtggccgcgtacgtgctttgatatgatgctataatacgcctgatctgattcgtagaaggacggcggcggcgggcgcgggctgccggcggcgatggtggacggcggcgggcgggagatggactccccgcggttccgcgcgatcctgcgcgccaccagcgggcgccggaagcgcgcacccgaggtgaagagtttctcgcacgagctgagctcgaggggcggcggcggcggcgtgccggcgatgcgcaagatggtgcgcggcggcgggctcggcagcaccaccccggaggagttcatcggcgccatccggaccaagttcatccgcctcaaggaggaggtggacagcgagctgggcgtcttcgcgggggacctcgtcgacatgctggcgcggtcgggcgaccaccgggacgactgtcgcgtcgcgctggaggacctgctggtggtggcacagcggtgcgcggagatgagccccgaggagctgtggacccgctgcgagggcgtagtgcagggcctcgacgaccgccggcaggacctccccgcaggcctcccgaagcaggcgcacacgcgcatcctcttcatcctcacgcgcttcacccgcctcctgcagttccgcaagggcgccgccgcggggtgccgctacgccgccgacgccgacgacgacgacaggcacaacgtgctcggcctgcacaacctcagcgacctcggcctctacccgatccacgtcgacggcggggatctcggccccaagagcacctccagcctcaccgagctcaaggagcgcctcatcaggcggcgaatgttggagcacaggcagctcaccgtcgacttctccccggctaggatcttttcgccgttcggggacgggtcggccgttgacggccactccccgagcagcaagatggcgtcgtggaagaagctcccttcccccgccgagaagaacaagaccgccgccgccgccggggatgccacggccgccgccgccaagggagacgacagcccgtcgaagaagaagcccatcacccggcacggcaaggcgacggtggacgagatcgtggagcgcgtggacgcggcgagcatccacatccgcccggatgggctggcgtgcttgggcggcgacgaggccattagcctggagatcccgtcccggtacccggaggcgcagcagatcatggtggacgggaagccccggatgatctgccgcatctgcgacttcgagatccccatggcgtgcgccgagggccacttcgtggtgtgcacgctcgccgatcgctgcgacgccaaagggcacagcgcggaccagcggctactgcgcgtggccgaggtgctcgaccgcgtgctcgcgtgcttcggccccctcggcggcgggagggcgagcacgtcgtccgagtcggactccaacgccgccgaccacgaagccctgtcccacctgctgaccgtgccgtccacggagctcttctcggagggcgcgctgacgccggcgtcggggagcctgccgcagtcgccgctgctgacgccgcggacgagccacgcggagtcgcagctgaccaagcacagggcgttcgcggatctggagagctcccagcagatcgagagccttgtcgccatcgcccgtggcgtggagggcgtgaagagctccgagtacaactcgctggaggacctcagctcgtacctggaggacctgaacgccgtgatcgacacgcgcaaggtggacgccctcgtcgtggagacgttcgggcggaggatcgccaagctcctgcaggagaagttcatgcagctgtgcgtgcagatcgacgacacgggcggcgcggcggagcagcagcagctgctgctgcagcacctgcacccgatcgacgaggagggcccgactacgacggagagcggcggcgggacgacggcgagctcgcgggcgacgctgagcggcaacaggttcaaggaccgcacgtccatcgaggacttcgagatcatcaagcccatcagccgcggcgccttcggccgcgtgttcctggccaagaagagggtgaccggcgacctgttcgccatcaaggtgctccggaaggcggacatgatccggaagaacgcggtggagagcatcctggcggagcgcgacatcctcatctccgcgcgcaaccccttcgtggtccgcttcttctactccttcacgtgcagggagaacctgtacctggtcatggagtacctcaacgggggagacctctactccctgctcaggaacctcggctgcctcgacgaggacatggccaggacatacatcgccgagctcgttcttgcgctggagtacctgcactccatgaacgtgatccaccgcgacctgaagcctgacaacctgttgatctctcgcgacggccacatcaagctgaccgatttcgggctctccaaagtgggcctgatcaacagcacggacgacctgtcgggcccggacgtgagctgcgccctcgtcggcgagcaccagccggcggacgcggagcagcgggagcagaagcggcggcagcggcagaagcaggcggcggtgggcacgccggactacctggcgccggagatcctgctgggcatggcccacggcccgactgcggattggtggtcggttggcgtcatcctgttcgagctgctggtggggattcctcccttcaacgctgagcacccgcagataatattcgacaacataatgaaccgagagataccctggccacatgtgccagaggagctgagctctgaagcctacgatttgatcgacaggttgctgatggagaacccggtgcagagattgggcgcgacaggtgccggagaggtgaaggctcatccgttcttcaaggacatcaactgggacatgcttgccaggcagaaggtcgcgttcatcccttccacagacgacgagtacgacacgagctacttcgcctgccgccacgcctggagcggcgccggcgagcatggcggcgcggccggcagcgactacgacgaccggagcgaggccagcagcatgagctgcggcagcagtccgcgcagtgactacgaggaagatggcgatgagtgtggcagcatggaagaattcggagcgcccttatcggtgaaatactctttcagcaacttctcgttcaagaacatctctcagctggcatccatgaactacgacctgatgacgaagcataacaacctggatccgttgcagtcctccagatgattgcgtcatcgtgtggcaatgaagggtagccaaagcaaaatgctagtaaatgtagcttgcgctgagaccatgcatcatcgatcagaagataggaggaggatggtattggtatcccctgatgtaatctctgacaactagctagctgcagatacatagtgcattataaaccttcgattcttcatagaaagaaaagatggtgaatctctttctttctttcttgtttaagagaaatggttcacaaattggtataatggtaatctaaacttagccatagctggccgcatcgag

SEQ ID NO: 218808 - DNA, 3512 bp, Zea Mays
gtcgtctgtcttctccatcgggtagcatgtaattaagatgctggagggcgaggaatttgctggcctgcgcgcacgttgcgatcatggagaaggacggcggcggcgggcgcgggctgccggcggcgatggtggacggcggcgggcgggagatggactccccgcggttccgcgcgatcctgcgcgccaccagcgggcgccggaagcgcgcacccgaggtgaagagtttctcgcacgagctgagctcgaggggcggcggcggcggcgtgccggcgatgcgcaagatggtgcgcggcggcgggctcggcagcaccaccccggaggagttcatcggcgccatccggaccaagttcatccgcctcaaggaggaggtggacagcgagctgggcgtcttcgcgggggacctcgtcgacatgctggcgcggtcgggcgaccaccgggacgactgtcgcgtcgcgctggaggacctgctggtggtggcacagcggtgcgcggagatgagccccgaggagctgtggacccgctgcgagggcgtagtgcagggcctcgacgaccgccggcaggacctccccgcaggcctcccgaagcaggcgcacacgcgcatcctcttcatcctcacgcgcttcacccgcctcctgcagttccgcaagggcgccgccgcggggtgccgctacgccgccgacgccgacgacgacgacaggcacaacgtgctcggcctgcacaacctcagcgacctcggcctctacccgatccacgtcgacggcggggatctcggccccaagagcacctccagcctcaccgagctcaaggagcgcctcatcaggcggcgaatgttggagcacaggcagctcaccgtcgacttctccccggctaggatcttttcgccgttcggggacgggtcggccgttgacggccactccccgagcagcaagatggcgtcgtggaagaagctcccttcccccgccgagaagaacaagaccgccgccgccgccggggatgccacggccgccgccgccaagggagacgacagcccgtcgaagaagaagcccatcacccggcacggcaaggcgacggtggacgagatcgtggagcgcgtggacgcggcgagcatccacatccgcccggatgggctggcgtgcttgggcggcgacgaggccattagcctggagatcccgtcccggtacccggaggcgcagcagatcatggtggacgggaagccccggatgatctgccgcatctgcgacttcgagatccccatggcgtgcgccgagggccacttcgtggtgtgcacgctcgccgatcgctgcgacgccaaagggcacagcgcggaccagcggctactgcgcgtggccgaggtgctcgaccgcgtgctcgcgtgcttcggccccctcggcggcgggagggcgagcacgtcgtccgagtcggactccaacgccgccgaccacgaagccctgtcccacctgctgaccgtgccgtccacggagctcttctcggagggcgcgctgacgccggcgtcggggagcctgccgcagtcgccgctgctgacgccgcggacgagccacgcggagtcgcagctgaccaagcacagggcgttcgcggatctggagagctcccagcagatcgagagccttgtcgccatcgcccgtggcgtggagggcgtgaagagctccgagtacaactcgctggaggacctcagctcgtacctggaggacctgaacgccgtgatcgacacgcgcaaggtggacgccctcgtcgtggagacgttcgggcggaggatcgccaagctcctgcaggagaagttcatgcagctgtgcgtgcagatcgacgacacgggcggcgcggcggagcagcagcagctgctgctgcagcacctgcacccgatcgacgaggagggcccgactacgacggagagcggcggcgggacgacggcgagctcgcgggcgacgctgagcggcaacaggttcaaggaccgcacgtccatcgaggacttcgagatcatcaagcccatcagccgcggcgccttcggccgcgtgttcctggccaagaagagggtgaccggcgacctgttcgccatcaaggtgctccggaaggcggacatgatccggaagaacgcggtggagagcatcctggcggagcgcgacatcctcatctccgcgcgcaaccccttcgtggtccgcttcttctactccttcacgtgcagggagaacctgtacctggtcatggagtacctcaacgggggagacctctactccctgctcaggaacctcggctgcctcgacgaggacatggccaggacatacatcgccgagctcgttcttgcgctggagtacctgcactccatgaacgtgatccaccgcgacctgaagcctgacaacctgttgatctctcgcgacggccacatcaagctgaccgatttcgggctctccaaagtgggcctgatcaacagcacggacgacctgtcgggcccggacgtgagctgcgccctcgtcggcgagcaccagccggcggacgcggagcagcgggagcagaagcggcggcagcggcagaagcaggcggcggtgggcacgccggactacctggcgccggagatcctgctgggcatggcccacggcccgactgcggattggtggtcggttggcgtcatcctgttcgagctgctggtggggattcctcccttcaacgctgagcacccgcagataatattcgacaacataatgaaccgagagataccctggccacatgtgccagaggagctgagctctgaagcctacgatttgatcgacaggttgctgatggagaacccggtgcagagattgggcgcgacaggtgccggagaggtgaaggctcatccgttcttcaaggacatcaactgggacatgcttgccaggcagaaggtcgcgttcatcccttccacagacgacgagtacgacacgagctacttcgcctgccgccacgcctggagcggcgccggcgagcatggcggcgcggccggcagcgactacgacgaccggagcgaggccagcagcatgagctgcggcagcagtccgcgcagtgactacgaggaagatggcgatgagtgtggcagcatggaagaattcggagcgcccttatcggtgaaatactctttcagcaacttctcgttcaagaacatctctcagctggcatccatgaactacgacctgatgacgaagcataacaacctggatccgttgcagtcctccagatgattgcgtcatcgtgtggcaatgaagggtagccaaagcaaaatgctagtaaatgtagcttgcgctgagaccatgcatcatcgatcagaagataggaggaggatggtattggtatcccctgatgtaatctctgacaactagctagctgcagatacatagtgcattataaaccttcgattcttcatagaaagaaaagatggtgaatctctttctttctttcttgtttaagagaaatggttcacaaattggtataatggtaatctaaacttagccatagctggccgcatcgag

SEQ ID NO: 218809 - DNA, 1004 bp, Zea Mays
gtagacccgtccctgtctccaacttcagagcatccaatcgctcaacagcgccactgatgagcctctgtcgtcgtcgtcatcagtgaaccaggcgaggcgacgatcggacccgggtcgtaagcggtaagcccaccggctcaacagcaggctgcagatccccccaccccccacgcaactccatctcctctccgcctccacctgcacccatcgagcaccgaacggcggcggcatggaggctggcggcgaggagttcgcgatcggcgtggtgatctccgcgaagaccaccctgggggaggagttcgagggccagatcgtcgccttcgaccgcccctccaacctcctcgttatccaggagggcgtgggtagggcggagaggggggagcggaggaacgtgagggtcctcaaagcgaactacatccgggagttctcggtggtcagtaagggtgacgaccctctcgatcctgccagctgcatgctggacctcaactccatttatgcccgggaggatgctgcactcagagattgaagctgagagaattggtgttggtgtcaccccagaagctcaaagtatatttgatgcgctgtccaagacgcttccggttcagtgggacaagactgacattgtcgtaatgaaggaggttcgtgtacgcagtccgtacctgcctgaaaatgttaatggaggaacagctgcagcaaatgaacgcgttaagaaagtgattgactttgaaaggaaaagattacattcacgtgtacctggccaattctcttgattaaaaggcttgactattttttacattagcctcgtgttgtatttctaatactgcatccagttttcttattctcatcgatgcggttttctataaaatgtttcagcaaaaatctgtcgtaataatcacatcaactagctagatctgtactgtttggtagttattcagatttttataaaaatattttggatccaaataaatgtttaggagataaatcagaatcatttgatgaggccg

SEQ ID NO: 218810 - DNA, 1300 bp, Zea Mays
atgacatccaattatccaattcgctctctggctcgcagtgcatacaacaggaatgacttccatacatccaaaattctatgggaatctgcattgtcgttgaactctttgattccagatggctggtttgcatatggcacagctgcatggaaggacaaggatcttgacaaagctgtggatgcgtttagtcgtgctgtacagatagatcctgagaatggagaagcatggaacaacatagcctgcctgcacatgattagaggaaaaagccaagcagcagtccaagcattcagggaagctgtaaagttcaagaggaatagctgggaaatttgggaaaattacagtaaagttgctttggacacagggaatattagactgtttagtgttggtatattggacaaggtgatgacaatgcttgaagaacaatctccagattttgttgatactcacgaagcatcagatgatgcaaataaagatacaagacaatccaatcaattattagatattactggtgatatcctccagcagattgtgcgaagtggaggcagcaatgcagccatatggggtttgtatgcaagatggcataagaccaagggtaacctcatagcatgttctgaagctttgttgaagcaagttcgatcccttcagggctcaggattattgcatgaccaaatgaagttcgcaaagtatgctcaagcttccttaaagctttgcaaggtgtacatggaaatttcttcctcaactggaagccgacgagaattattaacagctgagatgcaccttaaaagtaccttgaaacagacgatggacttctcagacactgaggagtacaaagctcttgataactgtcttgaagaaataaagaacctgattgccgctactgcctaggttgttgcatccaagttttggacgctggttatgataatgtattgtccgtttctaattaagcatttctattgttgtcttgttgggaatcaagatcacattatcggactctgttagcacacacaaggatgccaagacaagtgaacctgcgccagagactggaagcgaagatggtgtgctgctacagccaagattaaaaaggaagcttaagcccaatagcaaggtgtccggcctagagtgggttcgttgactgtaatagtgtggcccagtcgttgtgccatatgtatggcttcagtctgtaaactgggacatcgaaaaaaagaacagaaaacactactgcctatcttcttcccctcttccaagtcttctccttccctgccgccgtcttgctttccccttcctcctggaagctaacagtggt

SEQ ID NO: 218811 - DNA, 3187 bp, Zea Mays
caagtcacagccgccagcgacatgacttgcgccacccggagccccggcttcctccgcgaggccgagctccgcctcctccgctgcactctcccctcgctgccctcttccccgcccccacccgcttcccctccccctgcgcatccgctcggtcccgccgcggcctctgcgatcgctgccgttgaggccggcgactacgaggctgcgctcgccaccgccgcgccgcacttctttccggcattcgccccctctaggcctcctggctcagccgcgcagttctacgccgacctaggtgccgcagctcgggcgttcctgctggtcgatggggacggggcagcggcgggagaggggttcgattgcaggtgcgcagttgtgctttccgctgcagtggccgcgctgctcgcgttcacgcaacagaacgtgactggtcagatggatgtagttgagggaacaggcaactgtgttgacttggcttctattattacaactgacatgactatcaaatctgatttaccttttcatgttaacctaaacctgttggattttttagggagatgctatagtaatcttggagacacatgggatgcatgggcttctgacaatttagcttcttttggctctcatgttcatgggaaattttcactcttgcagttcattgtatttgcaaggcttttgtttaccagcgtacagagtctggatctctctgattgctggagcgtgtcatggtggttgtttagaatatcaatgttgcagcagaacatcttggatgagttatcatcgtctctgtttgatcaagtgcaagtgtacaagaataagatgttggatcattttggtgaactggaaaaggtttctacctactgggattgtttactgtctgatggagaaggttcttattttgtttcagctgctttcttagaggctggaatcgtggaatacaaatatggtcgggttgatgcttcaaggttgcatctcaatagcgcacaagaagcatgtggtctgcacctttcccttacagggatccttggtttccgaacaatataccaggtggatgcgaagtctcaaatggtgcttgttgcgaagaccaataagtcaggccctgatgaaggacaagtgacagaacccacagtagctcagaatgacaatgcagctttgaaaaatgcaaggagcttcgttcctgttgaagacgatgaattctgtgacatactaagaatgcccagactggtgcaagatgggagtaattctgccagtgaagacgccacgaaccccagtgcaaaaatatcactatcggctatacagcaggctgctgtacttgcacaatgcttgtatgtgagccggaggagtcgtgttgatgaaatgtctgggtgggagatggcaccatacatagagtcgattgattctcaggatgaatcttactttgtggtcaggagtttgtgcgatatactgcgtgttagatgggagtcaacccgcagtcggacaaagcagcgggcattactaatgatggagaatttggttgaagatatcagcaaagaattccctgctgccccacaaagagttaaaatggtttttgcggttcatatgccaactcttcctgcattgaggaaagaatatggtgaacttttgatcagttgtggcatagttggagaagcactggagatatttaaagatcttgaattgtgggacaatttaatatattgctatcgattgttaggtaaagtggctgatgcagttagtctaataaatgctcgactttctgttacaccaaatgacccaaggttatggtgttcacttggtgatgttacaaataatgatgaccattataaaaaagcattggaagtttcaaataataaatctgcgcgagctatgcgctctctggctcgcagtgcatacaacaggaatgacttccatacatccaaaattctatgggaatctgcattgtcgttgaactctttgattccagatggctggtttgcatatggcacagctgcatggaaggacaaggatcttgacaaagctgtggatgcgtttagtcgtgctgtacagatagatcctgagaatggagaagcatggaacaacatagcctgcctgcacatgattagaggaaaaagccaagcagcagtccaagcattcagggaagctgtaaagttcaagaggaatagctgggaaatttgggaaaattacagtaaagttgctttggacacagggaatattagactgacacttgaagctttgaaaactgtattgaatttatcctcaaacaagcagtttagtgttggtatattggacaaggtgatgacaatgcttgaagaacaatctccagattttgttgatactcacgaagcatcagatgatgcaaataaagatacaagacaatccaatcaattattagatattactggtgatatcctccagcagattgtgcgaagtggaggcagcaatgcagccatatggggtttgtatgcaagatggcataagaccaagggtaacctcatagcatgttctgaagctttgttgaagcaagttcgatcccttcagggctcaggattattgcatgaccaaatgaagttcgcaaagtatgctcaagcttccttaaagctttgcaaggtgtacatggaaatttcttcctcaactggaagccgacgagaattattaacagctgagatgcaccttaaaagtaccttgaaacagacgatggacttctcagacactgaggagtacaaagctcttgataactgtcttgaagaaataaagaacctgattgccgctactgcctaggttgttgcatccaagttttggacgctggttatgataatgtattgtccgtttctaattaagcatttctattgttgtcttgttgggaatcaagatcacattatcggactctgttagcacacacaaggatgccaagacaagtgaacctgcgccagagactggaagcgaagatggtgtgctgctacagccaagattaaaaaggaagcttaagcccaatagcaaggtgtccggcctagagtgggttcgttgactgtaatagtgtggcccagtcgttgtgccatatgtatggcttcagtctgtaaactgggacatcgaaaaaaagaacagaaaacactactgcctatcttcttcccctcttccaagtcttctccttccctgccgccgtcttgctttccccttcctcctggaagctaacagtggt

SEQ ID NO: 218812 - DNA, 1828 bp, Zea Mays
gcgcagtcttctcaattcttcttcctgaccctcacaagtcacagccgccagcgacatgacttgcgccacccggagccccggcttcctccgcgaggccgagctccgcctcctccgctgcactctcccctcgctgccctcttccccgcccccacccgcttcccctccccctgcgcatccgctcggtcccgccgcggcctctgcgatcgctgccgttgaggccggcgactacgaggctgcgctcgccaccgccgcgccgcacttctttccggcattcgccccctctaggcctcctggctcagccgcgcagttctacgccgacctaggtgccgcagctcgggcgttcctgctggtcgatggggacggggcagcggcgggagaggggttcgattgcaggtgcgcagttgtgctttccgctgcagtggccgcgctgctcgcgttcacgcaacagaacgtgactgggcctccaaggaagtttcccacttttcctttttcaatgtcatcttttgatgaaagatgctatagtaatcttggagacacatgggatgcatgggcttctgacaatttagcttcttttggctctcatgttcatgggaaattttcactcttgcagttcattgtatttgcaaggcttttgtttaccagcgtacagagtctggatctctctgattgctggagcgtgtcatggtggttgtttagaatatcaatgttgcagcagaacatcttggatgagttatcatcgtctctgtttgatcaagtgcaagtgtacaagaataagatgttggatcattttggtgaactggaaaaggtttctacctactgggattgtttactgtctgatggagaaggttcttattttgtttcagctgctttcttagaggctggaatcgtggaatacaaatatggtcgggttgatgcttcaaggttgcatctcaatagcgcacaagaagcatgtggtctgcacctttcccttacagggatccttggtttccgaacaatataccaggtggatgcgaagtctcaaatggtgcttgttgcgaagaccaataagtcaggccctgatgaaggacaagtgacagaacccacagtagctcagaatgacaatgcagctttgaaaaatgcaaggagcttcgttcctgttgaagacgatgaattctgtgacatactaagaatgcccagactggtgcaagatgggagtaattctgccagtgaagacgccacgaaccccagtgcaaaaatatcactatcggctatacagcaggctgctgtacttgcacaatgcttgtatgtgagccggaggagtcgtgttgatgaaatgtctgggtgggagatggcaccatacatagagtcgattgattctcaggatgaatcttactttgtggtcaggagtttgtgcgatatactgcgtgttagatgggagtcaacccgcagtcggacaaagcagcgggcattactaatgatggagaatttggttgaagatatcagcaaagaattccctgctgccccacaaagagttaaaatggtttttgcggttcatatgccaactcttcctgcattgaggaaagaatatggtgaacttttgatcagttgtggcatagttggagaagcactggagatatttaaagatcttgaattgtgggacaatttaatatattgctatcgattgttaggtaaagtggctgatgcagttagtctaataaatgctcgactttctgttacaccaaatgacccaaggttatggcatagtgtatatctaagtgcacaatgaaagctatgtatctaaaaaaaccaaaacgtcttataatttggaatggagggggtactttatcta

SEQ ID NO: 218813 - DNA, 652 bp, Zea Mays
caccggcggtgggtgtgggtcgcaaagtgccgcagctttttgccaaaaagccctctgccgaccttgtcccgtgtcgggttcgcatcgagtcctatggcagtgccattgccattccattccactccgggtgtcaggatcacggcacaacttcttcgccgctgctacctttatcttcgtggctcctgacagtgctgccattccacggatttttacagtcatgcatcagcgtgttcgctgtggctggtttaaaacttactgtaattcataaagacaaaataagtagaagatttaagcctgatcatgaaggacaattttatcccgatcaaatgccccaacccgcggaccgggacgaggtctgtgcctgtagccccgtacacctgcaactgcaatgccactgtcgtattcctgaatgaatatactgtatcacacacgctgtttcaagacgtcgcagaagatgtacttgctgccctaccgagctacttatgtcctatttctcctaaagctcgcttgtaatctgtttttcttgttttgtcctaccaacagctgtagattgacccaaccaaatctttatgaacgtttccacattctgcagttattcagtactacagctgaaaggtgaagtaacttatacaaaattcaacagtgctttctg

SEQ ID NO: 218814 - DNA, 637 bp, Zea Mays
tagataccatggggggagcatttgatccagctagctggcaaacaagatttggtgttaggatgcgacagggcctccctccaatgcaaaatcacattaaccatgtcaccgctgtcaattgttttcttgagtttgttcccaaaacctcttaattattattgcccacggatagtcatgttatctacataatctgattttgccactcttcagggttcggcattgtgaatagaggttcatctttgtgattaggttgccaccgccgctgctttctactcattcgacgaatgttttgcaaagaagaaatctggtttttcttaccctcgattccttcctatgatacaactaacaaaatgaaatggtacattcagcatcttctacactgcatctaagctttgaagagttacagtctcatataaaataggatggcttggactcttattatcctaggagcctggacggtttgaaagcatagaaacagagtggtgttcggtagagtttctcccaacctcactcttattctggagtctgctaatgaggaaagcgagaaatggcaagctgcaggagccaagggttatcttttctggatgctccaagccatataatttagggtggttggatccttcatggatatttttatgta

SEQ ID NO: 218815 - DNA, 955 bp, Zea Mays
ggaggcggtgttggctaaggatgcacaaaaattatacgacgcacaaaactcttccattacagtagtagagatagagaataaaaatagttgtaattggactacgggtacagaaagaagtatagaattttttttttgcaaaagagacgattgtgaaactgtgacaaatgcttcaatcttgggttccattaatcatccttataacttctttaagaaagatgtatgctatggatggaaatgttttgtttacaatagctaggactgatttacatcattacatggccttgccccctttcatccatcaccttgagtctgcaaagaagggtaacctcgtgctaactgggccatcatgggccacctcggcatacagtccaattgccttcaccctctacctccatgatggcagcccgcaagccggagaagccgctgaggacgacgaggacatcgggaggataatctgcgactgcatcgacggtgacttctccaactacaacagggccatagtcgagactgtccaaacgggctatggccccgctgaagtgatctatgccgtcctgagcaacggcgtccaaggccgggtcgccatcaaacttgctcgcctgccagtgtccaaagctggagaagaagacgccaccgccattctcgggaggattgttgctcgcagcaagctgttcgacgtcggctgcgtgctcttctacaaagagggtgacaatggagtgagcgtgcgaccgggggggctgattcagttggcgagggaagcgctcgccgtgccgctgcacatgccgctgacgattgagcttgacctgcatcgctgttcgggcgatgaaattgttggaggggtccttgagttcaatcctgcgaccaacggccagcacacggaacgacttgttggagaaaatggcgctgaattggaagtgacaatttcatggtcgcagtacccttgtcttgcacacagagc

SEQ ID NO: 218816 - DNA, 830 bp, Zea Mays
acccgaccagggatggacgtaaactcgtaagctaccgagggtagggataatcgtccaggtcttattgttgtttaaagccgccccgccacagcaggcaggttagttcctgtgtcgttgctgccggagagttcttggcgaagagaccttaggataagttgctaaaacaaacggaggggaggatcgacccgttcagtagaattccgaagaaagactgttggcagcaggtggagacatttctttggcccccttccaaataaatgcgggcagggtagagctcggcagagggttcgagaatagggtagggtcctgtcctaataaagataaataaaggggcgggtccctttatgcatgcatcttcgtacaagtggaggccggaaagatcaaatcaatagaaccgctcacatcacagtagtcgtagttgcgtaaaggccatggggggcaaccataacataaggcaatgactttcacggatctctctctatctatagatataacgaacgggcgggttcgaaaggtagggttttttacggtcgggtcccctaccactagtctggctagccttcttcgggcaggaagcaggccgggcccgacgggcgggcatctcccacaacgcaagctacattgttcgccaccacccgagaagcaaaagattcgagagtcaaggcagaaaagacaagcatagtggtctaatgacaagggccgacgacggaagctcgggacggagccgtatgatgcggaagtctcacgtacggttccctgagaagggagtggctacccactggagcttcgaccaaccaccaccggtcaattccgctttggggccacccctg

SEQ ID NO: 218817 - DNA, 922 bp, Zea Mays
tccgagtgctcttttctttgcagccgctaccagagccttctggaccggggatgaatcgaccggagagaatgagagaagtcaggggacgaatcgaccggagagaatgagagaagtcaggggaggaatcgtctccgtcgtgccgccatcttctccactaagttgacgccggtcgctagtcgccgctctcgacgtcccccctcctccgtcgtccactgcccttggcactacaccagtgtcgtccgccgcatcatcgttcctgcttcgccgcatactcgccgcgccgtcgccgacaaggaccatccgggctgaggcctgctaaaatctccaccacttctctgactacttcgtcatctcctccacgttcgacatagatacaaatgtcttttcccccatcggagctgagtacatccgagtgtcctcactgataggattgttaatggcgtccggtcaaaaataagttagctataccatcctcaccctcggagctccgtacatgcgagtgtcctcgctgttagggtccacatgtacggatgtctttttccttatcagagctccatacacctgctcgaaattggcttcatcaacttcaacatatttactcaagggaaaaaaggctgcttgattaagagtaaagaagaagacgaagaaagcgaagaaatgagaaaaggctgaagcttaggtgaaccattaggccgaagggactttcgtattttggaatgaacacttatgcagttaaactactgcttattgtaatatagcattttactctttgtagtgttttcccttttttactctaaatgcttttgttgtgtgtgaaaccaagtatttctagtattttgaggcgaaggcgaaaaacaccttgccttcttttcactcgaaaaaagcccccaaagcttacacttaatggccttctgcattatgt

SEQ ID NO: 218818 - DNA, 969 bp, Zea Mays
tccgagtgctcttttctttgcagccgctaccagagccttctggaccggggatgaatcgaccggagagaatgagagaagtcaggggacgaatcgaccggagagaatgagagaagtcaggggaggaatcgtctccgtcgtgccgccatcttctccactaagttgacgccggtcgctagtcgccgctctcgacgtcccccctcctccgtcgtccactgcccttggcactacaccagtgtcgtccgccgcatcatcgttcctgcttcgccgcatactcgccgcgccgtcgccgacaaggaccatccgggctgaggcctgctaaaatctccaccacttctctgactacttcgtcatctcctccacgttcgacatagatacaaatgtcttttcccccatcggagctgagtacatccgagtgtcctcactgataggctatcagtcgtccgttcatttcacgtaggaccttcctgtgcttccagattgttaatggcgtccggtcaaaaataagttagctataccatcctcaccctcggagctccgtacatgcgagtgtcctcgctgttagggtccacatgtacggatgtctttttccttatcagagctccatacacctgctcgaaattggcttcatcaacttcaacatatttactcaagggaaaaaaggctgcttgattaagagtaaagaagaagacgaagaaagcgaagaaatgagaaaaggctgaagcttaggtgaaccattaggccgaagggactttcgtattttggaatgaacacttatgcagttaaactactgcttattgtaatatagcattttactctttgtagtgttttcccttttttactctaaatgcttttgttgtgtgtgaaaccaagtatttctagtattttgaggcgaaggcgaaaaacaccttgccttcttttcactcgaaaaaagcccccaaagcttacacttaatggccttctgcattatgt

SEQ ID NO: 218819 - DNA, 1047 bp, Zea Mays
tccgagtgctcttttctttgcagccgctaccagagccttctggaccggggatgaatcgaccggagagaatgagagaagtcaggggacgaatcgaccggagagaatgagagaagtcaggggaggaatcgtctccgtcgtgccgccatcttctccactaagttgacgccggtcgctagtcgccgctctcgacgtcccccctcctccgtcgtccactgcccttggcactacaccagtgtcgtccgccgcatcatcgttcctgcttcgccgcatactcgccgcgccgtcgccgacaaggaccatccgggctgaggcctgctaaaatctccaccacttctctgactacttcgtcatctcctccacgttcgacatagatacaaatgtcttttcccccatcggagctgagtacatccgagtgtcctcactgatagggtttgcaaatacatatgccttttctcaattggaactccgtacacctgctcgcacttgattatttctcattgcagctatcagtcgtccgttcatttcacgtaggaccttcctgtgcttccagattgttaatggcgtccggtcaaaaataagttagctataccatcctcaccctcggagctccgtacatgcgagtgtcctcgctgttagggtccacatgtacggatgtctttttccttatcagagctccatacacctgctcgaaattgacaggcttcatcaacttcaacatatttactcaagggaaaaaaggctgcttgattaagagtaaagaagaagacgaagaaagcgaagaaatgagaaaaggctgaagcttaggtgaaccattaggccgaagggactttcgtattttggaatgaacacttatgcagttaaactactgcttattgtaatatagcattttactctttgtagtgttttcccttttttactctaaatgcttttgttgtgtgtgaaaccaagtatttctagtattttgaggcgaaggcgaaaaacaccttgccttcttttcactcgaaaaaagcccccaaagcttacacttaatggccttctgcattatgt

SEQ ID NO: 218820 - DNA, 1073 bp, Zea Mays
tccgagtgctcttttctttgcagccgctaccagagccttctggaccggggatgaatcgaccggagagaatgagagaagtcaggggacgaatcgaccggagagaatgagagaagtcaggggaggaatcgtctccgtcgtgccgccatcttctccactaagttgacgccggtcgctagtcgccgctctcgacgtcccccctcctccgtcgtccactgcccttggcactacaccagtgtcgtccgccgcatcatcgttcctgcttcgccgcatactcgccgcgccgtcgccgacaaggaccatccgggctgaggcctgctaaaatctccaccacttctctgactacttcgtcatctcctccacgttcgacatagatacaaatgtcttttcccccatcggagctgagtacatccgagtgtcctcactgatagggtttgcaaatacatatgccttttctcaattggaactccgtacacctgctcgcacttgattatttctcattgcagctatcagtcgtccgttcatttcacgtaggaccttcctgtgcttccagattgttaatggcgtccggtcaaaaataagttagctataccatcctcaccctcggagctccgtacatgcgagtgtcctcgctgttagggtccacatgtacggatgtctttttccttatcagagctccatacacctgctcgaaattgtaaattctaatcttagttttggaaacacaggcttcatcaacttcaacatatttactcaagggaaaaaaggctgcttgattaagagtaaagaagaagacgaagaaagcgaagaaatgagaaaaggctgaagcttaggtgaaccattaggccgaagggactttcgtattttggaatgaacacttatgcagttaaactactgcttattgtaatatagcattttactctttgtagtgttttcccttttttactctaaatgcttttgttgtgtgtgaaaccaagtatttctagtattttgaggcgaaggcgaaaaacaccttgccttcttttcactcgaaaaaagcccccaaagcttacacttaatggccttctgcattatgt

SEQ ID NO: 218821 - DNA, 941 bp, Zea Mays
tccgagtgctcttttctttgcagccgctaccagagccttctggaccggggatgaatcgaccggagagaatgagagaagtcaggggacgaatcgaccggagagaatgagagaagtcaggggaggaatcgtctccgtcgtgccgccatcttctccactaagttgacgccggtcgctagtcgccgctctcgacgtcccccctcctccgtcgtccactgcccttggcactacaccagtgtcgtccgccgcatcatcgttcctgcttcgccgcatactcgccgcgccgtcgccgacaaggaccatccgggctgaggcctgctaaaatctccaccacttctctgactacttcgtcatctcctccacgttcgacatagatacaaatgtcttttcccccatcggagctgagtacatccgagtgtcctcactgatagggaccttcctgtgcttccagattgttaatggcgtccggtcaaaaataagttagctataccatcctcaccctcggagctccgtacatgcgagtgtcctcgctgttagggtccacatgtacggatgtctttttccttatcagagctccatacacctgctcgaaattggcttcatcaacttcaacatatttactcaagggaaaaaaggctgcttgattaagagtaaagaagaagacgaagaaagcgaagaaatgagaaaaggctgaagcttaggtgaaccattaggccgaagggactttcgtattttggaatgaacacttatgcagttaaactactgcttattgtaatatagcattttactctttgtagtgttttcccttttttactctaaatgcttttgttgtgtgtgaaaccaagtatttctagtattttgaggcgaaggcgaaaaacaccttgccttcttttcactcgaaaaaagcccccaaagcttacacttaatggccttctgcattatgt

SEQ ID NO: 218822 - DNA, 872 bp, Zea Mays
tccgagtgctcttttctttgcagccgctaccagagccttctggaccggggatgaatcgaccggagagaatgagagaagtcaggggacgaatcgaccggagagaatgagagaagtcaggggaggaatcgtctccgtcgtgccgccatcttctccactaagttgacgccggtcgctagtcgccgctctcgacgtcccccctcctccgtcgtccactgcccttggcactacaccagtgtcgtccgccgcatcatcgttcctgcttcgccgcatactcgccgcgccgtcgccgacaaggaccatccgggctgaggcctgctaaaatctccaccacttctctgactacttcgtcatctcctccacgttcgacatagatacaaatgtcttttcccccatcggagctgagtacatccgagtgtcctcactgataggattgttaatggcgtccggtcaaaaataagttagctataccatcctcaccctcggagctccgtacatgcgagtgtcctcgctgttagggtccacatgcttcatcaacttcaacatatttactcaagggaaaaaaggctgcttgattaagagtaaagaagaagacgaagaaagcgaagaaatgagaaaaggctgaagcttaggtgaaccattaggccgaagggactttcgtattttggaatgaacacttatgcagttaaactactgcttattgtaatatagcattttactctttgtagtgttttcccttttttactctaaatgcttttgttgtgtgtgaaaccaagtatttctagtattttgaggcgaaggcgaaaaacaccttgccttcttttcactcgaaaaaagcccccaaagcttacacttaatggccttctgcattatgt

SEQ ID NO: 218823 - DNA, 1513 bp, Zea Mays
tccgagtgctcttttctttgcagccgctaccagagccttctggaccggggatgaatcgaccggagagaatgagagaagtcaggggacgaatcgaccggagagaatgagagaagtcaggggaggaatcgtctccgtcgtgccgccatcttctccactaagttgacgccggtcgctagtcgccgctctcgacgtcccccctcctccgtcgtccactgcccttggcactacaccagtgtcgtccgccgcatcatcgttcctgcttcgccgcatactcgccgcgccgtcgccgacaaggaccatccgggctgaggcctgctaaaatctccaccacttctctgactacttcgtcatctcctccacgttcgacatagatacaaatgtcttttcccccatcggagctgagtacatccgagtgtcctcactgatagggtttgcaaatacatatgccttttctcaattggaactccgtacacctgctcgcacttgattatttctcattgcagctatcagtcgtccgttcatttcacgtaggaccttcctgtgcttccagattgttaatggcgtccggtcaaaaataagttagctataccatcctcaccctcggagctccgtacatgcgagtgtcctcgctgttagggtccacatgtacggatgtctttttccttatcagagctccatacacctgctcgaaattggtaatttctcattgcaagtatcagtcttccattgagttcgcgtacgaggtttttgtggttccacattgttaatggtggtcagtcacaaataagtttgctataccatcatcaacctcttgaactttagttacattttgtcggaaaacatacttttggtgtgtagtgatactaattttgttgtgtcgtgctacgtatagaccatatgcttgctacaattactctaaacaatacaagtggtagctacattttctgtatacatgatgttcatggtatctcatcattgaattatccatgcattcgcttcttatggtttccttctttttaattttccagtaaattctaatcttagttttggaaacacaggcttcatcaacttcaacatatttactcaagggaaaaaaggctgcttgattaagtggagttttgattatatacttcctataacttcacctttgcttctacctgtgctcaccattgaaatacgacaacatgcattaccaaagcagtatgaaacacataacggagtaaagaagaagacgaagaaagcgaagaaatgagaaaaggctgaagcttaggtgaaccattaggccgaagggactttcgtattttggaatgaacacttatgcagttaaactactgcttattgtaatatagcattttactctttgtagtgttttcccttttttactctaaatgcttttgttgtgtgtgaaaccaagtatttctagtattttgaggcgaaggcgaaaaacaccttgccttcttttcactcgaaaaaagcccccaaagcttacacttaatggccttctgcattatgt

SEQ ID NO: 218824 - DNA, 3092 bp, Zea Mays
cgagcgatccaccgcaagggaatccaatcaaatcccccagcaagtcagccccgccccgcgccgacgcctctccccgatcccgatctgtgtgcctggctgcctgcaacctccgtgggatggaggcggcgcggcagcagcaggaggagtgcccgtgcggcggggccgaggccgctgaccagttcgagcggctccacgacgcggtgctgctcgacgtcctcaatcgcatcggcgacgtcaaggcgctcggccgctgcgccctcgtctcgcgccgcttccatgcgctcgtgccgctcgtcgactccgtcttcgtccgcgtcgactgcgtcatccctgacgacccgccgccctcgtcctcctcttccgccgcaccaggcacctcgccgcggcaggcgccagccccggccgcgcgcgggcgcggcgcgctcgcgcacatcgcgcgcgtcctgctcggcggcatcgccaggcccatccacgcgctcggccagatcctctcccccgccgccgcggccgtctcccggcgctccgaggcactgcccgcttccccgcgcgcgcccgtcgcggacgtctctcaccactccccctccgaggtgctccgctccttcaaggagctgcggcgccttcacatcgagctgcccacgggcgagctcggcattgacgacggtgtgctccttaagtggaaggccgacttcggctccaccctcgtcagctgcgtcatcctcggcgcctcgtcgatctcgtccaagccgccgacagggtacactcaggcggaatcggaaactgctgcggccgccactcccgataccagtcgggagactgaagagccggggagcctacctgattctctttatacaaatggagggctcaagcttcgcgttgtctggaccatcagctccctgattgccgcgtcggcgaggcattacttgctgcagccgattatctgtaatcacgaattgctggagagcttggacctgacagatgctgacgggcaaggggtgctcaccatggacaagaggcagctgcaggaactgcgggtgcggcccgtctttccgtcagggagctcgcaccgcaccctcatgccggctctcagtatgcgtctgcactacgcaccgctcattgagctgcctgggggaacgctgctgaagggtgcgacactagtggcgatcaaaccaagcgaagatgccttgagggagggccaaggggccggggctgcaggtcctgttggtacatgctggatttcagaggcctttgaggagccatatcggactgcggcaaaggtgcttctcaagagaagggcatattgtcttgaaatgaactcgttctgagcacctagggggtttacttccacagagttctacccttctgacaggcagctggagctaccttccatcgtattgagcaagtagagttttgtggacatccagttttcttcatcgcccctagcccctaagggctatgagtctccagaagtaagttctcaagaatctaatcatgcaatagacatttaataaatgcaggaacatgttacataatcaaatctcaaagaaacagtggttgctatatattaacatttctaggataagttcatttacaaaatggcacatatcgttgaattgcaaataaaatatgaactcttgacaaaggccctaaccgtgaacttccaaagttatgttaacactatgatggtaaatctagcagtggatgacgcacaatttccagattctcataagctgctggatgactttgttgaatccctcaggctaattagagctgcagcttcaagccttgggaagaatcaaagaaatgattaaggggctactcgaccagtgtttcctttcattgctccagtcctaaaaagattttagaattcagtattactgctaaattgtttaagcttttgtgttatgaagtgtataatttaaccaaacccaaattgatgaaacacatcggtgggttgagcaaaagatttgattgagaaaacaatcataatttttattctggaacaaaatgttgtaaaattgtaatggcaaaaactgttgtgcaagctccgcatgcaactaaattaccacaattcatggaaaagtttcaaaaaattagatgtgcttcattatttactctaccaatatattaaattctaattcatcctacattaagagatataagggctagtttgggaaccatatttttccaagggattttcattttcccaaagaaaattagttcattttcccataggaaaatagaaatcccatgggaaaatgtagttcccaaactagccctaaaaaggagaaaattccatccgttttttgtcacttgtaatagtgaacagtactttagtatgcttcacctttttactcaccatgtgtgatgggacagaatagcaaaatgtccagagtattactcggtttcctcaaagtccataagaaagtcagttaggttctcagaatcgtcaatagcttcttttagtgtcatttcatctttctttgatttttcctgcagcagaaaggaacaaatatatatatatatatatatatatgggtacatccatcaggaaagactacaaaagatgcaggttcatgtatgggatagaacatgttagtaaaattcttatgtaatctccacatttttaatcatataagcaattacagtcgtgtttgtagaggcgctaatagcgcagtggttcagcacccgaggtgtggcgctccccaccagggttcgatccctgtgctgcatggctgtgtgcccacctccctggatgaaacagcacagatggttccacggcagccaaagaagcctgctcacatgaggttcctgccttcttcccgggtttggtaggccccttcttaagactaaagtcaaggggacgtctccccccattatcaagtctttttaatttgcagccatattttcatagattgacatagtatagaccaacaacaaagtaatcggttgctgtatttgtgaaagctaacagatatgcattttttctgaccagaaaacatatgtaaactgtaccttgggcttttcagcctgtccagtagactttagagcactccaattctggttcactttctcttctacttctgcaacatcat

SEQ ID NO: 218825 - DNA, 847 bp, Zea Mays
atggatacaccatctggtgtgaagggttctattcctgcatgcatcaagttttctgtgaaggttccaggtgaaataccatactatggtatatattatgacccacctgaagagatgaagactatggaatcccctctgctgcattcaattaactgccccaaaaagacaggtaagcagcctgtgatgaagatggatatattttcgtatgactattcacctgattttggtagcgtcgcccgtgagctgcttgtacctaccaaggcctttccatcaccataattttgactcgatatgcttctaccaccgctacaacaaatgatagatctaactacattcagtacaaagcaaatcctttagcaaatttaaatatgaattcattaagattcacaaatgatatagtaaggaccatactggtattatctcttgcatgtggcaaatcttcattttttgtgtgcattagtggccaattctctgattgcatatgtccctaagattcatctatttgagaaactgatattttcacttttaagggatagccatagaacttgaggatgaacagattgatcgggctctattgaagaatgtcttggatatttttattaaaattaggttgggtcaaatggagtgtttcgagaatgactttgaagatttcttgctcaaggatactacagagtactgctttgtcaaggctcaaaggccgatgcttctttcaaaaggctgaggaatgtttgaagcgggagaaagagtgagttgaaaaggctgaggaccatgcttctttcaaaaggctgaggaatgtttgggtacaaatctgtagcacaatttctaattgctaagcataataacaaacaat

SEQ ID NO: 218826 - DNA, 5458 bp, Zea Mays
atctgcgctgctggtgctcgcctcagcccaagacacgcccatgccgagctccctgcgcgccgcggcctcccagctcctcccagccatggccgcctctctctgctcgctcggcttctagctccatggccgagctcctctgctgaacgctgctgctcggctccctgttggaactttgtcggcgccgtctagtcatgctccccgccatcgtctcacccttcctgcttgccgtgtgtgggtctacgcactagccgcgctcttctgttttctctcggcgtgcccagcgtcgcgccctcgccagccgagctcccatctcccgtgcgcgtggccatctccctgtgcccgacgcccagctcgccatggacgcgcgcagctccctcgaggttcctctccatggccgcgctccgtattcccctgccgcgtccctcaagctcgtgctctggtatatctcttcgcggccgccgttgaatcgccgaaccctatctcccatggcgctcggattttgaccttgctcgtcggtcggccgtgctggtgctagtcgcctcgctcaccgatgactccccagctagacgcatgagcttgctcatgcgtcaacctcatcatcgtctcggacatcgcatcgctgtggtgcatcagcaggacgccggagcagtatatgtgtccttgcctcgccggtccgctcttcgctatcgtcgggtgttcggtaaaaatcttgaagcaggaagtcatcatcgttcgcatgaaatttctaattgcttggatggtggtgagttaggtcgctactcctgccttttttggataagtagaacggttaaatatattagttgcgataatttccttgtcgtggttaaaatgcattgtgagacatttgctgatgtgtcacatatgcgatatatatttggattggtgatatgaaggttaggtctggtattttatttattggatagccatcatatttttcggggttatgtcagttttatttattaaggtatagtcaatgctcggctctaatagtcattattttctatattcggtgaccgattaaaccatcttagggagatgagagtgtaaattagacaaggaatgcttaggtggatgtgtaggtctggtactctgaaatcagttataggtctacaacatgaagtataacaatgatgcgtggaataggtttagtgtttccaatgactagctgatgtgttcttctcgagtaactgattctattggtttaaagtaaggctcgaactgaaacccactatcgatgtcgtagtttcgagtgaatttagtatttaacgtgtaatcaacgaaaagcttggattagtattagttaatcgatgtagtggatctaagctaaatttattattggcacgcattttgttagccgaattgttagatagtttaaataaatatgtgtggtgcaaaataaaattaaaatagttctttgtaagcaaagtggtataatttataaagcaagggataagtttaacatttaattaattagctaatgagttgggtttaggctaattgtgttaaatgtgtacagtttgttgtttcgtgatgtttgcgttagattcagttaatctagagaaacgtaatcattgcgcttagtcgtatgtcgataactagtgtttccgtatgaaatagtacaacgcctcgccgctaggtgtttaattcgctatagtgtagcattatttaggtttgtgatattcctgtttatatgcattcatgtgcattatgcaaatcatttaggtacgtttattgattacgtgatatggaggaccaaagttgagtcgaccacaagatgtcgctgcgcataagcttctccacaagatgatgttgatggacgaacctgacaatggaaatctgaatgagtgccaagacaaaggatggttgtcaagtgatcgtcgtctaacaaacactaacgtagtgtttattccaggcaagccccggtgcctgcaaccccttccttgtgtttttaaatgatttttacacactttaagtctagcgtaatgtgcattaggtttatagaagttgcttggaaaccctttgatgcattggctaccttgaaatccattccttttataaatacttctggtgaagtatcaaatatgatttacaaaattgcttagccttgcctaaaggtaaatcttgcggatagaggttgtcctttgcgttaatgccaagctcaagggttatcctgaggaaggatggcttctgcctgcaagaatattttcattgggagcaatggtgggatcttactgcaaaagttccctataatgctcttttcatcctaaggaacacaaacaatcctaaggatggaagtacttaaatcaggacttgggctaggaacaggtgatgttctacccaggttgattaaggattatagcgaatgtaggcttgttgatcgaggaccttttaactggtcacatgcctcgtcatgggtaagctttgcctcgggcagactaatatcagaagaggacaacacacaatgggagtggagagatggcaagagtagcgtgtaccctccgtggcaagaggctcgactagggatggcaatttaatccgtggatttggatatccgtcggatatccgacccgatggataaggatatggatatgttttttgacccgtgggtaagacccgtatccgatccgagataaagagggcatggatttggatattaaatctcacccacgggtaatccgttggatatccgaaattaaccattagtccattattgccagaatgaacattattatactatcattgactaaaaaattcaaacacatctactatagtgctagctcaagtgctcaacactacactcggatcggatcaatattgattgtcatgtatttgttttcatgttgagacatgtagacatgtatttttgtcatgttgagaatgttgattgttgaaggacatgtatatttgtttaatttttttattaaattttaagttgtgtatgatgttgaattgagaagaaatttgattaattatgttattcaattgctgaaaatggttcttatcatatccgatggatatccaatggatatccgaaacccgatgggcatggatatggatatgaatttctacccgtggatatagtcacgggcggatattatctatgaccgtggatatgtctgcgggtggatatttccaatatccgatccgaattcgacccgttgccatccctaggctcgacggtggtgtatcagtgctctcggttggcgtgaacccgatttggtcttaagaaccccggtggtgagttgacatatgcaagggttaagtgctacatatgtcgtgtgattagagatccccagctgggtattaatcgattcagatcgccgttacttctcggacatgaagactttgtcactgccctgcaatctaagtcatggatggaatcataatgagcaaaaatcatgttgtattgattaatgtgatgatgaaattagactagatgcaaacaaggtctattaatacttaatctagcattaaaatcttgaaagtaaggactcattttagtaagctttctgcaaactattaatgttgattcttgctaaaagcctttccttgattcccaaatccagcatatccttgagagtctttttccttagtcaggtaagtcttgctgagtacttgtgtacttaggattttattcccattgttgctgcaggttacgagtcactttgattgtgattggtgttaagcgccagtgggcatggccttctataagtctaagtacttcttctatacttcttattgaggatggtcacttaagctagcatatatttcaaaactacaaataatttataattgttcaaagttattcctttgaatcacttttgtaatcactccgatcatgcacatcgtaaaacttgatgtaacttgtaaaatttggtaataagatttccgctgcaaaatgttggtgtgtgatttgtgtttacttaatcttgtggtcctagttgtaagtggtttatccgaggtccttggggcactcggacagatcctattaagttatctggtgcacatgcatagccgtctgaggtctttgagacaaggacaggtgcatgtgggcccaataacttaggaggttctacaacaattgccgattagttggtgcctccagtagaagaataccaatagattgaatgttttgtgttgtgggttggagaatgttgtgagttcgtatgatagggtaaggtgacttactggaattggttatgccatagaaaagggaagtgtgcgttgcaaaatggtctctgtgacctttagcaataaaacacgtaatataagtgtatgtagaaattgtagacctattagtttagttagttaccttaatctcattgatgttgttttctttctcttcattttgttgatttccttccaaatttcatcccatcagttgcttcttaatctgctgatttcaggaacaagctttgtgacttattttagatttgagcagcacggtcataacattgctgccacaccagaactctttaattcttcatgctcttatggatctattttattcatatgttcgagtgaatattttctctagcaagatgccaagaaagatgatcccctaggtttacaacatcttgcactatgtcctacgcgttactggccaaacgacaacgccgtggagtgcagcaatgacaggaactacctctgtaggaaccggttcaacaagtacttcgacatcacgtgggtggagcagacttggtgggcggacaactatgactgtgttgtcgtctagcacgagcacccctcgcgcgacgtcgactatgacgatgaagattcggctgcgcccgtaaccccatgccaatccaaggacgacgagcaccaacggcaccaggcgagcggggactaggggacgactgtaggcctccccctctttctcgcctccactcacccgccaccaccccaacgacgagggagtgagagatcggcagcatctcagggcctggcagggcagctgcattgcgctgtggtggccatggctgatccatacgatgaggatatgggatcatcgctaaagagccaacagtcacaccctggcctccgccacaagcccgccattgagatatttagttatcatgtctccatgcttattttgattatacactaccttggttaattttcaatcatctccatgggtacattttttcttagttgcttaaactagcactatttcgcacaaattgtactagtacaagatttgatgtaaaattctaggcaaaaatgtatactgcaagggtggcattagtggtgaactggtgataacatgcaggcaaaggtcaccaaggagatgcaaggttcaaaatcctccctccctcatgtgtgcagttttccatgtgtcaagtagagtcagtacacaaaacatttgtgtcggcttgcagctgcttagcagtagttgggaattagccgatcgagtttgatcttgggagctatgtgatct

SEQ ID NO: 218827 - DNA, 1127 bp, Zea Mays
ctgctagcctgctaccatggtatgatcagtaacatttttctggtgccttacactgtggctgcgcgaatgactcgctctgagccttcagcggcctcctcgctcggcaaattctccgccgacgacagggagaaggtgctcactgccgttggagtacacacggcgatatctattgcacaacctacttcctagatacaggaagatggtgataaccacactgggaatcatggcaaaaatcataccaaggtcaaatagaatgggcaggcaacttgaatcgttaagcagaggactgggaatcaagattccaacccaaatcactgaagggaacaaaagccagagccacctattcaagctactaagtttgcattagagctagagggatggtcgccaaggccagggatttactgtcgaggtgtacaagtccatggcagtggctgtttgtggagattagaagctgatgagggagtctcgtagcagaacttcaatgttgagatatggaaaagctacatatgtatcaagatatgtgaagactgtccgcctcaaacaagaggagtattttggtggagcgaagtttatgaagggcatggaggtactgctggtaacaagttctggatgtcattaggtctaccattgatagctactgtgaactgtgctggtaacactggagccaagaacctctacatcatttctgtgaagggaatcaagggcgccttaacaggcgtccttctgcctgtgttggtgaccatggagaatggaaagcctaaccttaggaagaagaagcaagacaaatataaggatgctgaacctagtgcaatagatctttttaaggagatgcattgcagcaaaaagaaaggttttagcaaaaatgttcagaaagctattgttgatatggaagaaatggtggcaacatcagttcaagatggacaacaaccgaaatatcctacagaagttgtttatagtgtgcaactgggctccagtgtgttcttatgcaatcttggtctttagtccgtctccaagaaaagctcaacatcaatagtttttataaaggttcaacaacttcaggatcgactggaggccaagaagcaagaaaaagatggactttgggaagaagtgtaaaccttaaatgctca

SEQ ID NO: 218828 - DNA, 1158 bp, Zea Mays
ccaaaccctcggtgtttcataatgacaaatttctcgcccgcgaggggccggccgagtacctgagctgatcacgagtctctcagcgagtgctggagagcccactatgtccgccgccggcggcgacctgccggagactgtggaggtgacgctgcgcgccgtcggcccgtcccgtccaaccaccctccgcctccctccgcttctctcggtcgccgagctgcgcggctgcatcgcgcgcgaacgccgtctagcaggcacggaagaagttcgactccgcttgatcctgcgggggaagacgctcccgcaccaagacgacagccatgtcactctccgcgatggggatactcttatagtcgccgtggcacctaagcctcctgttaatcatcttcttgatgatgacgttgaggacgaagaagaggatgaactgaataccacaaacgacaaccttgtggaagaggaaattttttatgtttcttcgagacaaattgagattgcctgatatcattttgatggcgctgttttctctcagtatgaaagcatggattatcattgcaatgtggttcctattggcaccgattgctcagaagtacgacattggacctttatatataattggtactggtttcttgatcatacttattaatctcggaagacgacagcaaggtgatgttagtgcatactccatattcaacgaagattttagggagctgccaggaacacttaatgcagatcgcattgatgcagacatccgggcaggtcaattttaagcccttactgggcattgcagagatagggaccatggtatgctgagatttgtacagaagcgtactgggcattgcatttgtttgtgcatggaaagcagtgtggagataaaggctgtgcccctctaaggttaaggtcaaataaatttctgacctgtaagtgaaaatgttgcctggttacaattggaaattaccgtgatactttgcagatctgtacttgtgaaaccaaaagagcagagtagcttaagactggcaacaaagtgattttattcctctcttgcaagttcttgtgtccgctatgagccacaaagtcctatatagcaacttgcatttatgagtttcattcaagttaatgttggtactaaggttcttgcccaggttaagggcatgtttggccaga

SEQ ID NO: 218829 - DNA, 1154 bp, Zea Mays
aaaccctcggtgtttcataatgacaaatttctcgcccgcgaggggccggccgagtacctgagctgatcacgagtctctcagcgagtgctggagagcccactatgtccgccgccggcggcgacctgccggagactgtggaggtgacgctgcgcgccgtcggcccgtcccgtccaaccaccctccgcctccctccgcttctctcggtcgccgagctgcgcggctgcatcgcgcgcgaacgccgtctagcaggcacggaagaagttcgactccgcttgatcctgcgggggaagacgctcccgcaccaagacgacagccatgtcactctccgcgatggggatactcttatagtcgccgtggcacctaagcctcctgttaatcatcttcttgatgatgacgttgaggacgaagaagaggatgaactgaagttcagaataccacaaacgacaaccttgtggaagaggaaattttttatgtttcttcgagacaaattgagattgcctgatatcattttgatggcgctgttttctctcagtatgaaagcatggattatcattgcaatgtggttcctattggcaccgattgctcagaagtacgacattggacctttatatataattggtactggtttcttgatcatacttattaatctcggaagacgacagcaagtgcatactccatattcaacgaagattttagggagctgccaggaacacttaatgcagatcgcattgatgcagacatccgggcaggtcaattttaagcccttactgggcattgcagagatagggaccatggtatgctgagatttgtacagaagcgtactgggcattgcatttgtttgtgcatggaaagcagtgtggagataaaggctgtgcccctctaaggttaaggtcaaataaatttctgacctgtaagtgaaaatgttgcctggttacaattggaaattaccgtgatactttgcagatctgtacttgtgaaaccaaaagagcagagtagcttaagactggcaacaaagtgattttattcctctcttgcaagttcttgtgtccgctatgagccacaaagtcctatatagcaacttgcatttatgagtttcattcaagttaatgttggtactaaggttcttgcccaggttaagggcatgtttggccaga

SEQ ID NO: 218830 - DNA, 1157 bp, Zea Mays
ctcggtgtttcataatgacaaatttctcgcccgcgaggggccggccgagtacctgagctgatcacgagtctctcagcgagtgctggagagcccactatgtccgccgccggcggcgacctgccggagactgtggaggtgacgctgcgcgccgtcggcccgtcccgtccaaccaccctccgcctccctccgcttctctcggtcgccgagctgcgcggctgcatcgcgcgcgaacgccgtctagcaggcacggaagaagttcgactccgcttgatcctgcgggggaagacgctcccgcaccaagacgacagccatgtcactctccgcgatggggatactcttatagtcgccgtggcacctaagcctcctgttaatcatcttcttgatgatgacgttgaggacgaagaagaggatgaactgaagttcagaataccacaaacgacaaccttgtggaagaggaaattttttatgtttcttcgagacaaattgagattgcctgatcattttgatggcgctgttttctctcagtatgaaagcatggattatcattgcaatgtggttcctattggcaccgattgctcagaagtacgacattggacctttatatataattggtactggtttcttgatcatacttattaatctcggaagacgacagcaaggtgatgttagtgcatactccatattcaacgaagattttagggagctgccaggaacacttaatgcagatcgcattgatgcagacatccgggcaggtcaattttaagcccttactgggcattgcagagatagggaccatggtatgctgagatttgtacagaagcgtactgggcattgcatttgtttgtgcatggaaagcagtgtggagataaaggctgtgcccctctaaggttaaggtcaaataaatttctgacctgtaagtgaaaatgttgcctggttacaattggaaattaccgtgatactttgcagatctgtacttgtgaaaccaaaagagcagagtagcttaagactggcaacaaagtgattttattcctctcttgcaagttcttgtgtccgctatgagccacaaagtcctatatagcaacttgcatttatgagtttcattcaagttaatgttggtactaaggttcttgcccaggttaagggcatgtttggccaga

SEQ ID NO: 218831 - DNA, 1176 bp, Zea Mays
caaatttctcgcccgcgaggggccggccgagtacctgagctgatcacgagtctctcagcgagtgctggagagcccactatgtccgccgccggcggcgacctgccggagactgtggaggtgacgctgcgcgccgtcggcccgtcccgtccaaccaccctccgcctccctccgcttctctcggtcgccgagctgcgcggctgcatcgcgcgcgaacgccgtctagcaggcacggaagaagttcgactccgcttgatcctgcgggggaagacgctcccgcaccaagacgacagccatgtcactctccgcgatgggggtgggtgccctaaatctgaaccccttatgtcttcattggcgatatactcttatagtcgccgtggcacctaagcctcctgttaatcatcttcttgatgatgacgttgaggacgaagaagaggatgaactgaataccacaaacgacaaccttgtggaagaggaaattttttatgtttcttcgagacaaattgagattgcctgatatcattttgatggcgctgttttctctcagtatgaaagcatggattatcattgcaatgtggttcctattggcaccgattgctcagaagtacgacattggacctttatatataattggtactggtttcttgatcatacttattaatctcggaagacgacagcaaggtgatgttagtgcatactccatattcaacgaagattttagggagctgccaggaacacttaatgcagatcgcattgatgcagacatccgggcaggtcaattttaagcccttactgggcattgcagagatagggaccatggtatgctgagatttgtacagaagcgtactgggcattgcatttgtttgtgcatggaaagcagtgtggagataaaggctgtgcccctctaaggttaaggtcaaataaatttctgacctgtaagtgaaaatgttgcctggttacaattggaaattaccgtgatactttgcagatctgtacttgtgaaaccaaaagagcagagtagcttaagactggcaacaaagtgattttattcctctcttgcaagttcttgtgtccgctatgagccacaaagtcctatatagcaacttgcatttatgagtttcattcaagttaatgttggtactaaggttcttgcccaggttaagggcatgtttggccaga

SEQ ID NO: 218832 - DNA, 1183 bp, Zea Mays
aaatttctcgcccgcgaggggccggccgagtacctgagctgatcacgagtctctcagcgagtgctggagagcccactatgtccgccgccggcggcgacctgccggagactgtggaggtgacgctgcgcgccgtcggcccgtcccgtccaaccaccctccgcctccctccgcttctctcggtcgccgagctgcgcggctgcatcgcgcgcgaacgccgtctagcaggcacggaagaagttcgactccgcttgatcctgcgggggaagacgctcccgcaccaagacgacagccatgtcactctccgcgatgggggtgggtgccctaaatctgaaccccttatgtcttcattggcgatatactcttatagtcgccgtggcacctaagcctcctgttaatcatcttcttgatgatgacgttgaggacgaagaagaggatgaactgaagttcagaataccacaaacgacaaccttgtggaagaggaaattttttatgtttcttcgagacaaattgagattgcctgatatcattttgatggcgctgttttctctcagtatgaaagcatggattatcattgcaatgtggttcctattggcaccgattgctcagaagtacgacattggacctttatatataattggtactggtttcttgatcatacttattaatctcggaagacgacagcaaggtgatgttagtgcatactccatattcaacgaagattttagggagctgccaggaacacttaatgcagatcgcattgatgcagacatccgggcaggtcaattttaagcccttactgggcattgcagagatagggaccatggtatgctgagatttgtacagaagcgtactgggcattgcatttgtttgtgcatggaaagcagtgtggagataaaggctgtgcccctctaaggttaaggtcaaataaatttctgacctgtaagtgaaaatgttgcctggttacaattggaaattaccgtgatactttgcagatctgtacttgtgaaaccaaaagagcagagtagcttaagactggcaacaaagtgattttattcctctcttgcaagttcttgtgtccgctatgagccacaaagtcctatatagcaacttgcatttatgagtttcattcaagttaatgttggtactaaggttcttgcccaggttaagggcatgtttggccaga

SEQ ID NO: 218833 - DNA, 1229 bp, Zea Mays
aaatttctcgcccgcgaggggccggccgagtacctgagctgatcacgagtctctcagcgagtgctggagagcccactatgtccgccgccggcggcgacctgccggagactgtggaggtgacgctgcgcgccgtcggcccgtcccgtccaaccaccctccgcctccctccgcttctctcggtcgccgagctgcgcggctgcatcgcgcgcgaacgccgtctagcaggcacggaagaagttcgactccgcttgatcctgcgggggaagacgctcccgcaccaagacgacagccatgtcactctccgcgatggggatactcttatagtcgccgtggcacctaagcctcctgttaatcatcttcttgatgatgacgttgaggacgaagaagaggatgaactgaagttcagaataccacaaacgacaaccttgtggaagaggaaattttttatgtttcttcgagacaaattgagattgcctgatatcattttgatggcgctgttttctctcagtatgaaagcatggattatcattgcaatgtggttcctattggcaccgattgctcagaagtacgacattggacctttatatataattggtactggtttcttgatcatacttattaatctcggaagacgacagcaaggtgatgttagttctagtttgtctgggcctgtcaccagtggcggagctaaagggtggtccgtgtgtcctagcccaaaaccaagtaaactatgggtattagtgcatactccatattcaacgaagattttagggagctgccaggaacacttaatgcagatcgcattgatgcagacatccgggcaggtcaattttaagcccttactgggcattgcagagatagggaccatggtatgctgagatttgtacagaagcgtactgggcattgcatttgtttgtgcatggaaagcagtgtggagataaaggctgtgcccctctaaggttaaggtcaaataaatttctgacctgtaagtgaaaatgttgcctggttacaattggaaattaccgtgatactttgcagatctgtacttgtgaaaccaaaagagcagagtagcttaagactggcaacaaagtgattttattcctctcttgcaagttcttgtgtccgctatgagccacaaagtcctatatagcaacttgcatttatgagtttcattcaagttaatgttggtactaaggttcttgcccaggttaagggcatgtttggccaga

SEQ ID NO: 218834 - DNA, 1179 bp, Zea Mays
gcgaggggccggccgagtacctgagctgatcacgagtctctcagcgagtgctggagagcccactatgtccgccgccggcggcgacctgccggagactgtggaggtgacgctgcgcgccgtcggcccgtcccgtccaaccaccctccgcctccctccgcttctctcggtcgccgagctgcgcggctgcatcgcgcgcgaacgccgtctagcaggcacggaagaagttcgactccgcttgatcctgcgggggaagacgctcccgcaccaagacgacagccatgtcactctccgcgatgggggtgggtgccctaaatctgaaccccttatgtcttcattggcgatgtgcgagagatactcttatagtcgccgtggcacctaagcctcctgttaatcatcttcttgatgatgacgttgaggacgaagaagaggatgaactgaagttcagaataccacaaacgacaaccttgtggaagaggaaattttttatgtttcttcgagacaaattgagattgcctgatatcattttgatggcgctgttttctctcagtatgaaagcatggattatcattgcaatgtggttcctattggcaccgattgctcagaagtacgacattggacctttatatataattggtactggtttcttgatcatacttattaatctcggaagacgacagcaaggtgatgttagtgcatactccatattcaacgaagattttagggagctgccaggaacacttaatgcagatcgcattgatgcagacatccgggcaggtcaattttaagcccttactgggcattgcagagatagggaccatggtatgctgagatttgtacagaagcgtactgggcattgcatttgtttgtgcatggaaagcagtgtggagataaaggctgtgcccctctaaggttaaggtcaaataaatttctgacctgtaagtgaaaatgttgcctggttacaattggaaattaccgtgatactttgcagatctgtacttgtgaaaccaaaagagcagagtagcttaagactggcaacaaagtgattttattcctctcttgcaagttcttgtgtccgctatgagccacaaagtcctatatagcaacttgcatttatgagtttcattcaagttaatgttggtactaaggttcttgcccaggttaagggcatgtttggccaga

SEQ ID NO: 218835 - DNA, 1067 bp, Zea Mays
gagtacctgagctgatcacgagtctctcagcgagtgctggagagcccactatgtccgccgccggcggcgacctgccggagactgtggaggtgacgctgcgcgccgtcggcccgtcccgtccaaccaccctccgcctccctccgcttctctcggcacggaagaagttcgactccgcttgatcctgcgggggaagacgctcccgcaccaagacgacagccatgtcactctccgcgatggggatactcttatagtcgccgtggcacctaagcctcctgttaatcatcttcttgatgatgacgttgaggacgaagaagaggatgaactgaagttcagaataccacaaacgacaaccttgtggaagaggaaattttttatgtttcttcgagacaaattgagattgcctgatatcattttgatggcgctgttttctctcagtatgaaagcatggattatcattgcaatgtggttcctattggcaccgattgctcagaagtacgacattggacctttatatataattggtactggtttcttgatcatacttattaatctcggaagacgacagcaaggtgatgttagtgcatactccatattcaacgaagattttagggagctgccaggaacacttaatgcagatcgcattgatgcagacatccgggcaggtcaattttaagcccttactgggcattgcagagatagggaccatggtatgctgagatttgtacagaagcgtactgggcattgcatttgtttgtgcatggaaagcagtgtggagataaaggctgtgcccctctaaggttaaggtcaaataaatttctgacctgtaagtgaaaatgttgcctggttacaattggaaattaccgtgatactttgcagatctgtacttgtgaaaccaaaagagcagagtagcttaagactggcaacaaagtgattttattcctctcttgcaagttcttgtgtccgctatgagccacaaagtcctatatagcaacttgcatttatgagtttcattcaagttaatgttggtactaaggttcttgcccaggttaagggcatgtttggccaga

SEQ ID NO: 218836 - DNA, 1003 bp, Zea Mays
gagtacctgagctgatcacgagtctctcagcgagtgctggagagcccactatgtccgccgccggcggcgacctgccggagactgtggaggtgacgctgcgcgccgtcggcccgtcccgtccaaccaccctccgcctccctccgcttctctcggtcgccgagctgcgcggctgcatcgcgcgcgaacgccgtctagcaggcacggaagaagttcgactccgcttgatcctgcgggggaagacgctcccgcaccaagacgacagccatgtcactctccgcgatggggatactcttatagtcgccgtggcacctaagcctcctgttaatcatcttcttgatgatgacgttgaggacgaagaagaggatgaactgtatgaaagcatggattatcattgcaatgtggttcctattggcaccgattgctcagaagtacgacattggacctttatatataattggtactggtttcttgatcatacttattaatctcggaagacgacagcaaggtgatgttagtgcatactccatattcaacgaagattttagggagctgccaggaacacttaatgcagatcgcattgatgcagacatccgggcaggtcaattttaagcccttactgggcattgcagagatagggaccatggtatgctgagatttgtacagaagcgtactgggcattgcatttgtttgtgcatggaaagcagtgtggagataaaggctgtgcccctctaaggttaaggtcaaataaatttctgacctgtaagtgaaaatgttgcctggttacaattggaaattaccgtgatactttgcagatctgtacttgtgaaaccaaaagagcagagtagcttaagactggcaacaaagtgattttattcctctcttgcaagttcttgtgtccgctatgagccacaaagtcctatatagcaacttgcatttatgagtttcattcaagttaatgttggtactaaggttcttgcccaggttaagggcatgtttggccaga

SEQ ID NO: 218837 - DNA, 1347 bp, Zea Mays
tgttgttacttttgttctgctacttaattggattggtatttacttatacttagtaattgctaataaaattttgacctactttaaaagcaatgttcagctctaaccatcctctttgtccagtctcaacatctgtcgtggcaggaagtttcaactgcagggggtgttagattgttttgtttctatctaagtgttaagggcctacaacccaacccatataacccactagtgttgggtatgtaatactcagcccactatcaatgaattagggttttctttcttccaacatgctctattgacttcttatcaagcttctagcagctttgagctgaaccatactttctagcaaggcccaagaataaaatccatagagtggtttcatactcttcagttcttcactgtgcattgcagataaattattctcttatctgtaacttcaatttgaatagatatgttttcattggcagaccatggcatttgcattgaacaagagaagctacctcttgaggatcaaatatctcagacatggttttgtgggaaatactgtaaagagatattcatagggctgcgtagtcatgtcgggacggataatattcttgacagtgacctttcatggtccatactgagatgcaacaatgacgggcagaagctacattctgttcagaagattgcctgtttggcagaatgtaatatgaaattagcagtggctcttactctattggaggaatgtatcattcgtatggtggatcctagaactggtgtggacatgataccccatgttttatacaacaagggatcaaactttgctcgtgtggattatcagggattctatactgtaatcctggagaaaggtgataaaattttatgtgtggcttctatcagagtacatggaactaaagctgctgagcttccttttattgctacttctgtagactttcgacggcaaggaatgtgccgaattctaatgagcatcattgaaaagagttggttagcacatgggtgtcaggatttggcttcaaacctatcgaagatgctgaaaggaaacaacttcataatgtaaacttgatgttgtttcctggaacatccttactaacaaagagattggatggatttattatggccacaaaaccaggcgcggaaaaggatatacatgaagtttctggagtacctaatcttaagcgtatgcctaatgggaaagcaagtgagcatttcaaactccatgaccttgatttgtccgggacagagtttaaagctgaggtttccgtgaatggtccattcagaacactgaaacatgaatgtggttcagcagcatggtttcagtctactaagttagctgttggggaagtgtga

SEQ ID NO: 218838 - DNA, 665 bp, Zea Mays
gcagagggcacaactacaaatggggattatctccttccattcaaaacaggtgcttttcttgcaaaggcaccagttcaaccagtcattttgagatatccttacaaaagatttaatgcagcatgggattccatgtcaggggcacgtcatgtatttctgctgctctgtcaatttgtaaattacctagaggtggtccgcttaccagtttactatccttctgagcaagaaaaggatgatcctaagctctatgcaaacaatgtacggaaactgatggcagtggagggaaacttgattctttcagaccttgggctggcggagaagcgagtgtaccatgccgcactgaatggattgttgtgtcaaagctattttggataaaatttggaaatgaaagcagttagtttttcctagttgtccctgtaccattgcagtaggagaaaaaggaatcaaattttgttgtcactaatctttctcattaaagaccatctgtagataaccacaccgttttgctgcaaagatcaaatagacgttaatcaagctaggcatagcgtaaaaaatgctgttttcttactctcgtcaccgcagttcatgtgctgtgttttgagttgacatgatgtacttgatgtgtccgttgactaacatatggttgtctaacatatataatagcgttc

SEQ ID NO: 218839 - DNA, 527 bp, Zea Mays
ggattatctccttccattcaaaacaggcacgtcatgtatttctgctgctctgtcaatttgtaaattacctagaggtggtccgcttaccagtttactatccttctgagcaagaaaaggatgatcctaagctctatgcaaacaatgtacggaaactgatggcagtggagggaaacttgattctttcagaccttgggctggcggagaagcgagtgtaccatgccgcactgaatggtaatagtctagctcgtgctttacatcagaaagatgattgaaatgccatgctatcgtgcttccataatactggcttgcttgtaactgtgtgcttgcttgtgcatcgtcatggttgagaggaatgtcgtgaatatactatccggcataaatctgtaaagtaatttaccaactgtcatagttcagtaattatgttggttatactcctacatggttgggcatccgcacatttgatcctgtggtcaatccatgtgagccttttttactatcgatgttcaccaaactgaaccatctacttg

SEQ ID NO: 218840 - DNA, 446 bp, Zea Mays
tacaaatggggattatctccttccattcaaaacaggatgatcctaagctctatgcaaacaatgtacggaaactgatggcagtggagggaaacttgattctttcagaccttgggctggcggagaagcgagtgtaccatgccgcactgaatggtaatagtctagctcgtgctttacatcagaaagatgattgaaatgccatgctatcgtgcttccataatactggcttgcttgtaactgtgtgcttgcttgtgcatcgtcatggttgagaggaatgtcgtgaatatactatccggcataaatctgtaaagtaatttaccaactgtcatagttcagtaattatgttggttatactcctacatggttgggcatccgcacatttgatcctgtggtcaatccatgtgagccttttttactatcgatgttcaccaaactgaaccatctacttg

SEQ ID NO: 218841 - DNA, 639 bp, Zea Mays
gcagagggcacaactacaaatggggattatctccttccattcaaaacaggtgcttttcttgcaaaggcaccagttcaaccagtcattttgagatatccttacaaaagatttaatgcagcatgggattccatgtcaggggcacgtcatgtatttctgctgctctgtcaatttgtaaattacctagaggtggtccgcttaccagtttactatccttctgagcaagaaaaggatgatcctaagctctatgcaaacaatgtacggaaactgatggcagtggagggaaacttgattctttcagaccttgggctggcggagaagcgagtgtaccatgccgcactgaatggtaatagtctagctcgtgctttacatcagaaagatgattgaaatgccatgctatcgtgcttccataatactggcttgcttgtaactgtgtgcttgcttgtgcatcgtcatggttgagaggaatgtcgtgaatatactatccggcataaatctgtaaagtaatttaccaactgtcatagttcagtaattatgttggttatactcctacatggttgggcatccgcacatttgatcctgtggtcaatccatgtgagccttttttactatcgatgttcaccaaactgaaccatctacttg

SEQ ID NO: 218842 - DNA, 458 bp, Zea Mays
aaatgtttcaagagatatatgaaccttgcactttgtagctataaatatatgttgagagaaactctgaactattggaggaaagcaaacaccatgtttcgattttcacatgtagaattgagggcatctcaagtaacgtgggtatgaagaaggcgctacagctgccggattacctaaagccgacggagctgaagatgatgctcaatacgatcaaggtcttcctgccgattgtctttgtaagggaggcatgacacctggatgtatcatttgggagcaaactttaaacgtctacctcttttaactaagatgtatcattttcttccaaagacacgaaagtatgacacattgggtttgttaccggttagaagctcgtaagacgtcttcttgacactactacaaatcgtgttatatgagatggttaatttttagttattaagatgcttatgaagtgtccaaatttg

SEQ ID NO: 218843 - DNA, 1380 bp, Zea Mays
gaaaacaagaactcttgaattgctaaaaagaggaaagtgataactctgaaggcctcatcacattaactttttttagaacatttccgatgacatgcctttcattaagagggaactcaggttaacaaaaactggtccaaactatatattgttatccatcaccggtgcaattaaaagtgcttccaaagtagcatctatattttatgttttttatgcgtgacatgtaagaacttttggtatggaaattataaaggctctgacttgagtgagttgttcaaaaaactgaatttaagtgtttgcgctaagcgatcttttacttgcaatcttgcaccattaaaccatatttgtagatatgcggatatgccaggaagattcattgagaagcatgtttgacaaatctgaggtcctaaatcttgtggtgattattgtttgtgggtagtgttacaagaatttgggcaaccccagtcagtagctttctgcatttgtcatcatagagatttgactattaaattgaacagctgttctggtgcagagaagaaggggctgtgatctgtatctatgaccaaaacctcactgggtggccactttttgatcatggagtcttgctgttgaggatccagcatgtggtcgcgctccatctttatgaaagttcgtttgattcggttcaatctctcatcatctccttcgaagcttgctgtactgatagctgttgcaggccacggacgcatcagcattgaagcaagtactgattcctataccagataaaaataagaatggctttgttgtgatagtcgatcacgctggaattctggcctcaaggcaatggttgttggaggatcatctgctcctgcaccaagtgtcaactcaatctcgttctcgggcaaagtcggtaacccctgttacatgttgatatgagaaggatgtaacaatcatacatcgtattataaaagaagattaattatagtagattcaccacgagctaacgcaacttcgtatgattgtttcagagtttccatgctcatatgtgttattacatttttcttctataataaaagccttaaggtttgcccctatatgtatatgtttgtttgatgtgtactctatatttttttatcatttgctaggagggtctatgtggtttaaaaagatggcaaacaaattcttcaaaaacattacatcgttcttatcttcatcggcttgaaatccaaacggcagcattgtggcggccacgaaaaatgcttgaccgatcctgtcaacaaattcatgcattgcatggatcacactcagccctccagcgccatgtccgatcagaatcacctagaacaagaccggagaatgggacagcaccaggcactggagtctggaagaacacaagcgattact

SEQ ID NO: 218844 - DNA, 1088 bp, Zea Mays
tggcgtcttatgtgaaatctatagaccctgtgcaccttttagagatgcggcgttgaagggttttatggtccgtcgactccaaaacttctgcatgtgaacccagatggcagatgcttattctggaactattgggatggattttatcatgaaccatagtgcactgggaattgatttagcttctgttcatatttgttctgacagttgataagtccccatattgtcatgagagaagaaggggctgtgatctgtatctatgaccaaaacctcactgggtggccactttttgatcatggagtcttgctgttgaggatccagcatgtggtcgcgctccatctttatgaaagttcgtttgattcggttcaatctctcatcatctccttcgaagcttgctgtactgatagctgttgcaggccacggacgcatcagcattgaagcaagtactgattcctataccagataaaaataagaatggctttgttgtgatagtcgatcacgctggaattctggcctcaaggcaatggttgttggaggatcatctgctcctgcaccaagtgtcaactcaatctcgttctcgggcaaagtcggtaacccctgttacatgttgatatgagaaggatgtaacaatcatacatcgtattataaaagaagattaattatagtagattcaccacgagctaacgcaacttcgtatgattgtttcagagtttccatgctcatatgtgttattacatttttcttctataataaaagccttaaggtttgcccctatatgtatatgtttgtttgatgtgtactctatatttttttatcatttgctaggagggtctatgtggtttaaaaagatggcaaacaaattcttcaaaaacattacatcgttcttatcttcatcggcttgaaatccaaacggcagcattgtggcggccacgaaaaatgcttgaccgatcctgtcaacaaattcatgcattgcatggatcacactcagccctccagcgccatgtccgatcagaatcacctagaacaagaccggagaatgggttagcatacatatgcaccaggcactggagtctggaagaacacaagcgattact

SEQ ID NO: 218845 - DNA, 1093 bp, Zea Mays
tggcgtcttatgtgaaatctatagaccctgtgcaccttttagagatgcggcgttgaagggttttatggtccgtcgactccaaaacttctgcatgtgaacccagatggcagatgcttattctggaactattgggatggattttatcatgaaccatagtgcactgggaattgatttagcttctgttcatatttgttctgacagttgataagtccccatattgtcatgagagaagaaggggctgtgatctgtatctatgaccaaaacctcactgggtggccactttttgatcatggagtcttgctgttgaggatccagcatgtggtcgcgctccatctttatgaaagttcgtttgattcggttcaatctctcatcatctccttcgaagcttgctgtactgatagctgttgcaggccacggacgcatcagcattgaagcaagtactgattcctataccagataaaaataagaatggctttgttgtgatagtcgatcacgctggaattctggcctcaaggcaatggttgttggaggatcatctgctcctgcaccaagtgtcaactcaatctcgttctcgggcaaagtcggtaacccctgttacatgttgatatgagaaggatgtaacaatcatacatcgtattataaaagaagattaattatagtagattcaccacgagctaacgcaacttcgtatgattgtttcagagtttccatgctcatatgtgttattacatttttcttctataataaaagccttaaggtttgcccctatatgtatatgtttgtttgatgtgtactctatatttttttatcatttgctaggagggtctatgtggtttaaaaagatggcaaacaaattcttcaaaaacattacatcgttcttatcttcatcggcttgaaatccaaacggcagcattgtggcggccacgaaaaatgcttgaccgatcctgtcaacaaattcatgcattgcatggatcacactcagccctccagcgccatgtccgatcagaatcacctagaacaagaccggagaatgggttagcatacatatggacagcaccaggcactggagtctggaagaacacaagcgattact

SEQ ID NO: 218846 - DNA, 710 bp, Zea Mays
gctccctacacgtagccacgcaccgtttcaacaaaccgcatgttgtccccttcctccgcgtagcgctgcattccgcaatccgccccgaaatctctaccgctctgcgacgatggaagggaatcaattcggtgatggaaggaggcacggattgcggattacacggcctcgtttcgtccctcaatccgtcgatggagggaacatcctcggcgcccccaaccaaactgcgactattaaagaaacccgaggggagcaaccaatctgtgcggagaccgaacccatgcgccataatcctcgcatcttcactagaccccactaactaggccaaactcaagcattggcagagctattgttgttcacgctgctcctgatgatcttgtaaaggtttgtagagcagctctttttaaagttcccctccaagctgacaccccatccaccatcatcctcggcgcatcgtgtcgtgttcgctgcttgtgacgatcactgttctcttcaatcgcttcgacgacggcttaataccagctacctcattctacaagctatgaccatgtgggggaatgacagacgaatggaatttgttagagatgcaaagattctttgaaggaattttgtgattaatctgttaagttatgaggacaattcgtgccgatatgtcatccctacaaacatagaacagagacttatcgatatcgctaaaaatgattagattattg

SEQ ID NO: 218847 - DNA, 912 bp, Zea Mays
gctccctacacgtagccacgcaccgtttcaacaaaccgcatgttgtccccttcctccgcgtagcgctgcattccgcaatccgccccgaaatctctaccgctctgcgacgatggaagggaatcaattcggtgatggaaggaggcacggattgcggattacacggcctcgtttcgtccctcaatccgtcgatggagggaacatcctcggcgcccccaaccaaactgcgactattaaagaaacccgaggggagcaaccaatctgtgcggagaccgaacccatgcgccataatcctcgcatcttcactagaccccactaactaggccaaactcaagcattggcagagctattgttgttcacgctgctcctgatgatcttgtaaaggtttgtagagcagctctttttaaagttcccctccaagctgacaccccatccaccatcatcctcggcgcatcgtgtcgtgttcgctgcttgtgacgatcactgttctcttcaatcgcttcgacgacgagcaactcttttttaaataagactcgaaagagacgccgacaccccatccatgaccattcatgtgttcactgctcgtgacgatcgtcattctcttcattcgcttcaatgtagcttaataccagctacctcattctacaagctatgaccatgtgggggaatgacagacgaatggaatttgttagagtgagtgtagtacgttcgttttatgttcaaacatacattccaatcatataatacaaatttgacgctttgttctcttatgtctttgtgtgtaggatgcaaagattctttgaaggaattttgtgattaatctgttaagttatgaggacaattcgtgccgatatgtcatccctacaaacatagaacagagacttatcgatatcgctaaaaatgattagattattg

SEQ ID NO: 218848 - DNA, 2951 bp, Zea Mays
gtgcgtggcggatgtggtggtgctcgcggagggcggcgtgctgatgcgggacagggcccgcgcggccggccggggccggggccggatgcggtgcggagccacccggctggaggggataccgaaggaggacgtcaccacaggcctctatggctggtgccgctgtgagtgcgacgacgacggggtgggaggtggtcggggatacagaggaggaggagcaggaggtcgagatggagacggtgcggtgggcgatggaggtgggcgtgtgggccaggtgcctcggcgttggcctcctcgcaacggccaggcgcttccggcggaagcgcaccttctggtgaccgctggcactttctctgggtcggtgtggggccgttggggcatcgcgcacgggaggcggaggcgggggcatggccgcgccaggcgcccacactccattcttaattagtagtagggatctaagttcaagtgccacaccgctcgtcgccttcccatctcgccgcgacatgaatttctgccgccacctgctcctcgccgcggtgttcgcgctcctcctcgctgtctgcgcttctgcggcgagcaggggcgctggttccttcgacccatcccgagtggtccaactctcgtggcgccccagggcgttcctgcacaagggtttcctgtcggatgcggagtgcgaccacctcatcgcgctggccaaggacaagctggagaagtctatggtggccgataacgagtccggtaagagtgtccagagtgaggtgcgcaccagctccggcatgttcctcgagaggaagcaggatgaagtagtaacgagaatagaggagaggatatctgcttggacatttcttccaccagaaaatggcgaatccattcagatattacactaccagaatggtgagaaatatgaaccccactacgactacttccatgacaaaaaaaatcaagccttgggtggccatcgcatcgccactgtgctgatgtacctctctaatgttgagaagggtggagagaccatcttccccaatgcagaggggaagctattacaaccgaaggacaacacttggtctgattgtgcaagaaatggatatgcagttaaaccggtaaagggtgatgccctgctgttcttcagcctccatcctgatgcaacgacagactctgacagcttgcacggtagctgccccgtaatcgaaggccagaagtggtccgcaactaaatggatccatgtgaggtcatttgacctccctgtgaagcagccgggttcctctgacggatgcgaggacgacaatatcctctgcccccagtgggcagctgtgggtgagtgtgccaagaaccctaactacatggtggggaccaaggaagctcctggcttctgccggaagagctgcaaagtatgcgcagagtaaggtagtagcctgctgtctgatatgtgtcatggcgtgttgcgtagtagtctgctgtttggataccgactggagtatagcatgtatgaagtagaacccggaagaaggaatcgtacgagagccgagttatctgataacttgtctcttgtgggaaatgaaagcgttccttaattaagcgaggaggtgctttgtggtgtccttatacgtgttgagctgttctccagttgcgtagggcgtgattgccaaaacgtagcccagtgggtggccgagggttgtgtgaaataacttttgcctttatgttcttagctgttgggtgcagaaagatgcacgttgctgacacgaaggagaacagtccccgcccgcccccccttttcacttcaccttgtgtgaccttgcattcaattccggttggtacaataaagccattgctataatatatagtagatgtgaccaatacaaggagaaaaattacagcccattgccaagcatcatcacaatgaatatactactagtagtattaattctgcagcaaagacacatcacaataacccaattttcttttccttttttcgatcatcgaccttgttgttatattagcagccattgggtttcttggccggcgccggcggcttgggggtggccaccaccccgtcgttgcctgcgagcgccaggtacttgtccttcctggtgaggcttgtgcactcgtaggagagcgtggcggcgattagcctctggatgtagttggccacctcgtggcttgtcctgccgccggcgcaggtgagctcgggcgggagcttgttgaggaaggtgacgacgtatgccgggctggggttcatgaagaagtagaatgggtccatccccttccaccccctggccgttgtgccgtggaacatgctcatccggttctccatggccacgggcaccacctcgtgggtgagctccgcgaagagcgccgagaagcgcagcaggaagggctcccggcacgtggtcccctcggggcagatgacgaggtcgccctccgccagcaggtcccggatcatggcggcgtcggaggcgcggtcccgcgtgaggcgcaccgtccggatgggcgagaggaactcggagaggcgcgagagcgagtaggtgaccgccgccacggggcgccccagcgcggtggacaggaagatggggtccagcagcgtccggtgcgagcaggcgaagaggacgcccctccggcccgtggcgcgctcggcgcgcggcggcggcggggcgccccggacgtgcacgcgcacgcccagcgcccagaaggcgtagtacaccagcggcatgggcagcagcgcccccgccgcgatgcgcaggcaggcgagcgcgaagcccacggggaaccacagcacgaccagcagcgccgccagcggcgtcggccggcgcaccaggcggccgtcgtggaagatgaccgggcgaggcagctggtccatgggcaatggctccaccggcgcgcgcgggacgatgtacgcctcctgcagttttgcatgccatgcaggcgcccacagccttgcacatgctcatgaaggggta

SEQ ID NO: 218849 - DNA, 3283 bp, Zea Mays
gtgcgtggcggatgtggtggtgctcgcggagggcggcgtgctgatgcgggacagggcccgcgcggccggccggggccggggccggatgcggtgcggagccacccggctggaggggataccgaaggaggacgtcaccacaggcctctatggctggtgccgctgtgagtgcgacgacgacggggtgggaggtggtcggggatacagaggaggaggagcaggaggtcgagatggagacggtgcggtgggcgatggaggtgggcgtgtgggccaggtgcctcggcgttggcctcctcgcaacggccaggcgcttccggcggaagcgcaccttctggtgaccgctggcactttctctgggtcggtgtggggccgttggggcatcgcgcacgggaggcggaggcgggggcatggccgcgccaggcgcccacactccattcttaattagtagtagggatctaaggttagttatttaattttgacgactcacctggtcaacccctccgttcttcgctagggactcgggtcctcgcattggcgggtccgctgtcaccggcagttctgacataacacaccgcttcttccccagttcaagtgccacaccgctcgtcgccttcccatctcgccgcgacatgaatttctgccgccacctgctcctcgccgcggtgttcgcgctcctcctcgctgtctgcgcttctgcggcgagcaggggcgctggttccttcgacccatcccgagtggtccaactctcgtggcgccccagggcgttcctgcacaagggtttcctgtcggatgcggagtgcgaccacctcatcgcgctggccaaggacaagctggagaagtctatggtggccgataacgagtccggtaagagtgtccagagtgaggtgcgcaccagctccggcatgttcctcgagaggaagcaggatgaagtagtaacgagaatagaggagaggatatctgcttggacatttcttccaccagaaaatggcgaatccattcagatattacactaccagaatggtgagaaatatgaaccccactacgactacttccatgacaaaaaaaatcaagccttgggtggccatcgcatcgccactgtgctgatgtacctctctaatgttgagaagggtggagagaccatcttccccaatgcagaggggaagctattacaaccgaaggacaacacttggtctgattgtgcaagaaatggatatgcagggtatagtttctttagctcggcgctgcacatcatcttgcacggtagctgccccgtaatcgaaggccagaagtggtccgcaactaaatggatccatgtgaggtcatttgacctccctgtgaagcagccgggttcctctgacggatgcgaggacgacaatatcctctgcccccagtgggcagctgtgggtgagtgtgccaagaaccctaactacatggtggggaccaaggaagctcctggcttctgccggaagagctgcaaagtatgcgcagagtaaggtagtagcctgctgtctgatatgtgtcatggcgtgttgcgtagtagtctgctgtttggataccgactggagtatagcatgtatgaagtagaacccggaagaaggaatcgtacgagagccgagttatctgataacttgtctcttgtgggaaatgaaagcgttccttaattaagcgaggaggtgctttgtggtgtccttatacgtgttgagctgttctccagttgcgtagggcgtgattgccaaaacgtagcccagtgggtggccgagggttgtgtgaaataacttttgcctttatgttcttagctgttgggtgcagaaagatgcacgttgctgacacgaaggagaacagtccccgcccgcccccccttttcacttcaccttgtgtgaccttgcattcaattccggttggtacaataaagccattgctataatatatagtagatgtgaccaatacaaggagaaaaattacagcccattgccaagcatcatcacaatgaatatactactagtagtattaattctgcagcaaagacacatcacaataacccaattttcttttccttttttcgatcatcgaccttgttgttatattagcagccattgggtttcttggccggcgccggcggcttgggggtggccaccaccccgtcgttgcctgcgagcgccaggtacttgtccttcctggtgaggcttgtgcactcgtaggagagcgtggcggcgattagcctctggatgtagttggccacctcgtggcttgtcctgccgccggcgcaggtgagctcgggcgggagcttgttgaggaaggtgacgacgtatgccgggctggggttcatgaagaagtagaatgggtccatccccttccaccccctggccgttgtgccgtggaacatgctcatccggttctccatggccacgggcaccacctcgtgggtgagctccgcgaagagcgccgagaagcgcagcaggaagggctcccggcacgtggtcccctcggggcagatgacgaggtcgccctccgccagcaggtcccggatcatggcggcgtcggaggcgcggtcccgcgtgaggcgcaccgtccggatgggcgagaggaactcggagaggcgcgagagcgagtaggtgaccgccgccacggggcgccccagcgcggtggacaggaagatggggtccagcagcgtccggtgcgagcaggcgaagaggacgcccctccggcccgtggcgcgctcggcgcgcggcggcggcggggcgccccggacgtgcacgcgcacgcccagcgcccagaaggcgtagtacaccagcggcatgggcagcagcgcccccgccgcgatgcgcaggcaggcgagcgcgaagcccacggggaaccacagcacgaccagcagcgccgccagcggcgtcggccggcgcaccaggcggccgtcgtggaagatgaccgggcgaggcagctggtccatgggcaatggctccaccggcgcgcgcgggacgatgtacgcctcctgcagttttgcatgccatgcaggcgcccacagcatgcgtgcgtcaataatggcgaattaacatttaaaaaaagaacccgtactgctgttactactaccagcacaatgaatacaattgaagaggagcgcagctaccaccgtgtgccatcagttgttcatatagaacccaaattacttctgtacggttattgactgtacgtacaccattgcgttggacgtctagctacatggcagtggaacgaacctttgtcaaaattcttcttcttctcattgtctattggacagcaggggcactaggca

SEQ ID NO: 218850 - DNA, 894 bp, Zea Mays
ccggtgatgatggcaccttgccacgacgattgtgcacccttcctcttcattgtttcgcaagtgagatgctctatctctaccgagttttctcccggctacgcgttgccaaaccgcgcagagcgaaaccgttgccgccgcatccattcgatggagcgggggccacaaccgacacgatcgtgcgcggaggaagcgtcatgccctgcgcttgcgctggagacctggagcgagcgagccaaatctgcacagctgcggttcagtggcgaaccaacaaaggggagagggggtgcgcagcgtacagccaggaaagccatcgccgatttctttacaggctgcaggcctttatttccgaggtcagcgcatttggcaggccgctatggatgacctaatggcccaaggaatgcgttatgctaatcaggcccttctttctggatgctctgccggtggtgtttctaccatacttcactgtgatgaattccatggattgtttatttccttttttgttttttgactgattttggactctaaaactccaataatctaatgcattcgaaattagacttttaatattaattaaattttatcattgtacatcactagtaatgtaagattaacatagtcatttgtttatgatataaatatttttaacattttatatgatgtacttcagtttttagtatattatttaatgtttaatcacttgtaattagtgagatgacagaatgattgacattgtagacaacttttgtttcgtgtgagaggagtttgtttttcctacatgaatatttgactggatcaaaccctagctatatataaagggagctgtttccccgcagctttcattcgcgcatggatttagcgatgatccctattgtgttcagctgattttacaagaaa

SEQ ID NO: 218851 - DNA, 462 bp, Zea Mays
atgcctcctggctcgccgtcgtcgcccacagaccccacctcttccaaggtggttcctccgcctagttactgtagtcatggctcccctgccatcattctctccttcctctattgtctccttcctccagacagagaggcggcactggtacaggtgctaccgggcgaggtggagcctaatcgcatcccatggaggaccaccctccaatggatccaggacgtgaggcaccaaatcaatggagaaaaacaagaatcgtgactgcaatggcaaatggaaggtgaaggcccttttgattgacaacttaggaaaagatggaatggaactcaaattttgatggtcggtcaagtgtgtagacttgaaatcatatatacctagttaggctcaactttagcgcaaactgttggtgaccatgttttttagttagtattttagtttggatttagagtacacttatgtatgagttat

SEQ ID NO: 218852 - DNA, 559 bp, Zea Mays
atgcctcctggctcgccgtcgtcgcccacagaccccacctcttccaaggtggttcctccgcctagttactgtagtcatggctcccctgccatcattctctccttcctctattgtctccttcctccagacagagaggcggcactggtacaggtgctaccgggcgaggtggagcctaatcgcatcccatggaggaccaccctccaatggatccaggacgtgaggcaccaaatcaatggagccgcgcaggtggtaccagcgaggtggagcccggtcgcatcccatggaggacaaccttccaattgatccagggcgtgaggcaccaattcagtggagagaaaaacaagaatcgtgactgcaatggcaaatggaaggtgaaggcccttttgattgacaacttaggaaaagatggaatggaactcaaattttgatggtcggtcaagtgtgtagacttgaaatcatatatacctagttaggctcaactttagcgcaaactgttggtgaccatgttttttagttagtattttagtttggatttagagtacacttatgtatgagttat

SEQ ID NO: 218853 - DNA, 1018 bp, Zea Mays
atgcctcctggctcgccgtcgtcgcccacagaccccacctcttccaaggtggttcctccgcctagttactgtagtcatggctcccctgccatcattctctccttcctctattgtctccttcctccagacagagaggcggcactggtacaggtgctaccgggcgaggtggagcctaatcgcatcccatggaggaccaccctccaatggatccaggacgtgaggcaccaaatcaatggaggtaagtggcgtcggatctggcagtttccatgtcgtccccccatctcctggctcgccgctgtcgatcccccaaattttccagggtcgtttctccgcctagcaaccacagccacgactcccctgacatcattctctccctcctctgttgtcttcgtttcccttctctgctgctgggagagagaggtggcacagccgcgcaggtggtaccagcgaggtggagcccggtcgcatcccatggaggacaaccttccaattgatccagggcgtgaggcaccaattcagtggagaggtaagcgacgccggatctggcagctttcaggttgtcccccctcccccagcgcgcagacacattctcctgcaagcatcgtcgagctcaattttcaggatgtcatgtgactaataccagcaggcagcagactaggtttagtcagatggcagtagagcgtgtctacttcttgattgggttgtttcctttactgagggtctagagaacttggttgcatatgctagaatgctacatggtatctgtgctcactaatagtccaaggttttcttagaaaaacaagaatcgtgactgcaatggcaaatggaaggtgaaggcccttttgattgacaacttaggaaaagatggaatggaactcaaattttgatggtcggtcaagtgtgtagacttgaaatcatatatacctagttaggctcaactttagcgcaaactgttggtgaccatgttttttagttagtattttagtttggatttagagtacacttatgtatgagttat

SEQ ID NO: 218854 - DNA, 569 bp, Zea Mays
cagatgcctcctggctcgccgtcgtcgcccacagaccccacctcttccaaggtggttcctccgcctagttactgtagtcatggctcccctgccatcattctctccttcctctattgtctccttcctccagacagagaggcggcactggtacaggtgctaccgggcgaggtggagcctaatcgcatcccatggaggaccaccctccaatggatccaggacgtgaggcaccaaatcaatggagagaggtggcacagccgcgcaggtggtaccagcgaggtggagcccggtcgcatcccatggaggacaaccttccaattgatccagggcgtgaggcaccaattcagtggagagaaaaacaagaatcgtgactgcaatggcaaatggaaggtgaaggcccttttgattgacaacttagatggaatggaactcaaattttgatggtcggtcaagtgtgtagacttgaaatcatatatacctagttaggctcaactttagcgcaaactgttggtgaccatgttttttagttagtattttagtttggatttagagtacacttatgtatgagttat

SEQ ID NO: 218855 - DNA, 551 bp, Zea Mays
atgcctcctggctcgccgtcgtcgcccacagaccccacctcttccaaggtggttcctccgcctagttactgtagtcatggctcccctgccatcattctctccttcctctattgtctccttcctccagacagagaggcggcactggtacaggtgctaccgggcgaggtggagcctaatcgcatcccatggaggaccaccctccaatggatccaggacgtgaggcaccaaatcaatggagccgcgcaggtggtaccagcgaggtggagcccggtcgcatcccatggaggacaaccttccaattgatccagggcgtgaggcaccaattcagtggagagagcgtgtctacttcttgattgggttgtttcctttactgagggtctagagaacttggttgcatatgctagaatgctacatggtatctgtgctcactaatagtccaaggttttcttaggacatccaacatgatatactgggaaggaaaagatttttacacccttgtgaattcgagccactttttcatcaaattctgctagaagcattacttttgcact

SEQ ID NO: 218856 - DNA, 1033 bp, Zea Mays
atgcctcctggctcgccgtcgtcgcccacagaccccacctcttccaaggtggttcctccgcctagttactgtagtcatggctcccctgccatcattctctccttcctctattgtctccttcctccagacagagaggcggcactggtacaggtgctaccgggcgaggtggagcctaatcgcatcccatggaggaccaccctccaatggatccaggacgtgaggcaccaaatcaatggagagaggtggcacagccgcgcaggtggtaccagcgaggtggagcccggtcgcatcccatggaggacaaccttccaattgatccagggcgtgaggcaccaattcagtggagagagcgtgtctacttcttgattgggttgtttcctttactgagggtctagagaacttggttgcatatgctagaatgctacatggtatctgtgctcactaatagtccaaggttttcttaggtaaattagctattgttttcctttaaaaactttgtcccaaaatgattcaagactggtatttggttggtttaattaattatatcttgtacattctctgtgaggggtacaactaagaacctcaaaaagaatagcgaacaagtaattggtcatgcattatgttgttagtcattgtatgctcagttaactactcattttccacctatagaagaaagttctttaataggaagctaaccctcttactttgttgcgaggctttttcaatatttgacaagttcagtaagttaggtgtttttattttggagtctgtaggtacgtaatgcttatgtactgttttagttgactagtgataaaagttttaactgatattaacattgacaatacatgggtgatagatgaggctaagcatctaatttttattcctgtcaaagtttttattaatcatcatcagtttgaattctttctgtcttaggacatccaacatgatatactgggaaggaaaagatttttacacccttgtgaattcgagccactttttcatcaaattctgctagaagcattacttttgcact

SEQ ID NO: 218857 - DNA, 697 bp, Zea Mays
atgcctcctggctcgccgtcgtcgcccacagaccccacctcttccaaggtggttcctccgcctagttactgtagtcatggctcccctgccatcattctctccttcctctattgtctccttcctccagacagagaggcggcactggtacaggtgctaccgggcgaggtggagcctaatcgcatcccatggaggaccaccctccaatggatccaggacgtgaggcaccaaatcaatggagggtcgtttctccgcctagcaaccacagccacgactcccctgacatcattctctccctcctctgttgtcttcgtttcccttctctgctgctgggagagagaggtggcacagccgcgcaggtggtaccagcgaggtggagcccggtcgcatcccatggaggacaaccttccaattgatccagggcgtgaggcaccaattcagtggagaggtaagcgacgccggatctggcagctttcaggttgtcccccctcccccagcgcgcagacacattctcctgcaagcatcgtcgagctcaattttcaggatgtcatgtgactaataccagcaggcagcagactaggtttagtcagatggcagtaggacatccaacatgatatactgggaaggaaaagatttttacacccttgtgaattcgagccactttttcatcaaattctgctagaagcattacttttgcact

SEQ ID NO: 218858 - DNA, 1020 bp, Zea Mays
atgcctcctggctcgccgtcgtcgcccacagaccccacctcttccaaggtggttcctccgcctagttactgtagtcatggctcccctgccatcattctctccttcctctattgtctccttcctccagacagagaggcggcactggtacaggtgctaccgggcgaggtggagcctaatcgcatcccatggaggaccaccctccaatggatccaggacgtgaggcaccaaatcaatggagccgcgcaggtggtaccagcgaggtggagcccggtcgcatcccatggaggacaaccttccaattgatccagggcgtgaggcaccaattcagtggagagagcgtgtctacttcttgattgggttgtttcctttactgagggtctagagaacttggttgcatatgctagaatgctacatggtatctgtgctcactaatagtccaaggttttcttaggtaaattagctattgttttcctttaaaaactttgtcccaaaatgattcaagactggtatttggttggtttaattaattatatcttgtacattctctgtgaggggtacaactaagaacctcaaaaagaatagcgaacaagtaattggtcatgcattatgttgttagtcattgtatgctcagttaactactcattttccacctatagaagaaagttctttaataggaagctaaccctcttactttgttgcgaggctttttcaatatttgacaagttcagtaagttaggtgtttttattttggagtctgtaggtacgtaatgcttatgtactgttttagttgactagtgataaaagttttaactgatattaacattgacaatacatgggtgatagatgaggctaagcatctaatttttattcctgtcaaagtttttattaatcatcatcagtttgaattctttctgtcttaggacatccaacatgatatactgggaaggaaaagatttttacacccttgtgaattcgagccactttttcatcaaattctgctagaagcattacttttgcact

SEQ ID NO: 218859 - DNA, 999 bp, Zea Mays
ccacgattcacggtctcccggttggattccccggcaagcggccgcgcccggagccggaacccaaccgacgagttcttccacccacgcgacggcgacactgccaccgcgctcggaggcgctgaagccagccgagaggcggggcccggccccccggcgactagtaggcagccacagccaaccactcgaagtgttcggttccacttccacgttcagtctgaaaacagggacccttgaatgaagaattcaaatgaagagaagaaacctaaggaaaggagagcagaacaagattggtacctttgctgtgcctggccccactgttagctctctgaagagttaaagctgcgacggaggctacaacgacaaagcctaatctcacaagcatgactccgttcactcatcactctgctggcctcaaccggcaggagggccgagacggggagccccctctactcatcaaaaaatggtgacccggagttagagcagcagggaggaaagaacgcctcttcgtggctgctgctttggcccggccgtgaagtacagagcgaaagacttgtggcttggaagccggtaggcccatttgctatgcacgggatgacgagaatgggtggtgctggcctgctgggtatcacaagaaaaatgacgaggggagttatcaggctcacaggatggagcatgtcgttaccctgacatggatcagtctagatttgtttcatccaaagcaatactggatttttttttcttgtttcactgtatacgctggaaaactaggacagattttgactgggcgtaattggaataactgacctagttaactgctactgcctctttcctgaattataaggtgttctagaggcgcatagaaagagctaaaagcctaaacatcttataatttagaactcatggcactatttacctccggtttaaattcaaatactgttttattatattagaagaatattttgttgcataaactgaattgcttgccatggtaggcgcgct

SEQ ID NO: 218860 - DNA, 688 bp, Zea Mays
cggccgcgcccggagccggaacccaaccgacgagttcttccacccacgcgacggcgacactgccaccgcgctcggaggcgctgaagccagccgagaggcggggcccggccccccggcgactagtaggcagccacagccaaccactcgaagtgttcggttccacttccacgttcagggaggaaagaacgcctcttcgtggctgctgctttggcccggccgtgaagtacagagcgaaagacttgtggcttggaagccggtaggcccatttgctatgcacgggatgacgagaatgggtggtgctggcctgctgggtatcacaagaaaaatgacgaggggagttatcaggctcacaggatggagcatgtcgttaccctgacatggatcagtctagatttgtttcatccaaagcaatactggatttttttttcttgtttcactgtatacgctggaaaactaggacagattttgactgggcgtaattggaataactgacctagttaactgctactgcctctttcctgaattataaggtgttctagaggcgcatagaaagagctaaaagcctaaacatcttataatttagaactcatggcactatttacctccggtttaaattcaaatactgttttattatattagaagaatattttgttgcataaactgaattgcttgccatggtaggcgcgct

SEQ ID NO: 218861 - DNA, 607 bp, Zea Mays
cttctccccaaaagaacctctcaggacctgggatctccagcgaatgcgacgtcgaaactgtcggccgtgcgtcctctctcctcgtgcgctccgcccgtctccacagttggtgcaggtcgctgaaacacttgcaacagacagagcttgcttttgaagtgctatagcacctaaaggatcagtggaaggatatctaatgtagagttaatttgaaaagattgcatctacttcttcaacaggttacgagtataacttaattaaaaaataatgaatccccaaacgacagatgcagaaagcagcaacaacaaacgcgtgaacaaaaggaaacacaactcttttactccgtatataccactacccacaaatgttgtagaagcacggaaaacccgaagagtgttacctaaccaaaatagactcggcagaagagactcaatgatgactacaacgacgacttcacagtgtgcctatttcaccaatgagtacatacaatcacttaaagaccaactagcattgatattactgatgcagaaaacgacgatatcgacgaaggaaacatagaggttcaaacatggacctctgcgcatcaaagaaaagccggacaccagacctt

SEQ ID NO: 218862 - DNA, 546 bp, Zea Mays
cttctccccaaaagaacctctcaggacctgggatctccagcgaatgcgacgtcgaaactgtcggccgtgcgtcctctctcctcgtgcgctccgcccgtctccacagttggtgcaggtcgctgaaacacttgcaacagacagagcttgcttttgaagtgctatagcacctaaaggatcagtggaaggatatctaatgtagagttaatttgaaaagattgcatctacttcttcaacaggttacgagtataacttaattaaaaaataatgaatccccaaacgacagatgcagaaagcagcaacaacaaacgcgtgaacaaaaggaaacacaactcttttactccgtatataccactacccacaaatgttgtagaagcacggaaaacccgaagagtgttacctaaccaaaatagactcggcagaagagactcaatgatgactacaacgacgacttcacagtgtgcctatttcaccaatgagtacatacaatcacttaaaggttcaaacatggacctctgcgcatcaaagaaaagccggacaccagacctt

SEQ ID NO: 218863 - DNA, 1181 bp, Zea Mays
cactgactcgcgcaagttgcgagcacgatactagtttctatataatagagccggacgcaagaggttgcaaacccatgcgccatgttaacctttttttcttagccacacgttcgtcatccaacgttcatctttcgatgtccacaagccgacctccaaaacacgggagccttctagaagaagctcctgcctcgctgcgctcgttgccttccttttcttcgctcgtggccaggtgtcaagtgaggcccgcacggcggacgaagacaaggtgcgtgtgcttctggcgctacggggccgtgcgctggaacggacggccgccagcacccatcgtggtcgcctgaccacgccccatgcgtgttagcaccttacaaggagatttgagggcgccacgtgtgatgcccgctgtgccgtcgccaacatctcactgcaggggaagtatctcgacggcacgctccacctgccctcccatggatccgcccctggccggccactacctcaactacaacacgctctagcggcatccagcaggagctggctgcggatcccgcaaacggtgccaagaccgtgcgcaagccggtcttcaccaccgtcaaccagttgcgcccccagatgcatggccacactcttgtcgtctgcgtcgtctccgcccacaccatcatcgacaaatcttccatgcacattggtcgcacctgcatcgccaagtgcctcgtcggatacaacaccgacaccgtcctcatcacacccgcaacaattaggagcctgacggaggctaagggagaggaatcagtagagcaaatcagcaagatgagacagatgtgtagctgctggtgtttctccactatcgcgacctcactgctcaagcatggcctatatagagtgacgagaacaccatggaacggagttgtgctgttgtggtgcggagtaggagcgtctaagcgaggagagaatcacaggcgatttctctcattgttgttttggcgtcgtttctaattctatgttgaaacaaagtgtttgtctcattagggcgtgtctcctcgctttttctcgcataagaatccagtaaaaaggttctccaaataggctctttgactactacagttcatcgattcgattctcccatctatatcctttgtggttgcccatccggctatcccattatttacttttggttgatgttgttttag

SEQ ID NO: 218864 - DNA, 1234 bp, Zea Mays
cactgactcgcgcaagttgcgagcacgatactagtttctatataatagagccggacgcaagaggttgcaaacccatgcgccatgttaacctttttttcttagccacacgttcgtcatccaacgttcatctttcgatgtccacaagccgacctccaaaacacgggagccttctagaagaagctcctgcctcgctgcgctcgttgccttccttttcttcgctcgtggccaggtgtcaagtgaggcccgcacggcggacgaagacaaggtgcgtgtgcttctggcgctacggggccgtgcgctggaacggacggccgccagcacccatcgtggtcgcctgaccacgccccatgcgtgttagcaccttacaaggagatttgagggcgccacgtgtgatgcccgctgtgccgtcgccaacatctcactgcaggggaagtatctcgacggcacgctccacctgccctcccatggatccgcccctggccggccactacctcaactacaacacgctctagcggcatccagcaggagctggctgcggatcccgcaaacggtgccaagaccgtgcgcaagccggtcttcaccaccgtcaaccagttgcgcccccagatgcatggccacactcttgtcgtctgcgtcgtctccgcccacaccatcatcgacaaatcttccatgcacattggtcgcacctgcatcgccaagtgcctcgtcggatacaacaccgacaccgtcctcatcacacccgcaacaattaggcaaatttgtcatagatacactcacggtgtgctggtgtgtatgtgtggaggaagagcctgacggaggctaagggagaggaatcagtagagcaaatcagcaagatgagacagatgtgtagctgctggtgtttctccactatcgcgacctcactgctcaagcatggcctatatagagtgacgagaacaccatggaacggagttgtgctgttgtggtgcggagtaggagcgtctaagcgaggagagaatcacaggcgatttctctcattgttgttttggcgtcgtttctaattctatgttgaaacaaagtgtttgtctcattagggcgtgtctcctcgctttttctcgcataagaatccagtaaaaaggttctccaaataggctctttgactactacagttcatcgattcgattctcccatctatatcctttgtggttgcccatccggctatcccattatttacttttggttgatgttgttttag

SEQ ID NO: 218865 - DNA, 840 bp, Zea Mays
ataccatgtagctgcacaactaaatgatttatcatggcatccctttcaagatggagaatgtgtgtgttgtgctggattaaattaggcgtgcacatttaattcaaaatcaagtatactggaagatcatgaagttttctaaggatgtatgggtattcactttattgttttggatttttgtattcttacgagtagtgcttggtgacaaaatcgtgtacatattcctagcttttccctaactataacatttaccttcattttttgttaaatacacttggtgcagataacttacataaggatagtggttagccataatattttggaatatcatcttccttataaaaacagcaactagcacaggcccaagggatacacgtcccggtgccccccaccacccgttcattatccttggtcttcacctccacctacacctacatctccatctaccgaacatcagacccctccaactaccttgccgacgcatgaacgagaagacgggttaggctttgtcgaaaccctcttcgctagtggaggtatcgaccatcactcgtcactgtaacccgatggtgatcggcgaccgtgagcttccatgttttgtgttctgatacttgagacttttattatgactatgtataagatattgtctcttattagtattggatgatgagatgtatcttattatgactatggatgagacttttgtgatgtaattgatgagactatggatttaaatattgttatgtgattgtgtgtgagatgttttatgtgaaaaatatgttgtgctatataggtgttgatatatttgttatgttgtcgaatgtggcgtaaaataaaaataaataa

SEQ ID NO: 218866 - DNA, 2122 bp, Zea Mays
ctggcctcgtctcgtccccgtcaccctccacacgcatgactctcccacctcattcgcttgacctcccttccacttaaaccacgccaaaaaccagctcgcgattcctcccactggcctgaatctgacccgcatcgcccgccatccccaccgccgcgcctcttccgggcagccatggacgaggccttcgcgcgcgcggtggaggacggcctcaagctcaccaagcgcctcgtcctgcccagcgggggcgggatgccgccgccgccgcgcccgcacctggcgatggaccgcgacgaccccgccgcggcgctgcagcagctcatgccggcggcgcccatggcgtacgccgtcgtcgtcgacccggccgccgtcgacagccccgacgtgcccagctaccagccccacgtctacggccgcctcgacccgcccgcgctcatcccgctccagatgcgggaggtcgagctccgcgtcgactgcgccgccggctgcgccaccgccgaggtcgccctgcgcgcgcgctggtggctgcactgcatcacgcgcagccgcgcgtgccactgccgcatcgtcgtgcccatggctcaccagggttcaattctaggcgctgaggttactgttgggaaaagatcatacaatactcatgtaattgatacagaggataactgttcagtgaagattgcaatgcccgagagtgggggtcttttaaaacaggaatttttttccttgacaataccacaggttggaggtggagaagatatatttgccacaatcagatggtcacaaaaattgctatacgacaacggacaattttctgtcgaagtaccatttcgtttcccgcagtttgtgaaccctttgccaaaggttttcatgaaaaaggagaaaatacagttgattgtgaatagtggtgtgactaaggagattttattgcagggaacaagccatcccttgaaggaaaaaagtagacaaggtgagaagttgtctttcctgcatgaagcagttgttgagaattggtcaaccaaagattttaccttcgcatatactgtttattctggtgatttgtctggtggagttcttgtgcagccctcaaccttgcgtgactatgatgacagagatatgttctgtctttttcttttacctggaaataacgagaacagaaaggtcttcagaaaggctgttgtttatatcattgatacaagtggaagcatgcaaggaaagcctcttgagagtgttaagaatgccctgtccactactctctctgatcttattccaggagattacttcaacataataacatttaatgatgagcttcactcattctcatcgcatttggagcaagtaaatgaaaaaacaattggaaacgctattgaatggatgaacttaaactttgtcgctcagggtggcactaacatcatgcatcctttgagtgaggcaatgactttgctgtcaacttctcacgatgcgcttccacaaatctattttgttactgatgggtcagttgatgatgaacggaatatctgccatacattgaaaactcaacttattaaaagtggatctaagtctcctcggatttctacttttgggctaggttcatattgcaaccactatttcttgaggatgttggcatcaattggtaagggtcactatgctgctgcatttgatacaggatcaattgagggtcgaatgcttcaatggttccagaaagcttcaagcacaatagtgtcaaatgtttccattgatgccataaagcatattcaagattttgaagtggattctgtatatattccagacatttcagcaaaatatccattgtgtgtttctggaaggtacaatggcaagcttccggagacacttatcgccaagggtcacttggctgacatgagtgaaatatctattgaattgaaagtccaacatataaaggatatacctcttgataaagtattggcaaagcaacagatggatcttctcacagcaaaagcatggcttatggagaacaaggagcttgagcgaaaggttgtgaaattaagcatacaaaatagccttccttctgagtacacacgcatggtactacttcaaaccagtctggacaaaatagatccagcacaacagaaatattgttgtatttgat

SEQ ID NO: 218867 - DNA, 1626 bp, Zea Mays
accgcccccgcctgtcgctggcctcgtctcgtccccgtcaccctccacacgcatgactctcccacctcattcgcttgacctcccttccacttaaaccacgccaaaaaccagctcgcgattcctcccactggcctgaatctgacccgcatcgcccgccatccccaccgccgcgcctcttccgggcagccatggacgaggccttcgcgcgcgcggtggaggacggcctcaagctcaccaagcgcctcgtcctgcccagcgggggcgggatgccgccgccgccgcgcccgcacctggcgatggaccgcgacgaccccgccgcggcgctgcagcagctcatgccggcggcgcccatggcgtacgccgtcgtcgtcgacccggccgccgtcgacagccccgacgtgcccagctaccagccccacgtctacggccgcctcgacccgcccgcgctcatcccgctccagatgcgggaggtcgagctccgcgtcgactgcgccgccggctgcgccaccgccgaggtcgccctgcgcgcgcgctggtggctgcactgcatcacgcgcagccgcgcgtgccactgccgcatcgtcgtgcccatggctcaccagggttcaattctaggcgctgaggttactgttgggaaaagatcatacaatactcatgtaattgatacagaggataactgttcagtgaagattgcaatgcccgagagtgggggtcttttaaaacaggaatttttttccttgacaataccacaggttggaggtggagaagatatatttgccacaatcagatggtcacaaaaattgctatacgacaacggacaattttctgtcgaagtaccatttcgtttcccgcagtttgtgaaccctttgccaaaggttttcatgaaaaaggagaaaatacagttgattgtgaatagtggtgtgactaaggagattttattgcagggaacaagccatcccttgaaggaaaaaagtagacaaggtgagaagttgtctttcctgcatgaagcagttgttgagaattggtcaaccaaagattttaccttcgcatatactgtttattctggtgatttgtctggtggagttcttgtgcagccctcaaccttgcgtgactatgatgacagagatatgttctgtctttttcttttacctggaaataacgagaacagaaaggtcttcagaaaggctgttgtttatatcattgatacaagtggaagcatgcaaggaaagcctcttgagagtgttaagaatgccctgtccactactctctctgatcttattccaggagattacttcaacataataacatttaatgatgagcttcactcattctcatcgcatttggagcaagtaaatgaaaaaacaattggaaacgctattgaatggatgaacttaaactttgtcgctcagggtggcactaacatcatgcatcctttgagtgaggcaatgactttgctgtcaacttctcacgatgcgcttccacaaatctattttgttactgatgggtcagttgatgatgaacggaatatctgccatacattgaaaactcaacttattaaaagtggatctaagtctcctcggatttctacttttgggctagataaattttctaattgttttccataac

SEQ ID NO: 218868 - DNA, 664 bp, Zea Mays
gacaaactgatatttgagctggtcatggaatggtgaggtgtttatgcttgggaaccacgtgtattagctcctgcggtgctggcgccctggggtttcatctccactgagttttggacaaatatcagacaaagatcaaggatagttacctacgtatgcagtgcctcaagtgctaggttcagtggagctgttctcctgccctcgacctctagctagtgtccactacatgggagaggtagctctggtgttcagtcggtgtaaacctttcctagccaccaagtttgttgtactccaaagctgagcgccaacctccttccaatggtgataacgctcatgtttctctctgtctcctcgtggtcaagcatactcgaacatggcctcaacgtcgcagaacgccgccgggaaccacctaatcatcgatcgctcgattcacgacttctccgatcaaaatttatgtgatgaggagtactctaagtgttcctgtggctggagggtgtttccagttctggaggaagattagttaggattgtgtataagctttggagggttcctaccttcctgctattgtaataagttatgcactttgagtatatcaggacttgtaataaatgtaactcttcctatgtaataaccttcagttttagaaatgaaaagaatgttttataaa

SEQ ID NO: 218869 - DNA, 2041 bp, Zea Mays
ctccgaccatccccgtcctccctccagtgccccggcatctccgctttccgtcttcccgcgaaccgacgccattcttcgccccggttccacggctcgaatcgcatgaccgcatccgatcccgcccggcccctcctctatacactggaccgatcgcctgggccgctgatggagggagggacgcccgcgacggcggcggcggaggcgatggaggccacggggaaagccaagaacgacggggtggtcaaggaggtgatacggctcgagcgcgagtccgtcatccccatcatcaagcccaagctcgtcatgaagctagcttacctcatcgagcgtgagaacgaccggactgagttcatgaagctatgtaagagggtggagtacacaatccgcgcttggtaccttctgcagtttgatgatctcatgagtttggagcagcagagcatgacatccaatgaacttaaaaccttagaactcaatttcttaacctacctttttcagatcatggaaaagagcaacttcaagttgttatctgacgaagagtacgaggtggcgcagtctggtcagtatcttctaaacctcccaatcaaggttgatgaatccaaggtagatagcaagttgttgacaaagtactttagggagcacccacatgacaatctaccagcatttgctaacaagtatattatcttccgtcggggcattgggattgatcggacaactgactacttcttcatggagaaagtggatgtcatcatatcccgagcatggaggtcattgcttcgagtcacaaggatcgatagactgttctcaaagaaacaagtactgccaagaaaggacacaaagaagactgatggaataaatgatgatgtagaagagccagacctctatgtcgagcgtgttcgcctagagaaaatggagctgagcgtaatgaatctgttgagaaaaatgacaattcaagagcctacatttgaaaggatgatcgtggtgtataggaaggctagcccagaaagtaagccagatcgagggatatttgtaaagcacttcaagcacattccgatggccgatatggagttagtcctgccagagaagaagaacccaagcttaacaccgatggattgggtcacatttctaatttctgctgtgattggtttggtcactctgataggcagtctagaaatgcccaaggctgacatatggtttgtcacagctatcctatctggtctggttggatactgtgcgaagatatacttcacattccaagcaaacatggtccaataccaaaacttgattacaaagtcgatgtatgataagcagcttgatagtgggagaggaacactcctccacttgtgcgatgatgtgatccagcaggaagttaaggaggttatcatttcttactacattttgatggagcaaggaaaggccactgtacaggatcttgattcacgttgcgaacagctcatcaaggaagagtttggtatggagtgcaattttgatgttgtagatgctgtaaagaagctagagaaactcggcattgtttctcgggactcgattgggaggatcctatgcgtcccattgaagcgcgcaaatgagatcataggaacaactactgaagaaatggtgatgcgagcccaacaagcttcgggataattacatcattcagtcaaaacttatgcgatgcaaaggcctgccgcgctgatgcattcttttgagcagtttgctggtgtagaggagatgttgttattctttcatctgctcatccttctctctttttagtgtacgggcagttcaacaagtggactgtagagagcacacgatttacatgtacagaaccgttgcttcctgattgctttcgcgtagattagttacttcctgattgctttcgctgcttcacaccagcctgcttatgatatacatacagtatcatgtattggaacatttaaggaaacataaggcagcttgcttctgataatagtctagaccaaggaaagaacatctgtagttctgtactatgcaacgacattaacaattttcagtttttaggttgtgg

SEQ ID NO: 218870 - DNA, 3281 bp, Zea Mays
cttggccgtcggttcttgacttcgaatcatggttctgaagtcgcacacaaatctgctagatatgtgttgtgaagatgtgtttgacttccaacaacctttaagatctcctcgtcatgtggtgaactctcctggcatcatatctgaccctgattgggaaagtagtaatgatggcaactcagttggttctatgcctttttgttttaagagaaagattattgttgcaaatttccttcctgtgatctgtgcaaaaaatgaagctaccggagaatggtcctttgccatggatgataatcaactgcttgttcaactcaaagatggttttccaattggtaatgaagttatttatgtgggtagtttgaatgttcaagttgatcctattgagcaagatcgagtttctcagaagctcttcaaggaacacagatgcgtacctacctttctcccagctgaactccagcatcaattctatcacatattctgcaaacagcacttatggccacttttccattatatgcttcctgtttgtcatgacaaagatgagctctttgaccgttccctttttcaagcctacgtgcgggccaacaaaatttttgctgacaaaattgtggaggcagtcaattcggatgatgattgtgtgtgggttcatgattatcacctcatgcttatcccaacccttttaagaaagaaactgcaccggatcaaagttggtttcttcctccacagcccatttccctcgtctgagatctataggacactgccagtgcgggatgaaattctaaaatcacttcttaatgctgacctcattggctttcaaacttttgactatgcccgccacttcctttcatgttgcagcaggcttttaggccttaattatgagtccaaacgtggccacataggtatagagtacttcggccgaacagtgagcctcaagattcttgctgcaggtgtacatgttggccggcttgaggctacattgaggttgcctgctacaattaaaaaggttcaagaaattgagagtagatatagtggcaagttggtaatattaggtgtagatgacatggacatctttaaaggtatcagtctaaaactgcttggcttggagcttcttctggaaagaacacctaagcttcgaggcaaggttgtccttgtacagattgttaatcctgcaagaagcatcggaaaagacattgaggaagcgaaatatgaagctgaatctgtagctcaaaggataaatgataaatatggttctgctaattacaagcctgttgtcctcattgactactcaatacctttctatgaaaagatcgcattttatgctgcatctgactgctgtattgtaaatgctgtgagggatggcatgaatttgataccgtatgagtacaccgtatgcaggcagggaaatgaggagcttgataagctcagaggtcttaataagagctcatctcacacaagcacacttattgtgtctgaatttgtgggttgctctccatcacttagtggagcattcagggtaaatccttggagtatggaagatgtggctgatgcattatacagtgtaacagacctgacacgatatgagaagaatctgcgccatgaaaagcactatcgctatgtcaggtctcatgatgttgcttactgggcacgcagctttgaccaggatctggataaagcatgcatagagcaatacagccaaagatgttggacaactgggtttggtttaaattttagagttattgccctttcacctgggtttagaagactgtctctagaacacctagcctcgtcttataagaaggctaacaggaggatgatattcctggactacgatgggacccttgtgccgcagacatcacacgacaaatctccaagcgctgaacttatctctacccttaacagcttgtgcagtgatatgaagaacacagtatttatagtcagcggacgaggaagagattccctaagcgagtggtttgcttcatgcgagaacctcggtatcgctgccgaacatggttactttatcagatggaacaaagcagctgaatgggagacaagcttctcaggtatttattctgaatggaagctcatcgcggaccctatcatgcatgtatacatggaaacaactgatgggtccttcatagagccaaaagagagcgctttggtatggcactatcagaacacggatcatgactttggctcgtgccaggcaaaggagctagtgagccatcttgagcgagtcctatcgaacgaacctgttgtcgtgaggcgtggccatcagatcgtagaagttaaacctcagggagttagcaaggggatttccgtggacaagatcatccggaccttggtcagcaaaggggaagtaccagaccttttgatgtgcatcggaaacgatcggtcggacgaggacatgttcgagagcatcaacagagccacctccctttccgagcttcctgccgctccagaagtattcgcctgttccgttggccccaaggccagcaaggcaaactactacgtcgatggctgcgacgaagtaatcagactgctgaagggtgtcacagccgtttcgctccaaaaggatactgccggccatagccatgcggcattcgaggatacgcttgaggttgtcagctgatccacacaagtagtcagtcagctcaaactagctacgtccagtgtgttcagcgtgccaatctcaaatctccactgcatgcaagccactcatcactccaaaccatatgtgccaagtggaactctaaattggacggagacaagtatcgccattgctgacacagagacagaacagcggtcacaaactgcaagttcgagcgaatggcgtcgcggttgatgattcactgacgacaacggaaatcacaaaccgcaagttttcaattcgtaggctaagacaactagtgggacgccatacattttgtaggcggctgatctggtggtgaaagggtggatgtccctgctagagccccagcttacggcatctgggagagccttggaagttggaccccgacgcttgtgctgcactgaggactgttacactattttctttgtacagaacaaacaggtgtggttaggcgattagcgctgtgacgattgattgtaattcacccacgtaccattgaggaaattaatggctgcgatggtgaagcgccgtgcgcatggcacattgtatgacgttcactcagtgttcggttcgagtttaaagtaggatgatgcggggtaacactgttgtctcgtttttaccataacaacaacaacaataaagcatttttgttctaagc

SEQ ID NO: 218871 - DNA, 1575 bp, Zea Mays
cgtggcttgacgaacttacagaatcacgacctttattctatggattgaagatgggtgtcctaccatctggagaaagagctctaaagttatcaatgcaggccttctttctttcccttttcatgattttctttcttccttggcaattcagaacgggaggttctattggaagccaaatacttactgagatcagcatttttatagtgaccactggtgtttctctctgtttggaaataaatcatcattttgttcaggttgtacatacaaggaggtgcagttttgctccgcctcagagcactgctgctgcagacactaatcccactgaatttatcctagaatctttggaacaaagtgatccacgatcattgatacaatatcttgcataccaagatttgtgtgtggcatctgagtgtaatttggaaccatggcgcagagctgctttctttgaggaatctggtgaaacttataaaagaatcgtgacaacttgtttgaagccacttgaggagtttacttcaaaaattgctgaatcccttgaagatttttctagtgataagccagaattgatgctacaacagtccaaactctttagtgcatttgatgatttccagatatgcgcatggtgtgctcggacattgactgggttaactgcgtgctcacgccaggaggatcggtatggtgttgctcaactcactggctgcaatgctgctgtgatgacaacgttgctgtctgccctagtagcaattgagacatgcttaggaaagaaaacaaacccacagcctgtgcactcattgggtcctgaaaacattaggtgggttaacttctccacaggacgaaaaggcactggagttgcaattgcatgcacacaaaaaggcggcctacacaagaaagcttataccatggcagatgttcttcggacttctgtatatcagatagtttcagcattcatcgatgacctacgagctaatgcaaaaccatccagcttggagaagaactggatcagtgaagggagaaaacctgtatatggttcacaagccgtgttggttcagaagttgattctgtttattgagtaccgtgcagtatgaacttggttcatgtctctcagatccttacctccatatcagatcatacttggtagtcatgggtttttgaacttggttcaagaaccattgatttccaccagagcctatgaagatggatcctaaaattacttctgtattcctttgggctgctgcactgctgaaggcagtgacgctctcggattggataaccattatgcacccaggccttgtttctattctggtttatccactcaggcctttgtttctattctgatttgtagtctggaagttgaatagagttacctgtatgttgtatcatggagagggaatctgaaatacttatgatttttttatatccacttatcagatttatgacaaactgttagtactgcttagctgcacctatttggtggaatttcgtggtgaaaaggttcggggtgatgatctcctggaataggttccagttgttctttcccagtttacccaatagcaatatcagcctagtcttgaaacttcttcc

SEQ ID NO: 218872 - DNA, 483 bp, Zea Mays
ccgcattgccacaaggccagcagacagcagtccaagcggcccaagactgctcacggacggagtcttagagtctcggcatccacctccaccaggcgctggcccagttttcgccatccaccaggcgtccttagaatatggtgcagggctaccgagcagcgagcaacaagctgccgagcacagggcgccgaccgtcgagcagcgagcaccgaggaccgccgagtagtcgagcaccgagcagctagcaccgagcagccgagcagcaagcagagggctgcgaccaccgagcagccgagccgcctcgtcttctctcgtcttctctagtaaattaaacaggcttggatgaattagttttttgatttagagttttggagagattatttgtacggatttgaaaagattacttgtatggaacgttgaaattattgtttggtgctaaaaaatattattggaatgttgttggaatgttaatttgtgataaatttc

SEQ ID NO: 218873 - DNA, 2582 bp, Zea Mays
cttccacaaaccccataaccctagcaccgccgccaccatgtcctcatctccatcttcagtgaaccgccgtcccccgggcccgctagcgttggggctggagtccttggggaagaagatcagcatcggctggtctccgtcccgggcggcatcctctccatctcgtgtcgcacctacgcgaccccactgggccatggcttctttccccgtggtgcaggtcttttcggtcctcaggcttcatccctgtgcaagtgcagggataattgcttctaatctcccgaggctgcataacctaattcagaggcagagcaagggggcgtgagggagatgagggagatcatcagcatccatatcgcgtaggcaggcatccagtgacacctctgtcgggatcgcgagggatgcgttcaacacgttcttcagtgaaacgggcgcagggaagcacgttccaagggccctgtttgtcgacttggagcccactgtgattgacgaggtgaagaccggggcgtaccgccggcttttccatcctgagcagctcatctcacacaaggaagatgctgcgaacaacttcgcccgtggacattacacaggctcaaaatgttcttggaaacaaggggactgaaattgcaaaggtagcacatcggcgaactgatgcggaggcgggcgtggaggcgctcgatgccgtccagcaatcagtagttgtcgctgcatcggcgacttctttcccccaccagcatggccgcgtgaatggttcagttctttccaaagcctacagcttctaggaaatcggatacgatcacccgaaaaaggcaagggggaaatcttcttatagatctgttccgtcattgtgacaatcatttgggagagaaacaagtaaacaacccttttttccataaaactccatctggaagtgcacgacagccactacagttgactaccgatgtaaccaagatgatgcaaaagcatcagctggaaacgccatagttgctgctactgagtaccatccttatatccttatttcctaattgttgtggtgcatgtacaagtttttttaaaacgaattccgaattggttattgctgttagaactcatctgagtgctaccttctcatatgctccttttttctctctggctgttatgttaaaggaccagatacaagtcaatcttcccttcaaattacaatttaattattttatatctggattctgcaagacacttcaaaaaaaaatataacaacatgtggtccctatgttatctactagcatgagccattgttccatgcagtttggtacatagtggcgcatattttgttacatttactttctatattcttagtatatttatagcctatatccccaaactatatcatatacttagcacacacccattgttataatccacgtgcgcatggcgcgcgcactttactagtatacaacattgttggcaacaggagctgatctctttattacacgatgtattggcttggtttctaatgtccactttcccatccctgttttcccctccttcaggacttctttagtgatcttttggtacatcgctgctgatacaaacagcctacccagactgcttttgtgaagcacactgctttctgagaagccatttgcagtgcaaggatgaaacttggtcagagtgtttaccatatggattggcagccccaaataaagctctggattgtcctattcccatgacaaggttgtgctcttctcctgcagtgaaaccaaaaaagaaggcgcgctactgttcttccgttttcatgtcaatgcaacaacagattactgatatagctatgcctggtgagtggagataagtggaggtggcactaccaattccttgatgtaccaggaatgtttggattgttgtattctgacattgtttggctcaacatattcaaggtatgttccaaggctatcttagaaaaaattcctgcaaatattgcattttgattcatcttgttgccctttttgttttcggtttggaccatactgtgatttctttgaacaattagtcactctcttagtcttctaaccacatctctctcggtcttgcttcttgcctgttcctaattttggccattatatatttatagtgtgatgatgatttgttctcttcttttccatgtataggactcatgtgttctttgttctctctatgcagttggagtgtcaggtctccaacaattaaacaagatacggaatctgttttgacgtcgataacgtggtcatggtgaccggcgggaggaacaccgggcgtgtaggagtgatcaagaactaggagaagcacaaaggcagcttcgaggtcatcgacgtgctgcttggagctttttgcatgctatgtctagttttctcctatttgttgtacaggaaaacatagaatggaattcaaatttggtggtcgcaaaagtgtggagacttgaattcatataaagttaggcttaacattagtgcaaacagttgtattttagtttagatttagagtacacttatgtatgccttgtttgacaatgcttatttatgatatattgaatggtacttatttatattatattaattataatgttgttcaatata

SEQ ID NO: 218874 - DNA, 800 bp, Zea Mays
ctcaaatagaaaacgccattgttgagatgatgccggacaccgcggatcttcaacaccacccaaccgaatcctcaaccgccgccgtgaaccgcggacctgactccgcgcgtgcttggactcaagttcgtccccggctggtggggtcccacctatcatcatctagcgccgtcggggtaaaaaccaggcagagctcacggtgaattctccggcgatggcttgcgctcctcaacggtctccgcccatctataaaaccatggcgtgggttttccctcccctcatccttctcctctgtgtaccgcgcgacctatgagagtgtgggcatggtagaccgaaccggggcggaatccgttcaccgccgtttggccttctcgccagcgtcttgctcctcgtgacagcaccggaggggccgcctaggaggagggagtctagtgctgacctcgggcagaggtgatggccactgtcgcggcggcgattcctcaccgtcgtggtcacggtgtcgtagttccgctccgcgccgtggactgggtcagctacgtctccatccctgcgtgaggtcacgagtcacctgaagagcaagttggtacctgcaaactcaagtgtcaggtgaagaacaggtaccacaggatgaggcgcatggaggatgctgtgacgagttcgtgagaggtctaggccgtcgtctcccagtcaactttggggttgttggaccgttgtttccttataatgtaattatttatttattttgtatagaacttgtattatatagtaaagatgtgacattcgatcctgtgtcatgattcatc

SEQ ID NO: 218875 - DNA, 2812 bp, Zea Mays
cctactggtaccagtggtggcttgatcacttcaaattggagggactattgggccaaattcccatactgtaaaaaaaggtctgggagctcacagcaaacaacattattatggtatcagctattggaaatgatgggcctctatatggcacattaaacaacccagctgatcaaagcgatgttattggtgttggtggtattgattacaataaccatatagcttcattttcctctagaggcatgactacgtgggagcttcctcatggttatggtcgtgtgaaacctgatgttgttgcatacagtcgagatataattggatcaaagatcagcacaggctgtaagaccctttcaggcaccagtgtagcaagcccggtggttgctggtgtagtatgtttgcttgttagtgttatacctgaagacaagcggaaattgatcctcaaccctgctgctatgaaacaggcccttgtggagggtgcttctaaactttcaggaccaaacatgtatgaacaaggtgctggcaggcttgatctctggcagtcatatgaaatcttaaaaaattaccaaccacgtgcaagcatatttcctactatgcttgacttcaccgactgtccatatttctggcctttttgtcgtcaacctatgtatgctggagctatgccagtaatcttcaatgctacaatcctgaacgggatgggggtgattggttatgtaaaggatcaacctttatggcaaccttctgaggatattggcaatcttcttagtgttcacttcacctactcagatgtcatctggccctggacgggataccttgctctacatttgcaagttaaagatgagggttctcagttttcaggcataattagtggcaatgttactctgactatttataccccagcagctcatggagaaagcagcccacggagtagtacatgtattcttcacatgaaggtcaaggttgttccaacacctgttaggtcaaaaaggatactgtgggaccaatatcataatattaagtatccttcaggatatgttccaagggattcccttaatgttcataatgatatccttgactggcatggtgaccacttgcacacaaacttccacattctgttcaacatgctaagagatgcagagtactatattgagacacttggatcaccacttacttgctttgatgctagcaattatgggacattgcttatggttgatcttgaggacgaatactttgatgaagagattcagaaacttagggatgatgttatacacaagggacttggtattgctgtttttgctgagtggtaccatgttgatacaatggttaagatgacattctttgatgagaacacccggagttggtggactccaattactgggggtgcaaatattcctgcaattaatgaacttctggcaccatttggcattgctttgggggacaaaattcttactggtgacttctcaatcaatggtgagcagacccactatgcttctggaactgatatagtgcaatttcctgcgggaggtttcttgcatagcttccagctccaagaaaactcaaagacggtgcaagatcacataggaacactggatacagaaagcacccaggggaaaggcaagctctcctcaattcttggagtaatagaagcaggggaagggaggattgcagtgtatggtgattcaaattgtcttgacagtagtcacatggtaacaaactgctattggcttttgagaaaaatattggagttcactggaaacagagtgaaagataatgtccttttctcagaggcagcacagttaaagtttcctgtttttgagaatatccatcatccatcacgtagaacggatgtaaacttttcaacatactcaacagttgttggcaaggaattaatctgccaccaagattcccggtttgaggtttggggaacgaaaggctatggtgtccaaccaataggcacatcaagaaagcttccagagtaccagatgcatgaaagttctagttctcccaatgtaacaatacaaattgctggcagtagacaagataaagttgaaaggcttcaaagaaatctttcgataccaaatgctgctaaatttgatgataaaagagattattttggatttattggtcatgaggaggttgacataggaatgttaatggcaagccaatggatgataccttgcttcgctgccactgcttgccttatgttgtatcttagttgtagagtgcaacaaaaacgccgcagacgaaggaaggggtcggtggctagtgctaatcggctaacaagtatggtataattcgtcattcgcgcggtggtgctgaaaaggtttttttagcgtatctaagtttcaggcctccagccatgatggataaccaggaagcgccatctgcgcagcatgacagaattttagtagccagaaatccctggtagtgaagacacattttaactcggcaactagaggctgaacttgagagaaagctggctcgtcacttctgtggtcacatggaaagcagcttgtcttcccagattcagccattcgtggcatctactgctgttgcttgtagtcgctcacaattttgttcttcgccacacgtagttgtagccacaaaaatcgctgagagccaatatctagggtagaagctagagctagtcatttgtcatctccttggaatatgtgaaggagatttgagcttctctgtagatccatgagcaataaggggcagggggactcggcatgagcttggcaggtacaaaggaggcttaggcttattgggaactttgtaaagtaaattttgtattgttaatttaaaaaaaagaaccagg

SEQ ID NO: 218876 - DNA, 3099 bp, Zea Mays
cactgctccaatcggctcagagggacgaatgatgctgagttctcaatgacacctgggtcccacatgagaggatccatgaaaaacctggagaaaggagcgcacaaattggacaaatgaagacacactaaacgacaaccttgggcatggaacatttgtagcaggagttattgctggccaagatgcagaatgccctggatttgcacctgatactgagatatatgcttttcgagtcttcacagatgctcagatatcttacacatcatggttcttggatgcatttaactacgcgatagctaccggtatggatgttttaaacttgagcatcggtggacctgattacctggatctcccctttgtggaaaaggtctgggagctcacagcaaacaacattattatggtatcagctattggaaatgatgggcctctatatggcacattaaacaacccagctgatcaaagcgatgttattggtgttggtggtattgattacaataaccatatagcttcattttcctctagaggcatgactacgtgggagcttcctcatggttatggtcgtgtgaaacctgatgttgttgcatacagtcgagatataattggatcaaagatcagcacaggctgtaagaccctttcaggcaccagtgtagcaagcccggtggttgctggtgtagtatgtttgcttgttagtgttatacctgaagacaagcggaaattgatcctcaaccctgctgctatgaaacaggcccttgtggagggtgcttctaaactttcaggaccaaacatgtatgaacaaggtgctggcaggcttgatctctggcagtcatatgaaatcttaaaaaattaccaaccacgtgcaagcatatttcctactatgcttgacttcaccgactgtccatatttctggcctttttgtcgtcaacctatgtatgctggagctatgccagtaatcttcaatgctacaatcctgaacgggatgggggtgattggttatgtaaaggatcaacctttatggcaaccttctgaggatattggcaatcttcttagtgttcacttcacctactcagatgtcatctggccctggacgggataccttgctctacatttgcaagttaaagatgagggttctcagttttcaggcataattagtggcaatgttactctgactatttataccccagcagctcatggagaaagcagcccacggagtagtacatgtattcttcacatgaaggtcaaggttgttccaacacctgttaggtcaaaaaggatactgtgggaccaatatcataatattaagtatccttcaggatatgttccaagggattcccttaatgttcataatgatatccttgactggcatggtgaccacttgcacacaaacttccacattctgttcaacatgctaagagatgcagagtactatattgagacacttggatcaccacttacttgctttgatgctagcaattatgggacattgcttatggttgatcttgaggacgaatactttgatgaagagattcagaaacttagggatgatgttatacacaagggacttggtattgctgtttttgctgagtggtaccatgttgatacaatggttaagatgacattctttgatgagaacacccggagttggtggactccaattactgggggtgcaaatattcctgcaattaatgaacttctggcaccatttggcattgctttgggggacaaaattcttactggtgacttctcaatcaatggtgagcagacccactatgcttctggaactgatatagtgcaatttcctgcgggaggtttcttgcatagcttccagctccaagaaaactcaaagacggtgcaagatcacataggaacactggatacagaaagcacccaggggaaaggcaagctctcctcaattcttggagtaatagaagcaggggaagggaggattgcagtgtatggtgattcaaattgtcttgacagtagtcacatggtaacaaactgctattggcttttgagaaaaatattggagttcactggaaacagagtgaaagataatgtccttttctcagaggcagcacagttaaagtttcctgtttttgagaatatccatcatccatcacgtagaacggatgtaaacttttcaacatactcaacagttgttggcaaggaattaatctgccaccaagattcccggtttgaggtttggggaacgaaaggctatggtgtccaaccaataggcacatcaagaaagcttccagagtaccagatgcatgaaagttctagttctcccaatgtaacaatacaaattgctggcagtagacaagataaagttgaaaggcttcaaagaaatctttcgataccaaatgctgctaaatttgatgataaaagagattattttggatttattggtcatgaggaggttgacataggaatgttaatggcaagccaatggatgataccttgcttcgctgccactgcttgccttatgttgtatcttagttgtagagtgcaacaaaaacgccgcagacgaaggaaggggtcggtggctagtgctaatcggctaacaagtatggtataattcgtcattcgcgcggtggtgctgaaaaggtttttttagcgtatctaagtttcaggcctccagccatgatggataaccaggaagcgccatctgcgcagcatgacagaattttagtagccagaaatccctggtagtgaagacacattttaactcggcaactagaggctgaacttgagagaaagctggctcgtcacttctgtggtcacatggaaagcagcttgtcttcccagattcagccattcgtggcatctactgctgttgcttgtagtcgctcacaattttgttcttcgccacacgtagttgtagccacaaaaatcgctgagagccaatatctagggtagaagctagagctagtcatttgtcatctccttggaatatgtgaaggagatttgagcttctctgtagatccatgagcaataaggggcagggggactcggcatgagcttggcaggtacaaaggaggcttaggcttattgggaactttgtaaagtaaattttgtattgttaatttaaaaaaaagaaccagg

SEQ ID NO: 218877 - DNA, 3846 bp, Zea Mays
atggagaagcggctagcgtacgcggccttgctcccactgctcctcctcacgctccgcatcctccccctgccctccggctcccccaactgcagcggcggcgagggggaaaccccgcccgcgtccaggcacgtggtgcggttcctggagtaccgccgcgcggaggagcaccgggagtacctggacgcggggctccgtgacggcgcccccgcggcggcgtggcgctgggtggagcggcggaaccccgcggccgcgttccctaccgacttcgcggtgctcgagatccgcgacgcgcaccgcgaggccgtcgtggcggcggtgcgggcgctcggccgcgtgcgggacgtgcacgccgacgccacctactcgcgctccgccctttcggcggcgccggatcggtcgcgtcctccccggcgggggaagctgttcaccgccatgtcgttcgagggcgaggaggagggtggcggagagaccggcaattcgtcttctgctgcctgggggcggaagcttcttctgcagagatcacaagttacatccctttttggagctgaacggttatggggaagaggcttcactggcaagaaagtcaaaatggccatttttgacactggtattcgggccgatcatccacattttcgcaatattaaggagcgcacaaattggacaaatgaagacacactaaacgacaaccttgggcatggaacatttgtagcaggagttattgctggccaagatgcagaatgccctggatttgcacctgatactgagatatatgcttttcgagtcttcacagatgctcagatatcttacacatcatggttcttggatgcatttaactacgcgatagctaccggtatggatgttttaaacttgagcatcggtggacctgattacctggatctcccctttgtggaaaaggtctgggagctcacagcaaacaacattattatggtatcagctattggaaatgatgggcctctatatggcacattaaacaacccagctgatcaaagcgatgttattggtgttggtggtattgattacaataaccatatagcttcattttcctctagaggcatgactacgtgggagcttcctcatggttatggtcgtgtgaaacctgatgttgttgcatacagtcgagatataattggatcaaagatcagcacaggctgtaagaccctttcaggcaccagtgtagcaagcccggtggttgctggtgtagtatgtttgcttgttagtgttatacctgaagacaagcggaaattgatcctcaaccctgctgctatgaaacaggcccttgtggagggtgcttctaaactttcaggaccaaacatgtatgaacaaggtgctggcaggcttgatctctggcagtcatatgaaatcttaaaaaattaccaaccacgtgcaagcatatttcctactatgcttgacttcaccgactgtccatatttctggcctttttgtcgtcaacctatgtatgctggagctatgccagtaatcttcaatgctacaatcctgaacgggatgggggtgattggttatgtaaaggatcaacctttatggcaaccttctgaggatattggcaatcttcttagtgttcacttcacctactcagatgtcatctggccctggacgggataccttgctctacatttgcaagttaaagatgagggttctcagttttcaggcataattagtggcaatgttactctgactatttataccccagcagctcatggagaaagcagcccacggagtagtacatgtattcttcacatgaaggtcaaggttgttccaacacctgttaggtcaaaaaggatactgtgggaccaatatcataatattaagtatccttcaggatatgttccaagggattcccttaatgttcataatgatatccttgactggcatggtgaccacttgcacacaaacttccacattctgttcaacatgctaagagatgcagagtactatattgagacacttggatcaccacttacttgctttgatgctagcaattatgggacattgcttatggttgatcttgaggacgaatactttgatgaagagattcagaaacttagggatgatgttatacacaagggacttggtattgctgtttttgctgagtggtaccatgttgatacaatggttaagatgacattctttgatgagaacacccggagttggtggactccaattactgggggtgcaaatattcctgcaattaatgaacttctggcaccatttggcattgctttgggggacaaaattcttactggtgacttctcaatcaatggtgagcagacccactatgcttctggaactgatatagtgcaatttcctgcgggaggtttcttgcatagcttccagctccaagaaaactcaaagacggtgcaagatcacataggaacactggatacagaaagcacccaggggaaaggcaagctctcctcaattcttggagtaatagaagcaggggaagggaggattgcagtgtatggtgattcaaattgtcttgacagtagtcacatggtaacaaactgctattggcttttgagaaaaatattggagttcactggaaacagagtgaaagataatgtccttttctcagaggcagcacagttaaagtttcctgtttttgagaatatccatcatccatcacgtagaacggatgtaaacttttcaacatactcaacagttgttggcaaggaattaatctgccaccaagattcccggtttgaggtttggggaacgaaaggctatggtgtccaaccaataggcacatcaagaaagcttccagagtaccagatgcatgaaagttctagttctcccaatgtaacaatacaaattgctggcagtagacaagataaagttgaaaggcttcaaagaaatctttcgataccaaatgctgctaaatttgatgataaaagagattattttggatttattggtcatgaggaggttgacataggaatgttaatggcaagccaatggatgataccttgcttcgctgccactgcttttgtagagtgcaacaaaaacgccgcagacgaaggaaggggtcggtggctagtgctaatcggctaacaagtatggtataattcgtcattcgcgcggtggtgctgaaaaggtttttttagcgtatctaagtttcaggcctccagccatgatggataaccaggaagcgccatctgcgcagcatgacagaattttagtagccagaaatccctggtagtgaagacacattttaactcggcaactagaggctgaacttgagagaaagctggctcgtcacttctgtggtcacatggaaagcagcttgtcttcccagattcagccattcgtggcatctactgctgttgcttgtagtcgctcacaattttgttcttcgccacacgtagttgtagccacaaaaatcgctgctaagggctagtttgatgaccagagatcacgagaggatccataaatagcaatgggattcctctgacatggatctcctcgtcatccctggccaccaaattagcccttagatcatggagatcggaagggattgagagcaaaattagttcatttctcatcaatctcttccaatctctcccaatcttccgtgatcccctttgtcactaaatcaaccctaagagccaatatctagggtagaagctagagctagtcatttgtcatctccttggaatatgtgaaggagatttgagcttctctgtagatccatgagcaataaggggcagggggactcggcatgagcttggcaggtacaaaggaggcttaggcttattgggaactttgtaaagtaaattttgtattgttaatttaaaaaaaagaaccagg

SEQ ID NO: 218878 - DNA, 2572 bp, Zea Mays
atttacttgctctagtgcaatgttgtagcgacaagtcaatttattctgcaaggaatgacaagtacatatgcacaattagctttttaggttatttacatgaaaagttggtgtcaatgttttgacccgagggtcctaaccaacaagtgaatttatgctgcgtgccccggtccagatggatgatgcaagaagacacaagatttacccttgttcgggcaagagaaggccctacttccagcgaggggggatgagacttatattatcttgtacctaggtgctcatagtagggggtacaagctggtcgagagagggagtgagtcccaagtctccgagagattgaagcgagtgccaatatcgggagtgaagagcaaacagtgaagtgtagtgtgtttctcctctccccctttggagactctagactcctccttttatagtcgcaaaggggaagccatgagttacaagggttgttgcgctgctcttgtgataagaggatacgagtccgagcccttgtagcagtatggtcgacgggatgtcccttgtcctgggcgttgtatttgatcaggagaaggatgtttgatccctgtaacctgcgctttgatcgtatagatgcgtacccaagcctgtcttgtgaggggcgcagatgagacgtttataagtttgtcgagtcgtagtggttgaaatgtcactcgacatggtaaaaagtgcgtggtaatttggcccgtgcgttatccgggatggcgaaaagctggttggacatcggccttgcggtttttgtagccatcccgtctttagaggggttcgtaggagggtcggcggtggcgtgcgtatctctgttggtgttgttggccgaggctgggctcaggcgagacagagatttcccccgaggccgagaccgggtcggcatacagatacatagtcatgactagagtgattggaatagcagtcggagttgtctcctgcgggattcacgggagggttggtggcatttaatgcgctctgctagggtagttggccgaggccgagctcgggtgaggcggagttttctcttgaggctcggagttgtttgaaacgataaccggagtgggggaacaatgcatcgtattcgcgtccgtgcattgcgggtgctgaaagtagattagactacggtcgcgtcgtcctttgttgactttggcgccctcagcgggcaggtgttcgtacagactgcatttaatgcacatgtcttggggtttcgagaagtcggtcgaggctgggctcataccgggacctcgcctgagatgccctcgggtgaggcggacacgcgttctccgcccaagggtgcccttggtaggttgctgatccacgtagatgtagcattcaccggaggtttggcttaggcaaagcgtagttgcgcagtcggcacgcggagcctcggacgaatcatggcttggtcctgcgtgaccttggaggtcagggcgtgtttgccctgtgatttcctggtactcgggtgtcttggtacgattagggatgtaatctgggtacccttaattatggtacccgatagttgggttcgcagaggcacaaagaactagttctacacaatagatctcataatttttctggaagtgccacatgaagaaagtctagcagtgtgccagctggaactgggaagtttgttagtttctctattgaatatttaattatctggaaaaataaagacctatttttgcattgcctagtcattctgttaatgattattaggccatgtttggttcctttagtcactagactaaactttagtcgctaaagtaccccgtttggttccagtgactaaaccggactaaagaacattaattgctgtgaataatgactgtattgctcctattaattagtggatgtttgctgcaagaagaaagtggagagggcaaataaggctctcctgtggatgcatcaagacaacagcatgatggcgccaaacttgaggtcagcattgggcaagggcaactaccagagcagagaaaccaaataatataccatacctaactgttcgcctggaagttactcttcatgacaggaaaaattctgaacatcaaggagtttctgtttgcaagtttcactatttaaaagcaggtcgtgtcacttgtgcggagttaaggactggaccgaggcagtattatcagtttctggatatggattgttgtgctagtttcgatgcaggtgtcaaacaacaattaggctgaagaggtgagcaacatttaaggaggtgctgatgcttgctgataacctatgaaaaggcgttgctgtagctgactacttggtttgtggtcagataattctggacgtgaattttgatatgttggccagattagctgccaaataggtatttcgtatctcttgatttatgggattcacattaactgattcttggttgccattcacttgtcttggttatggtgctacatgggcgtgcaaagcatgaaggcaatcgtttgactttgcttggtaatgcgttttgcgcacaacaatctgatcaaggcaaaaatggtaatggtttcctagcaccgtttggaatataggattgataaaatgcaggaatagg

SEQ ID NO: 218879 - DNA, 1066 bp, Zea Mays
acatcgccgttgcagacccaccagggtaggtcaccacgaacgaacgcgtcgcgtatacggcgcaccaccatggcactagcgggaaaatttcagtgaccgaataaacgaaacacctcagtcgagacgcgagagtttatctacctatctggtgtccgctttaatttctttcctcggtccctccaccccccttcgccctttccgacgcgccgcccgaaaccctagccccactgattctctccagcccagcccagccaaggggaggggatgtcggcggcgccagcggcgggagggcagggtggcgggggcattgacgccgcgctcctcgacgacatcatccgccgcctgctcgaggtgcggaccgcgcgcccagggaagcaggtgcagctctctgagtcggagatccgccagctgtgcaccgtctcccgcgccatcttcctcagccagcccaacctcctcgagctcgaggcgcccatcaagatctgcggctctcctgtggatgcatcaagacaacagcatgatggcgccaaacttgaggtcagcattgggcaagggcaactaccagagcagagaaaccaaataatataccatacctaactgttcgcctggaagttactcttcatgacaggaaaaattctgaacatcaaggagtttctgtttgcaagtttcactatttaaaagcaggtcgtgtcaaacaacaattaggctgaagaggtgagcaacatttaaggaggtgctgatgcttgctgataacctatgaaaaggcgttgctgtagctgactacttggtttgtggtcagataattctggacgtgaattttgatatgttggccagattagctgccaaataggtatttcgtatctcttgatttatgggattcacattaactgattcttggttgccattcacttgtcttggttatggtgctacatgggcgtgcaaagcatgaaggcaatcgtttgactttgcttggtaatgcgttttgcgcacaacaatctgatcaaggcaaaaatggtaatggtttcctagcaccgtttggaatataggattgataaaatgcaggaatagg

SEQ ID NO: 218880 - DNA, 303 bp, Zea Mays
aggcggacgagctcgccatcgtgcgcctcttccaggagaacacaccccccgtcgtctacatcacctcatgatctctcactgggatcctatgatcatgcgaaaggaggacgaaaaacgctcagcacctgtttgttgttttgtccaaataaatttttgatgctgcatacaatatcggaagctttgtacatgcaggcaatgaaattttaattcagtacaacaaagattgaccaatattgtgatagcgtgaacaaagccactagaaaattgcacaaaaacaacttgaactcgttgatacgtttgtag

SEQ ID NO: 218881 - DNA, 217 bp, Zea Mays
gccatcgtgcgcctcttccaggagaacacaccccccgtcgtctacatcacctcatgatctctcactgggatcctatgatcatgcgaaaggaggacgaaaaacgctcagcacctgtttgttgttttgtccaaataaatttttgatgctgcatacaatagcactgaacataggagttcactgtagaagttcagtggtaacacggatgatgactacgtac

SEQ ID NO: 218882 - DNA, 3243 bp, Zea Mays
ctcccattccccagcacctcctcctgcgcagtatgcacagcacatgcccccctctaactcgctcgccgccccggtcaaccttgccagccggagcagggtgactgacgcatgcagatgcggatcgaacgccactggtcattctagcgagagacgtttcttccttaaactattcccctccgcgcgacagttgtgcccttccgtggtttaaataggtcacgggccacgatgacatgcatcccgcgacctcccccgaccccttgccggattacaggtgtcgcggcccggcgtctgctcgtacagttggtttccttggctggtaggagtcgtggtgcatggtcacggccgcgccggcaggaccgcagcagaagtgatcggggagcgctcttggttgtggcggcggctccttggctgcggggtttgggatcctaggaagtaagcgtttggaggccagaagattcctgcatgtttaggtaatggcgtctactgcaaaggaaaaaacaaagggctgtcgaccaaaactttttacagccaaggagaagaaagttgcaaagagcacaaagaatccaggccgccatgctgctaagcttgcgccaagttcttctaagacatcatcatcatcccccttgagaacgttttcagaggttaagagcatgcgcctcagccatttccttgcccaatcttctaataacactacaactgaacccatcagaatatttgtttccacctggaatgttggaggaaaaacacctattgctgcactgaacctggatgactttatcccccctgatgacaattccgatatttatgttttgggttttcaggaaattgtccctctcaatgctggtaatgtgcttgtaatagaagacaatgaaccagctgctagatggcttgttcttataaaccaatcactaaatcgaccagctgacattgatgccaacgtctttcagcatgaaccatctccctctgttgattcttcttcctctcgagcttcatcaagcatcggcacctcattctccgacctatcaaaaacagcaagtggtgccacaatcttccagaattccttgttaaaagccattagcaaatctttcatgccagtgcgtagaaaacaacttaaggcctgcaattgcccggtagaaatgaccagaacgtcctacagggatgcttgctttggatgtcaaaaagcatatgcagatgagactgattcctctggagaggatgaagagaaagggaaagataaagagaaatcaagggactctgatggctctgtggtcgatggaattacttctggtcctgccactagggatcaactaaaatataatctcatagcgtgcaaacaaatggttggcatttttgttactgtgtgggtgaagaaagagctagtgcagcatattgggcatctaaggaaggcttgcatagggcgcgggattctgggctgtcttggaaacaagggatgtatatcaataagcatgacactgcaccagacaagcttttgtttcgtatgcagccatttggcttcaggtcaaaaagaaggagacgaattcaggaggaactcggatgttctagagataatgaggctcacaatgttttctaggatctgtagaagagctggaagaaaaatcccggagagaatagttgaccatgataaggtgatatggcttggtgatctgaactaccgtattgcactgagctatgcagataccaagaagcttttgatggaaaatgactgggatgctctttttgaaaaggatcagcttaaaattgaacgggacgctgggcgagtatttaagggttggaatgaggggaagatatattttgctccaacatataagtactcctttaactcagatgcttatgctggtgagactgcgacatcaaagaaaaagagaagaactcctgcgtggtgtgacagaatattgtggcgtggtgatgggattgtacaattatcctactaccgcggggagtctagattttctgatcaccgtcctgtttgtggaaccttcgctgttgaggttgaggtgctaaacaagaagacaaacaggcgctcatcaaatgctgacatgagaattgatgctgaagagctcttacccacgggcaagggcaagggtaaaagagatgagaatcatgttgcacgcgaggaggagaggctagtattgcagccggactcgcagatgccgtacgttccctcctcattgatgttccaacggccagcgctcaagatggacggacgattcaccggctcggcccacaacagctcatcaccacccatgtttccctctcaccacccgtgccaaacagccaattcatcgcagccaccggtaccgcgcgccgctgggcagcatttgctaccttgtcgcgtccgtgcgtggatcgtgactccttgaattgtggcccggggcagaggaggaataagccagccatcgagatcgagattgaactgcatgcatacagtgctccgtagtagaaacataccaaacacacgctcatcaaggggaattattacaagctaggaaacaaatccggaagaatctcgtgcctggaacagctagctgtttgtacgtgaattaacgaactagtaccataatgcacaaacatgtgtgtgctgtaagaagaatgatgacgaagaaatcacaaagtctaagacgaccggtagatgctctagaacatgatcccggcggccgcgaccgcgacgggtagcgcggcgagggcgacgaggcctccggcggcggtgacgcgtcccgcgggggacttggctgagcccgtcggcgtgttggctgcagaacacacggcagcggtcggaggcgaagtcgtcagatgagatagcaaaggactccagtccaggagcatcaatcaaagcaagcgaaggacagcaagttcgttaccaggcacatctgggccgatagaagatggagagaggcctgccatgggcgccgcagtaggcaccaatccctcggggatagggaatccgaaagctgcagataggaaaaaaaaacgtccactgaaacttaaaaacgtgatcaagccatggtcttagttaaaagtgagatctctgaacaagtagattagctgctagagcgacttccatttcgtgagtaattgtgtcgtcgtaacgtgctaaaaaaacaaacaaacaaacaatgcatgactggctgactgtgcacaaggcatgcacgacatggcagcagtaccgtacgtatagtatatatacctgcgcaggcgctaacgggcggcgcggtgaggcggcag

SEQ ID NO: 218883 - DNA, 3239 bp, Zea Mays
gccccggtcaaccttgccagccggagcagggtgactgacgcatgcagatgcggatcgaacgccactggtcattctagcgagagacgtttcttccttaaactattcccctccgcgcgacagttgtgcccttccgtggtttaaataggtcacgggccacgatgacatgcatcccgcgacctcccccgaccccttgccggattacaggtgtcgcggcccggcgtctgctcgtacagttggtttccttggctggtaggagtcgtggtgcatggtcacggccgcgccggcaggaccgcagcagaagtgatcggggagcgctcttggttgtggcggcggctccttggctgcggggtttgggatcctaggaagtaagcgtttggaggccagaagattcctgcatgtttaggtaatggcgtctactgcaaaggaaaaaacaaagggctgtcgaccaaaactttttacagccaaggagaagaaagttgcaaagagcacaaagaatccaggccgccatgctgctaagcttgcgccaagttcttctaagacatcatcatcatcccccttgagaacgttttcagaggttaagagcatgcgcctcagccatttccttgcccaatcttctaataacactacaactgaacccatcagaatatttgtttccacctggaatgttggaggaaaaacacctattgctgcactgaacctggatgactttatcccccctgatgacaattccgatatttatgttttgggatgttgtgtttacttgattctagatttgtctcacatattagtactaatacacagccgaaaatgttttcaggaaattgtccctctcaatgctggtaatgtgcttgtaatagaagacaatgaaccagctgctagatggcttgttcttataaaccaatcactaaatcgaccagctgacattgatgccaacgtctttcagcatgaaccatctccctctgttgattcttcttcctctcgagcttcatcaagcatcggcacctcattctccgacctatcaaaaacagcaagtggtgccacaatcttccagaattccttgttaaaagccattagcaaatctttcatgccagtgcgtagaaaacaacttaaggcctgcaattgcccggtagaaatgaccagaacgtcctacagggatgcttgctttggatgtcaaaaagcatatgcagatgagactgattcctctggagaggatgaagagaaagggaaagataaagagaaatcaagggactctgatggctctgtggtcgatggaattacttctggtcctgccactagggatcaactaaaatataatctcatagcgtgcaaacaaatggttggcatttttgttactgtgtgggtgaagaaagagctagtgcagcatattgggcatctaaggaaggcttgcatagggcgcgggattctgggctgtcttggaaacaagggatgtatatcaataagcatgacactgcaccagacaagcttttgtttcgtatgcagccatttggcttcaggtcaaaaagaaggagacgaattcaggaggaactcggatgttctagagataatgaggctcacaatgttttctaggatctgtagaagagctggaagaaaaatcccggagagaatagttgaccatgataaggtgatatggcttggtgatctgaactaccgtattgcactgagctatgcagataccaagaagcttttgatggaaaatgactgggatgctctttttgaaaaggatcagcttaaaattgaacgggacgctgggcgagtatttaagggttggaatgaggggaagatatattttgctccaacatataagtactcctttaactcagatgcttatgctggtgagactgcgacatcaaagaaaaagagaagaactcctgcgtggtgtgacagaatattgtggcgtggtgatgggattgtacaattatcctactaccgcggggagtctagattttctgatcaccgtcctgtttgtggaaccttcgctgttgaggttgaggtgctaaacaagaagacaaacaggcgctcatcaaatgctgacatgagaattgatgctgaagagctcttacccacgggcaagggcaagggtaaaagagatgagaatcatgttgcacgcgaggaggagaggctagtattgcagccggactcgcagatgccgtacgttccctcctcattgatgttccaacggccagcgctcaagatggacggacgattcaccggctcggcccacaacagctcatcaccacccatgtttccctctcaccacccgtgccaaacagccaattcatcgcagccaccggtaccgcgcgccgctgggcagcatttgctaccttgtcgcgtccgtgcgtggatcgtgactccttgaattgtggcccggggcagaggaggaataagccagccatcgagatcgagattgaactgcatgcatacagtgctccgtagtagaaacataccaaacacacgctcatcaaggggaattattacaagctaggaaacaaatccggaagaatctcgtgcctggaacagctagctgtttgtacgtgaattaacgaactagtaccataatgcacaaacatgtgtgtgctgtaagaagaatgatgacgaagaaatcacaaagtctaagacgaccggtagatgctctagaacatgatcccggcggccgcgaccgcgacgggtagcgcggcgagggcgacgaggcctccggcggcggtgacgcgtcccgcgggggacttggctgagcccgtcggcgtgttggctgcagaacacacggcagcggtcggaggcgaagtcgtcagatgagatagcaaaggactccagtccaggagcatcaatcaaagcaagcgaaggacagcaagttcgttaccaggcacatctgggccgatagaagatggagagaggcctgccatgggcgccgcagtaggcaccaatccctcggggatagggaatccgaaagctgcagataggaaaaaaaaacgtccactgaaacttaaaaacgtgatcaagccatggtcttagttaaaagtgagatctctgaacaagtagattagctgctagagcgacttccatttcgtgagtaattgtgtcgtcgtaacgtgctaaaaaaacaaacaaacaaacaatgcatgactggctgactgtgcacaaggcatgcacgacatggcagcagtaccgtacgtatagtatatatacctgcgcaggcgctaacgggcggcgcggtgaggcggcag

SEQ ID NO: 218884 - DNA, 3007 bp, Zea Mays
gacctcccccgaccccttgccggattacaggtgtcgcggcccggcgtctgctcgtacagttggtttccttggctggtaggagtcgtggtgcatggtcacggccgcgccggcaggaccgcagcagaagtgatcggggagcgctcttggttgtggcggcggctccttggctgcggggtttgggatcctaggaagtaagcgtttggaggccagaagattcctgcatgtttaggtaatggcgtctactgcaaaggaaaaaacaaagggctgtcgaccaaaactttttacagccaaggagaagaaagttgcaaagagcacaaagaatccaggccgccatgctgctaagcttgcgccaagttcttctaagacatcatcatcatcccccttgagaacgttttcagaccagaggttaagagcatgcgcctcagccatttccttgcccaatcttctaataacactacaactgaacccatcagaatatttgtttccacctggaatgttggaggaaaaacacctattgctgcactgaacctggatgactttatcccccctgatgacaattccgatatttatgttttgggttttcaggaaattgtccctctcaatgctggtaatgtgcttgtaatagaagacaatgaaccagctgctagatggcttgttcttataaaccaatcactaaatcgaccagctgacattgatgccaacgtctttcagcatgaaccatctccctctgttgattcttcttcctctcgagcttcatcaagcatcggcacctcattctccgacctatcaaaaacagcaagtggtgccacaatcttccagaattccttgttaaaagccattagcaaatctttcatgccagtgcgtagaaaacaacttaaggcctgcaattgcccggtagaaatgaccagaacgtcctacagggatgcttgctttggatgtcaaaaagcatatgcagatgagactgattcctctggagaggatgaagagaaagggaaagataaagagaaatcaagggactctgatggctctgtggtcgatggaattacttctggtcctgccactagggatcaactaaaatataatctcatagcgtgcaaacaaatggttggcatttttgttactgtgtgggtgaagaaagagctagtgcagcatattgggcatctaaggaaggcttgcatagggcgcgggattctgggctgtcttggaaacaagggatgtatatcaataagcatgacactgcaccagacaagcttttgtttcgtatgcagccatttggcttcaggtcaaaaagaaggagacgaattcaggaggaactcggatgttctagagataatgaggctcacaatgttttctaggatctgtagaagagctggaagaaaaatcccggagagaatagttgaccatgataaggtgatatggcttggtgatctgaactaccgtattgcactgagctatgcagataccaagaagcttttgatggaaaatgactgggatgctctttttgaaaaggatcagcttaaaattgaacgggacgctgggcgagtatttaagggttggaatgaggggaagatatattttgctccaacatataagtactcctttaactcagatgcttatgctggtgagactgcgacatcaaagaaaaagagaagaactcctgcgtggtgtgacagaatattgtggcgtggtgatgggattgtacaattatcctactaccgcggggagtctagattttctgatcaccgtcctgtttgtggaaccttcgctgttgaggttgaggtgctaaacaagaagacaaacaggcgctcatcaaatgctgacatgagaattgatgctgaagagctcttacccacgggcaagggcaagggtaaaagagatgagaatcatgttgcacgcgaggaggagaggctagtattgcagccggactcgcagatgccgtacgttccctcctcattgatgttccaacggccagcgctcaagatggacggacgattcaccggctcggcccacaacagctcatcaccacccatgtttccctctcaccacccgtgccaaacagccaattcatcgcagccaccggtaccgcgcgccgctgggcagcatttgctaccttgtcgcgtccgtgcgtggatcgtgactccttgaattgtggcccggggcagaggaggaataagccagccatcgagatcgagattgaactgcatgcatacagtgctccgtagtagaaacataccaaacacacgctcatcaaggggaattattacaagctaggaaacaaatccggaagaatctcgtgcctggaacagctagctgtttgtacgtgaattaacgaactagtaccataatgcacaaacatgtgtgtgctgtaagaagaatgatgacgaagaaatcacaaagtctaagacgaccggtagatgctctagaacatgatcccggcggccgcgaccgcgacgggtagcgcggcgagggcgacgaggcctccggcggcggtgacgcgtcccgcgggggacttggctgagcccgtcggcgtgttggctgcagaacacacggcagcggtcggaggcgaagtcgtcagatgagatagcaaaggactccagtccaggagcatcaatcaaagcaagcgaaggacagcaagttcgttaccaggcacatctgggccgatagaagatggagagaggcctgccatgggcgccgcagtaggcaccaatccctcggggatagggaatccgaaagctgcagataggaaaaaaaaacgtccactgaaacttaaaaacgtgatcaagccatggtcttagttaaaagtgagatctctgaacaagtagattagctgctagagcgacttccatttcgtgagtaattgtgtcgtcgtaacgtgctaaaaaaacaaacaaacaaacaatgcatgactggctgactgtgcacaaggcatgcacgacatggcagcagtaccgtacgtatagtatatatacctgcgcaggcgctaacgggcggcgcggtgaggcggcag

SEQ ID NO: 218885 - DNA, 2557 bp, Zea Mays
gttggttcacattcttattttccaaactaagcttgcgccaagttcttctaagacatcatcatcatcccccttgagaacgttttcagaggttaagagcatgcgcctcagccatttccttgcccaatcttctaataacactacaactgaacccatcagaatatttgtttccacctggaatgttggaggaaaaacacctattgctgcactgaacctggatgactttatcccccctgatgacaattccgatatttatgttttgggcatgaaccatctccctctgttgattcttcttcctctcgagcttcatcaagcatcggcacctcattctccgacctatcaaaaacagcaagtggtgccacaatcttccagaattccttgttaaaagccattagcaaatctttcatgccagtgcgtagaaaacaacttaaggcctgcaattgcccggtagaaatgaccagaacgtcctacagggatgcttgctttggatgtcaaaaagcatatgcagatgagactgattcctctggagaggatgaagagaaagggaaagataaagagaaatcaagggactctgatggctctgtggtcgatggaattacttctggtcctgccactagggatcaactaaaatataatctcatagcgtgcaaacaaatggttggcatttttgttactgtgtgggtgaagaaagagctagtgcagcatattgggcatctaaggaaggcttgcatagggcgcgggattctgggctgtcttggaaacaagggatgtatatcaataagcatgacactgcaccagacaagcttttgtttcgtatgcagccatttggcttcaggtcaaaaagaaggagacgaattcaggaggaactcggatgttctagagataatgaggctcacaatgttttctaggatctgtagaagagctggaagaaaaatcccggagagaatagttgaccatgataaggtgatatggcttggtgatctgaactaccgtattgcactgagctatgcagataccaagaagcttttgatggaaaatgactgggatgctctttttgaaaaggatcagcttaaaattgaacgggacgctgggcgagtatttaagggttggaatgaggggaagatatattttgctccaacatataagtactcctttaactcagatgcttatgctggtgagactgcgacatcaaagaaaaagagaagaactcctgcgtggtgtgacagaatattgtggcgtggtgatgggattgtacaattatcctactaccgcggggagtctagattttctgatcaccgtcctgtttgtggaaccttcgctgttgaggttgaggtgctaaacaagaagacaaacaggcgctcatcaaatgctgacatgagaattgatgctgaagagctcttacccacgggcaagggcaagggtaaaagagatgagaatcatgttgcacgcgaggaggagaggctagtattgcagccggactcgcagatgccgtacgttccctcctcattgatgttccaacggccagcgctcaagatggacggacgattcaccggctcggcccacaacagctcatcaccacccatgtttccctctcaccacccgtgccaaacagccaattcatcgcagccaccggtaccgcgcgccgctgggcagcatttgctaccttgtcgcgtccgtgcgtggatcgtgactccttgaattgtggcccggggcagaggaggaataagccagccatcgagatcgagattgaactgcatgcatacagtgctccgtagtagaaacataccaaacacacgctcatcaaggggaattattacaagctaggaaacaaatccggaagaatctcgtgcctggaacagctagctgtttgtacgtgaattaacgaactagtaccataatgcacaaacatgtgtgtgctgtaagaagaatgatgacgaagaaatcacaaagtctaagacgaccggtagatgctctagaacatgatcccggcggccgcgaccgcgacgggtagcgcggcgagggcgacgaggcctccggcggcggtgacgcgtcccgcgggggacttggctgagcccgtcggcgtgttggctgcagaacacacggcagcggtcggaggcgaagtcgtcagatgagatagcaaaggactccagtccaggagcatcaatcaaagcaagcgaaggacagcaagttcgttaccaggcacatctgggccgatagaagatggagagaggcctgccatgggcgccgcagtaggcaccaatccctcggggatagggaatccgaaagctgcagataggaaaaaaaaacgtccactgaaacttaaaaacgtgatcaagccatggtcttagttaaaagtgagatctctgaacaagtagattagctgctagagcgacttccatttcgtgagtaattgtgtcgtcgtaacgtgctaaaaaaacaaacaaacaaacaatgcatgactggctgactgtgcacaaggcatgcacgacatggcagcagtaccgtacgtatagtatatatacctgcgcaggcgctaacgggcggcgcggtgaggcggcag

SEQ ID NO: 218886 - DNA, 3323 bp, Zea Mays
cctcgccccagtttgcgccgcgcccgtcatggccaccccgtccgtggtgcaggcccctctatgcttcgtttctccacagggtgattccatgtcccgctcgcgatggcccctgcactaccgctttcgattcaagggtcgcctcgccgcagacaaagcccacgagggcgcacaaggagagccccgacggttttgtcacgaagccagagatgctgaccgatgggatagtgaagctgatgatttggcaccgcaccattcccagcatgcaaggatgccattttctcgatggggagaacagaatcgggacaggaatggagatggaggaagacgaccgagccgctcgagtgctgctgagctcccagtgtctctgtctctgatgaggaggtacacactaaatgagaagaaagtgcagattgttgatacgacttgctcttgtttttcaaaggaggcacttttaaattcgctacctagacttttgggctcactgtcttcttcggttcggtgaacatggacacaatgcaaccaagcatgtagcctcattaatcagtgtagatacgcctaaagtcggccctgacatacagcaacgcacaaccaagaaaagagcgttcgatctgttagagctcgatcatcgccgaaaaaggctatgaagtaactgtttgtaagtcaacttgaacgtaaagacactcctgatgagcctaggtatgtacttccttactgataaacaattagcagattgcaatcgccaattgttatgttcaacaaacatatatacatctactacggttgaacttctacgttccaaattagaggctctagaatttataaaacggaactaggaaaggaatactctcttctaaaaaacatacatgtgcgtctgtagataacttcatctaacatcacatagtgtcaccttaacacaaagaattaaaggctctgtcaaagtttacgatactatacatccaagctcctcgagttgttgttatttttggcttgactgaactgctagatggttagattcagatcaactctgaattgattttgatgtatatcaaaaagggctttgttgtatgtatatagaattttttgaatatgaactagctcaggcatttaagagtcttgttcaaatgtttagatatttcagccattgcacaatctggtagtcttcaggccattacctgtgttgtatagtcataccaaccactgcacactcaatcagtcttttgaacatttttgtacgtataaatagagcaggatagtaacacatttgtcttgatgctaacaaatagcgatcatcgagtatctaccaaaacaatattattggttctttttatgtgagcatagataacaactttaaaaaaatatgtctaatgatgggaaaatatgtctctcacaaaaatgacttctaccctagacaaacacacttgggttgttggttttagtaatatcttcattttttgcattatgttttaagagtagaaattttcttaaattatattataaatgcggagcatttcatcaaaaggcccataacttaaaattttaagtatcacctgatgacagaaaggtgtgccacattccatgtacctagcagattatgtgtttagtagtggcacaaaaaccaattcatttgtagcttcttcccactctttaacacactcattttcatctatataagagatcccctctcgcttgaattttatgaaacctcaaggtttttcagcattgaaaacttgtgttggttggctagatgactttttttgttttgtacttcctgcataccaaaatgatcagaagtctgatccataaaccatttgcaataaagtcaatcaatatttttcagaaggataaaattaacttccatcaccaaatttaggtgttacaatttgaaggctttcccccaccttctctatatgccttgtggtttggttgtgggaaaacttatctatattaacaatgtacactttgaaggctatctgatcgccacagcaggatccaaataatctcagaatattaggtaagaaacattaggccagttcttggttagtaaggccgtgtttggtttcatacggattatagaatctggagtttgcgcttgatttccaaaaatcagtaccaatcaggaagtacagaagtagtagtttaatcaaggcacgcttgatttccaaatgttcttgtttaatcaaggcgcacttgattaccaatcagcaagtacagaagtattaccaatcagcaagattgaccggttgtgtgatttggttagtaaggagcacttcatttccaaaaatcagtaccaatcagcaagtagatactgaatattctgagtcggtttggtttccttttctactgaatgttcttgtttctatactgaatgttcttgtttccatttctactgatactaaatcgcttatcattgcagcacataagtagtagtttaatgtatttgctctgattccatatgattgaaattgttaaaatcacagaaatgttgtttttttgatgataaatctatgatgttgtccttgcctacaaatctaaatattttggtacattagggaaattttgaaagtttattgttcgcattctaggactaatcgtcttccactatttaagtcagactgatgatttgcatagtgagtataccaaatgtgctctcgttgagtgctgctatcaggttgaactgttttatatatctttcagtttgaacagacatatttcacattaattggaaacaactaacctaaagatttcaaggcgtaaccataacctattaagtctttgcaattttttggcgcaaaactgtatttgcatttttaatcaaggcaacaactataacttctttgcaagtctattttccatctcatgtttacagtatagttgattttacaaactgagggaggtgccgagggagcaaaattttctcagtttggcgctgatttatcaagatcaataaagtgcaagacacactttccactaatggaagcagacacctaaaaatactggagagtatgtgcacctgaccaaagaattactaacgagttgtgaaagtatccaatgacaggttctagcactgttggttcaaggaaatgacacaacaatatggtgaaatggaaatggagcacaggctgcacatgagtctctcaaaaggagctcacgcaacactatcggtactgtcgccgaggacaaggttgtccctagagtccattcaattgacatggaaacgtgttttgtttttgttgctgatgatgacgatctggatggtgaagagtgagctagactcatatttggaaaacatttcggtaaagataatagtgccgctgacaatagaa

SEQ ID NO: 218887 - DNA, 3133 bp, Zea Mays
ctggtccagcacgccgctcatccaagggcaactggactctagaagaggatgacatacttcgcaaagctgttgaaacctacaagggaaaaaattggaaaaagatagctgaatgttttccaggtaggactgatgttcaatgtttgcatagatggcagaaggttttgaaccctgagcttgttaaagggccttggtcgaaagaagaagatgagatcattactcagatggtaaataaacttgggccaaagaaatggtcgaccattgcccaagctcttcctggacgtattggaaagcaatgtcgggaaagatggcacaaccatcttaatcctgggatcaataaggacgcatggacacaagacgaggaaatcaggctcatccatgctcatcaaacttatggaaacaaatgggctgaattgacaaagtttttaccaggaaggacagacaatgcaattaaaaatcattggcacagctcggtgaagaagaaagttgattcatacagatcatctggtttactggctcaatcccagggcttcacacctgttgaatacactgctggtggtttaaatgttgattcttcatctgcaataaccaatcaaattagcgaaggcagtggttttaatgtttttcgggaggctgaagattcgatggagttaagtcagtcttcgtttgccaagggttcttgctctcaggaggagcaaaatgatgtgactttgggatctcatttgcatgtgcatgaatctttgtgtccagatggttccactaatgatggcaatggtgcttctggtttacctgacattcatcaccgcttatgcacttctgacatggatcaagataaacacttgcaggaaggaatggatttggataaacacttgcagcatgaattctctcaaggaacggatttgcatcttgatgtagatgaagtgccaaacaactttgtgataaaaggtagccagtcatctaatgagcttgcagttcaatttcatgacacagagattatgaatagttcaaaaaatgatggagtgtctttggtaccacatgctataacaccatgtgttcccatcttacctagtgtttctggatgtgtgcataacataaatgtgatatacgaaatgggcataaaaaatgataattgtttccaatctgaaaagtgccaggatatttccattcaatcaggtgcatactcgtctgaagctgcaggcagctttttagcaccactttacccattgcagacatctgaaccagcaataatgatgggtggccctgtgtactatcagagttctgtaatgtcattaccaccaggctttatttcttctgatggtgcttctaatgcatctggtgtcaaatctgagacaagttactatcctgtttctcgccaaaatttggagattaaaacttgccacaatgcttctggtgatcctgaacaaaattcatatattagcagcgaagatgacagaaacaagacttctgaacctatgggcagaatatcagaatctgaaaagaaacagcaagttgatgttgaacaatcatgtttggagcctgcagcctgcattggaaaggaagcattatctagtcatggtgacaccatattaagtaaaaaggaggatgctggagctctatgctatgaacctccttgctttcggagttttgaatttccctttgtcagctgtgagcttgtaaactccagcgatctcccagaatatagtcctcttggcattcgagagttgatgaggacatccttgaacttccctaccccagtaagattgtggggctcccctactagggatggtagccctgatgctgtgctaaagaatgctgccaaaagattcatgtgcaccccgtccataatgaaaaaaaggcacagagatcttttatctccagtttctgatataagaactgacaagaaaccaaatactgaaagggattttatgagctcaggcatatcctctacaagagttgggaaatcttgcatggatagcgctgatgattcagctgatttagtttcaccgaaagagagtgcatttcaaaagaagctgaagctttgtcacgaaaacaaagaaaatttgaatgaaattgctgatcaaggagaaaatgaagccaatgcaaagcattcttcagggattcttactccgagcagtgttgacaaccataatacacataagcatggtccaaattttcgaattcaggagctaaataccactgtacaggctttgtctaactctaaagacataatattttctagatcaaagccatcagaacatgttgaaaaatctgcagcctgcattgatgcagattacgagtatttgaacatattggctgatactccaggtattaaaagaggcttagaatctccttctgcctggaagtctcctgtgttcacaccattccaggatgcatacttcatgagcccagcaagcagagcttttgatgccttaggattggtgaagcagattaatgagcagagtgcttctgctgtggaggaagcacatgaagttctggcaaatggaagcccatggaaacaacataacaaggaaaactctgacaaagaaaatatagaaaatacagctttgaagcatgagcatgtcacaagcaaacctccatcgatactcatggtagaggcacgggtgctcgatttcaatgaatgctccacacctgtgaggaagaaagacgataagaaagtggaaatagttttaggaggacctgcaacatcccctgttacttcctcgcatctttggataaatatgcggtagccctttgaggttgcgacatcgcctggcgctggttgcaagtcaccatgggcagcatgccgatgccgcgccgacgctcccttccccagtccctatcgccacgccggtgtcaccaccgtccgttgggattagggttgcgtgtgcgtcatgtcgcacgtcaggcgtgcagagaggcaacaaccctccaatcaggctaaagattgttgggtccgatgggccacatgatagagaaagaggctggttgatatgaaattttggtccaaatagctataaaacattgttgttttttatgtttttacaatattttagtgtgtatacattgcatatacatgtttacataatttgtttcaccaaaaataattggtattcaaatgaatacctttgattcaata

SEQ ID NO: 218888 - DNA, 2984 bp, Zea Mays
cgccgctcatccaagggcaactggactctagaagaggatgacatacttcgcaaagctgttgaaacctacaagggaaaaaattggaaaaagatagctgaatgttttccaggtaggactgatgttcaatgtttgcatagatggcagaaggttttgaaccctgagcttgttaaagggccttggtcgaaagaagaagatgagatcattactcagatggtaaataaacttgggccaaagaaatggtcgaccattgcccaagctcttcctggacgtattggaaagcaatgtcgggaaagatggcacaaccatcttaatcctgggatcaataaggacgcatggacacaagacgaggaaatcaggctcatccatgctcatcaaacttatggaaacaaatgggctgaattgacaaagtttttaccaggaaggacagacaatgcaattaaaaatcattggcacagctcggtgaagaagaaagttgattcatacagatcatctggtttactggctcaatcccagggcttcacacctgttgaatacactgctggtggtttaaatgttgattcttcatctgcaataaccaatcaaattagcgaaggcagtggttttaatgtttttcgggaggctgaagattcgatggagttaagtcagtcttcgtttgccaagggttcttgctctcaggaggagcaaaatgatgtgactttgggatctcatttgcatgtgcatgaatctttgtgtccagatggttccactaatgatggcaatggtgcttctggtttacctgacattcatcaccgcttatgcacttctgacatggatcaagataaacacttgcaggaaggaatggatttggataaacacttgcagcatgaattctctcaaggaacggatttgcatcttgatgtagatgaagtgccaaacaactttgtgataaaaggtagccagtcatctaatgagcttgcagttcaatttcatgacacagagattatgaatagttcaaaaaatgatggagtgtctttggtaccacatgctataacaccatgtgttcccatcttacctagtgtttctggatgtgtgcataacataaatgtgatatacgaaatgggcataaaaaatgataattgtttccaatctgaaaagtgccaggatatttccattcaatcaggtgcatactcgtctgaagctgcaggcagctttttagcaccactttacccattgcagacatctgaaccagcaataatgatgggtggccctgtgtactatcagagttctgtaatgtcattaccaccaggctttatttcttctgatggtgcttctaatgcatctggtgtcaaatctgagacaagttactatcctgtttctcgccaaaatttggagattaaaacttgccacaatgcttctggtgatcctgaacaaaattcatatattagcagcgaagatgacagaaacaagacttctgaacctatgggcagaatatcagaatctgaaaagaaacagcaagttgatgttgaacaatcatgtttggagcctgcagcctgcattggaaaggaagcattatctagtcatggtgacaccatattaagtaaaaaggaggatgctggagctctatgctatgaacctccttgctttcggagttttgaatttccctttgtcagctgtgagcttgtaaactccagcgatctcccagaatatagtcctcttggcattcgagagttgatgaggacatccttgaacttccctaccccagtaagattgtggggctcccctactagggatggtagccctgatgctgtgctaaagaatgctgccaaaagattcatgtgcaccccgtccataatgaaaaaaaggcacagagatcttttatctccagtttctgatataagaactgacaagaaaccaaatactgaaagggattttatgagctcaggcatatcctctacaagagttgggaaatcttgcatggatagcgctgatgattcagctgatttagtttcaccgaaagagagtgcatttcaaaagaagctgaagctttgtcacgaaaacaaagaaaatttgaatgaaattgctgatcaaggagaaaatgaagccaatgcaaagcattcttcagggattcttactccgagcagtgttgacaaccataatacacataagcatggtccaaattttcgaattcaggagctaaataccactgtacaggctttgtctaactctaaagacataatattttctagatcaaagccatcagaacatgttgaaaaatctgcagcctgcattgatgcagattacgagtatttgaacatattggctgatactccaggtattaaaagaggcttagaatctccttctgcctggaagtctcctgtgttcacaccattccaggatgcatacttcatgagcccagcaagcagagcttttgatgccttaggattggtgaagcagattaatgagcagagtgcttctgctgtggaggaagcacatgaagttctggcaaatggaagcccatggaaacaacataacaaggaaaactctgacaaagaaaatatagaaaatacagctttgaagcatgagcatgtcacaagcaaacctccatcgatactcatggtagaggcacgggtgctcgatttcaatgaatgctccacacctgtgaggaagaaagacgataagaaagtggaaatagttttaggaggacctgcaacatcccctgttacttcctcgcatctttggataaatatgcggtagccctttgaggtgggtgggcgtggggatgcttcgcctatgctgttcagtatgtacatgtctgttattcccataatttccaccgttttgaaatacacattccaattagtactttattctttgtgcttggtaccctaaatgtcaattctaaatggaaatacatttttttgtagtgttaagatttgtaatgtgtcatttgattatgttaaatattaaacaaggcaatatatttaaattcagagtatattatgaaa

SEQ ID NO: 218889 - DNA, 661 bp, Zea Mays
cccgcctgtccggtgtcgcgtgccgaggctgtgaggccgtcgcgtctcgcgtcactggctccccgctcctcgcagcaccaaaaacgcggcaggccgagaaatgttcccgaccgcgaggaccatgacaccgagcaggagacggaggaaggggagcgggaggcggtggcggttacccgcgcctgcacctggcttcaagcctccgatccgcccaaggcatcataaatgatgaatatgggggcacattgtatgatggattccttggagtgctaaatgctactccggggttgtcccaaatcatttatagcttggcaggagtagcaacaggcatctattcttcactgtcaggaattcagtggaatggaagatatgacatatgccagaaccgagaaaatgtttggaaagtgagaaggtgctttgtattgggtgttaaaggactactatgtctgctattaaacatgtagaagaacacatttcagcataatctagtctacataagaatgttgacagcaagctgaaaaaagttcccatgaaactggtatctgtcaagagccaagatcaaacatcaattctcaaccaacaaattgatgaaattagacaacatggatgggaagatctctttgaggatactaaatcattttgtattcaatataatatcattgtg

SEQ ID NO: 218890 - DNA, 528 bp, Zea Mays
cccgcctgtccggtgtcgcgtgccgaggctgtgaggccgtcgcgtctcgcgtcactggctccccgctcctcgcagcaccaaaaacgcggcaggccgagaaatgttcccgaccgcgaggaccatgacaccgagcaggagacggaggaaggggagcgggaggcggtggcggttacccgcgcctgcacctggcttcaagcctccgatccgcccaagaattcagtggaatggaagatatgacatatgccagaaccgagaaaatgtttggaaagtgagaaggtgctttgtattgggtgttaaaggactactatgtctgctattaaacatgtagaagaacacatttcagcataatctagtctacataagaatgttgacagcaagctgaaaaaagttcccatgaaactggtatctgtcaagagccaagatcaaacatcaattctcaaccaacaaattgatgaaattagacaacatggatgggaagatctctttgaggatactaaatcattttgtattcaatataatatcattgtg

SEQ ID NO: 218891 - DNA, 248 bp, Zea Mays
cccgcctgtccggtgtcgcgtgccgaggctgtgaggccgtcgcgtctcgcgtcactggctccccgctcctcgcagcaccaaaaacgcggcaggccgagaaatgttcccgaccgcgaggaccatgacaccgagcaggagacggaggaaggggagcgggaggcggtggcggttacccgcgcctgcacctggcttcaagcctccgatccgcccaaggcaaagtcaaggtaaccagtaaacataggttgaag

SEQ ID NO: 218892 - DNA, 1878 bp, Zea Mays
gtagctgtagccgtgtaataaggtccttccggcctcctccgcattcctaattgcagcgcgcggcattggcacagtagatgaactagagttcgttcgcgtccctgctggagtgctgggcaccggcgggacaacgacgatgggcaggaggctgccagcgggcggcggcgctgtgcggtagcgcccgggcggcggcgacgcgggtgaggaagaagcgggtgcagcggcgggcgccgccgtcgtcgtcctccaagctccctgcggcaccgcccagcggcggcggcaaggccgggagcgcagggaggaggcgcgtgctacgtcaacggcaacggcaacggcgagctgatggtgggaggtcgtcgtcggcagcggaaagggcggcggcggtgggcggcgggtcatggtgctgggccgacggccgcgccgaggccgccggcgcgctccagtgggcgctgtcgcaggccgtccggagcgacgacaccgtcgtcctcctcgccgtcgccaagccgccggtcgcccgagacgccgtcagtgattcctgtgtcaggatgctggggaccaagagccagcaacacctcgccgccctcaggaccgtctgtgaatcaacaaggccagaggtacccacaccacgcagatgcatgctactagtacatgatgatgatgaacagtgtaattaatcccccactaaaattattactaggataagataggtagtagtttggaatttcaaaacaatgtagtacatagtagtatatcctagctttccaaaaaaaactgttagtccaactgtctagaatacatgtaattaaattattaaacgaggctaaattgtttccgcgggatgcgcaatgatttgttgccgtccagtccagtccaccacggccaaaagcaacagccacttagcggattttgtggggggcgtggccgtggccgtggcccgtggcaccgcaccgcactggcgccaaaagaaaagaagaaaaaaacaaaataataatggtggaggcgtcgggatccgaggccggctctcaccagacgagatcatcacgcacaaatgcaggtgaaggtggagacgtgcgccgtggaggcggaggagcgggcggcggcggtggtggaggcggcgaggcggcacggcgcgtcactgctcgtgctgggccagcgcccgcggcggcacgccgtggcgcgctggctgcaggcgctgtggcgttgccggcgcagggctggcggcggcgtggtggagcactgcatcgagcacgcgccgtgcgtggcgctggccgtgcgccgcaggagctccggcggctacctcgtctccagcaagcatcgcagggacttctggctcctcgcgtagcagtcccacgctggttatcttcgatcagtgtcccctcctctatctctctccctcatttttgtccaccagttcgaaactattgtctgctgtaagttaatcacagcgagtttgcctctgctgctgcaaagctagctatatgaatccaaacggtgagcaatcaaaacttcagcttgtttcagaaaactgttcggtgtggaagaagatggccaaatatacgattctttgcgcgaagctagaatgacaactgatacgaaacacccttgtcaaattaattatgtattacttttatgacagactgtttttcgatattattaggacttctttttgtgaagtttactcagtttattttgaattatgtaaagcgatttaatttgagtattgaactacccaagccatgatcatgaggctaatcgtctgacaattaagtaaacagaatacctggatgattcagatagtaaatcgtaacactattcacacaaactactgcttgctgggatttatacaaagataaggtaaacagtttcgctgaaaagttg

SEQ ID NO: 218893 - DNA, 1707 bp, Zea Mays
ctggagcacgcatcgcagctcgccttgcgcctgtataaatatagtatgtagcagggagagggagggtacggtgtaggctgtagctgtagccgtgtaataaggtccttccggcctcctccgcattcctaattgcagcgcgcggcattggcacagtagatgaactagagttcgttcgcgtccctgctggagtgctgggcaccggcgggacaacgacgatgggcaggaggctgccagcgggcggcggcgctgtgcggtagcgcccgggcggcggcgacgcgggtgaggaagaagcgggtgcagcggcgggcgccgccgtcgtcgtcctccaagctccctgcggcaccgcccagcggcggcggcaaggccgggagcgcagggaggaggcgcgtgctacgtcaacggcaacggcaacggcgagctgatggtgggaggtcgtcgtcggcagcggaaagggcggcggcggtgggcggcgggtcatggtgctgggccgacggccgcgccgaggccgccggcgcgctccagtgggcgctgtcgcaggccgtccggagcgacgacaccgtcgtcctcctcgccgtcgccaagccgccggtcgcccgagacgccgtcagtgattcctgtgtcaggatgctggggaccaagagccagcaacacctcgccgccctcaggaccgtctgtgaatcaacaaggccagagtccagtccaccacggccaaaagcaacagccacttagcggattttgtggggggcgtggccgtggccgtggcccgtggcaccgcaccgcactggcgccaaaagaaaagaagaaaaaaacaaaataataatggtggaggcgtcgggatccgaggccggctctcaccagacgagatcatcacgcacaaatgcaggtgaaggtggagacgtgcgccgtggaggcggaggagcgggcggcggcggtggtggaggcggcgaggcggcacggcgcgtcactgctcgtgctgggccagcgcccgcggcggcacgccgtggcgcgctggctgcaggcgctgtggcgttgccggcgcagggctggcggcggcgtggtggagcactgcatcgagcacgcgccgtgcgtggcgctggccgtgcgccgcaggagctccggcggctacctcgtctccagcaagcatcgcagggacttctggctcctcgcgtagcagtcccacgctggttatcttcgatcagtgtcccctcctctatctctctccctcatttttgtccaccagttcgaaactattgtctgctgtaagttaatcacagcgagtttgcctctgctgctgcaaagctagctatatgaatccaaacggtgagcaatcaaaacttcagcttgtttcagaaaactgttcggtgtggaagaagatggccaaatatacgattctttgcgcgaagctagaatgacaactgatacgaaacacccttgtcaaattaattatgtattacttttatgacagactgtttttcgatattattaggacttctttttgtgaagtttactcagtttattttgaattatgtaaagcgatttaatttgagtattgaactacccaagccatgatcatgaggctaatcgtctgacaattaagtaaacagaatacctggatgattcagatagtaaatcgtaacactattcacacaaactactgcttgctgggatttatacaaagataaggtaaacagtttcgctgaaaagttg

SEQ ID NO: 218894 - DNA, 497 bp, Zea Mays
ctctgacctcgtcatgagggctttcattcaagatttttgaagatctatctagaacttccaccaatagtccaaccattacaaatggaagaggatctagagcaactgaaagtttttgaaaacagctatcggatgaaggtgatcaaagtggagcaaaatgcccgtggtgtggatgcacctgaggtgcattgagaaaatcgaagcgctgacgtgagcgagaaatatccagtagaaaatgatggcagagcgagtgctttgcattgctatcagtgtaggcttgataggagacttttggttgtgatatcttattttctaaatagtatgataccagataggggggccgtaagggcgccttttgctctagtattaggctgtctccagcaacgtctcctaaatttcgtcctttaaagtaatattctttatcatttacagcatcctctaaaaaattcgtcctctatattttcttcatctccaacaacgtcctctaaaatcgatcctct

SEQ ID NO: 218895 - DNA, 560 bp, Zea Mays
cttctctgacctcgtcatgagggtgatggtttttgcattatcggttctttagcgtgtcgactgtatattttgttgaaccatggctttcattcaagatttttgaagatctatctagaacttccaccaatagtccaaccattacaaatggaagaggatctagagcaactgaaagtttttgaaaacagctatcggatgaaggtgatcaaagtggagcaaaatgcccgtggtgtggatgcacctgaggtgcattgagaaaatcgaagcgctgacgtgagcgagaaatatccagtagaaaatgatggcagagcgagtgctttgcattgctatcagtgtaggcttgataggagacttttggttgtgatatcttattttctaaatagtatgataccagataggggggccgtaagggcgccttttgctctagtattaggctgtctccagcaacgtctcctaaatttcgtcctttaaagtaatattctttatcatttacagcatcctctaaaaaattcgtcctctatattttcttcatctccaacaacgtcctctaaaatcgatcctct

SEQ ID NO: 218896 - DNA, 861 bp, Zea Mays
ggagccttctctgacctcgtcatgagccacctgacttcaagacaaggaaggtgatgagttgcataggaactccgatgtgctagaaatcctcatgaataccaggtttctaatggtctatgtgcagtatgagcgttcactagaaacaatcataggacacgatcaaatcatctggctcgggggcctaaattaccgaatcatgctttcccatcagttagtgaaggcccttgtcgagatgcgcaattctagagaaagattagggtgatggtttttgcattatcggttctttagcgtgtcgactgtatattttgttgaaccatgtaagctgtcgtcttctctcagtgcaagctttgtgggagagatggaacaattgtgatgattcatgggctttcattcaagatttttgaagatctatctagaacttccaccaatagtccaaccattacaaatggaagaggatctagagcaactgaaagtttttgaaaacagctatcggatgaaggtgatcaaagtggagcaaaatgcccgtggtgtggatgcacctgaggtgcattgagaaaatcgaagcgctgacgtgagcgagaaatatccagtagaaaatgatggcagagcgagtgctttgcattgctatcagtgtaggcttgataggagacttttggttgtgatatcttattttctaaatagtatgataccagataggggggccgtaagggcgccttttgctctagtattaggctgtctccagcaacgtctcctaaatttcgtcctttaaagtaatattctttatcatttacagcatcctctaaaaaattcgtcctctatattttcttcatctccaacaacgtcctctaaaatcgatcctct

SEQ ID NO: 218897 - DNA, 1290 bp, Zea Mays
ctaatctcctctatccaggctctgctagaactggtggaagtttgtacgggctaaccaagaagatgtggctgaggataacgctatgcttcttcctaggtcctatggtgattgtcatgtacccagatagtcattggtaatcggagctccgaccgagggactgcaaccgtgctctgtgaccatgtccaggtcgaggggttcagctcgggagccttctctgacctcgtcatgagggttcaattcgatttgcatgtcattgcaccaaacaagtttatgcttcgtctgcagccacctgacttcaagacaaggaaggtgatgagttgcataggaactccgatgtgctagaaatcctcatgaataccaggtttctaatggtctatgtgcagtatgagcgttcactagaaacaatcataggacacgatcaaatcatctggctcgggggcctaaattaccgaatcatgctttcccatcagttagtgaaggcccttgtcgagatgcgcaattctagagaaagattaggtgagagcttggtaaccctcaggtttcttttggttacccagtagtccagctaccaacacttgaaacaagctcttcagatgagaagcagcagaagcaacttttctttagaatctacttggtttctaaggattgtcagcatcataagttttccgccacatcctttcttatagggtgatggtttttgcattatcggttctttagcgtgtcgactgtatattttgttgaaccatgtaagctgtcgtcttctctcagtgcaagctttgtgggagagatggaacaattgtgatgattcatgggctttcattcaagatttttgaagatctatctagaacttccaccaatagtccaaccattacaaatggaagaggatctagagcaactgaaagtttttgaaaacagctatcggatgaaggtgatcaaagtggagcaaaatgcccgtggtgtggatgcacctgaggtgcattgagaaaatcgaagcgctgacgtgagcgagaaatatccagtagaaaatgatggcagagcgagtgctttgcattgctatcagtgtaggcttgataggagacttttggttgtgatatcttattttctaaatagtatgataccagataggggggccgtaagggcgccttttgctctagtattaggctgtctccagcaacgtctcctaaatttcgtcctttaaagtaatattctttatcatttacagcatcctctaaaaaattcgtcctctatattttcttcatctccaacaacgtcctctaaaatcgatcctct

SEQ ID NO: 218898 - DNA, 2113 bp, Zea Mays
ctgctaatctcctctatccaggctctgctagaactggtggaagtttgtacgggctaaccaagaagatgtggctgaggataacgctatgcttcttcctaggtcctatggtgattgtcatgtacccagatagtcattggtaatcggagctccgaccgagggactgcaaccgtgctctgtgaccatgtccaggtcgaggggttcagctcgggagccttctctgacctcgtcatgagggttcaattcgatttgcatgtcattgcaccaaacaagtttatgcttcgtctgcagccacctgacttcaagacaaggaaggtgatgagttgcataggaactccgatgtgctagaaatcctcatgaataccaggtttctaatggtctatgtgcagtatgagcgttcactagaaacaatcataggacacgatcaaatcatctggctcgggggcctaaattaccgaatcatgctttcccatcagttagtgaaggcccttgtcgagatgcgcaattctagagaaagattaggtgagagcttggtaaccctcaggtttcttttggttacccagtagtccagctaccaacacttgaaacaagctcttcagatgagaagcagcagaagcaacttttctttagaatctacttggtttctaaggattgtcagcatcataagttttccgccacatcctttcttataggtgattgtttgatccccaacctagactcaaagaaactttactgttagttgcagaattgatgctcagttcctttaaaaatgtctcttatagatggaatcggaacacacttgtgcagattagtatcacgatgtaattatttttatttataataatgagtattatttattcctagagttctcagtttttcttgttgtattcaatgaatacgccgttctaatacggtactcttcataataatatgcatgtttgtcagtcgttaagggaacttacaagctaaagaatttcacaactgctgttaaatatgattagaatttatccttagaaatgaccagacatcaaggaccatttactacagtctactaatctatacatgtaggcaagaaactgcacgtgggtgtcccattgagcctcttcctttttatgtcaaatatttctttcctatattttcttgtctttgacatttttttgtcgttcatatttggcctgtcattagagtgcaaagaaactccatgtgggtgtcccattgagcctcttcctctttatgtcaaatatttatttcctatgagagccgcgtcacctattatttttgccagaggccttgaaaagtcaggaacggccctgacactgacattctctcgtctgcgcggcgtacattctcctagccgccatcctcaccatgccgctgcggatcccgcccgcggtatgactccctcctcacctacgtggccacgcgcgacgcagccgcaacgacctaacccccatgtcgtcgctgacctcgcgtcccgtctcgctgctacgatgccttcgtggaagcttgaagggtgatggtttttgcattatcggttctttagcgtgtcgactgtatattttgttgaaccatgtaagctgtcgtcttctctcagtgcaagctttgtgggagagatggaacaattgtgatgattcatgggctttcattcaagatttttgaagatctatctagaacttccaccaatagtccaaccattacaaatggaagaggatctagagcaactgaaagtttttgaaaacagctatcggatgaaggtgatcaaagtggagcaaaatgcccgtggtgtggatgcacctgaggtgcattgagaaaatcgaagcgctgacgtgagcgagaaatatccagtagaaaatgatggcagagcgagtgctttgcattgctatcagtgtaggcttgataggagacttttggttgtgatatcttattttctaaatagtatgataccagataggggggccgtaagggcgccttttgctctagtattaggctgtctccagcaacgtctcctaaatttcgtcctttaaagtaatattctttatcatttacagcatcctctaaaaaattcgtcctctatattttcttcatctccaacaacgtcctctaaaatcgatcctct

SEQ ID NO: 218899 - DNA, 5763 bp, Zea Mays
ctagaactggtggaagtttgtacgggctaaccaagaagatgtggctgaggataacgctatgcttcttcctaggtcctatggtgattgtcatgtacccagatagtcattggtaatcggagctccgaccgagggactgcaaccgtgctctgtgaccatgtccaggtcgaggggttcagctcgggagccttctctgacctcgtcatgagggttcaattcgatttgcatgtcattgcaccaaacaagtttatgcttcgtctgcagccacctgacttcaagacaaggaaggtgatgagttgcataggaactccgatgtgctagaaatcctcatgaataccaggtttctaatggtctatgtgcagtatgagcgttcactagaaacaatcataggacacgatcaaatcatctggctcgggggcctaaattaccgaatcatgctttcccatcagttagtgaaggcccttgtcgagatgcgcaattctagagaaagattaggtgagagcttggtaaccctcaggtttcttttggttacccagtagtccagctaccaacacttgaaacaagctcttcagatgagaagcagcagaagcaacttttctttagaatctacttggtttctaaggattgtcagcatcataagttttccgccacatcctttcttataggtgattgtttgatccccaacctagactcaaagaaactttactgttagttgcagaattgatgctcagttcctttaaaaatgtctcttatagatggaatcggaacacacttgtgcagattagtatcacgatgtaattatttttatttataataatgagtattatttattcctagagttctcagtttttcttgttgtattcaatgaatacgccgttctaatacggtactcttcataataatatgcatgtttgtcagtcgttaagggaacttacaagctaaagaatttcacaactgctgttaaatatgattagaatttatccttagaaatgaccagacatcaaggaccatttactacagtctactaatctatacatgtaggcaagaaactgcacgtgggtgtcccattgagcctcttcctttttatgtcaaatatttctttcctatattttcttgtctttgacatttttttgtcgttcatatttggcctgtcattagagtgcaaagaaactccatgtgggtgtcccattgagcctcttcctctttatgtcaaatatttatttcctatgagagccgcgtcacctattatttttgccagaggtacagaaaagtctccttttattctagataccatttttggaaattcaatgctggattacatagttcataatatcatggtttcagtgtccagaatggagccgctaataatttgtcaactagatcaactaaagaaaaattgaatcagtctcaagcacaatcgtttaatagtgtgaaaattggatgaaactaatcgatcaagtgaagaagacaaaggaaaaatataggttttgttttttgccggtcagcaggtgtttagagaagaaattgaccggattaatagggtagacggtcgtactattaagaggggtcaatgaacttgatcggtgtaaaacttagtgcctcgtataatataaacggttgcatttacatgagggctaacaacgcttcgttttttaaaatacaaaatcttttgaaaaagcgcaaaaatatcaactctgtggttggtagaacgtccgagccaggaggccagctcgtccgcgactctgtcagagaagtctgctggcgccttgtctctgtctcccttcgctaccatccaagccaggaggctggaccgtccgcataaactgaattgagtttgggcagggaaagtgtgtttttgagtccttgcactatggactgtccggggtttttagccggacggtaagtggtccatgtgcagaccgtccggccataaaatggcggacactccgctcggattgttttaactgacgagtgctatgatattccatgttgacaggtcccggaccgtccggcccaggagggtggatcgtccaggcttgactttttctgacagcactgacaggtttcaacggtctttatagccgttactggtacgatggaccgtccggccatggggcgtggaccgtccatgtgtgcgcagaagttgtgctatttgcacataatgactaggtttgagttgtgggctataaatagaaatggagcttgtgtgtgagggctctcttgaccactcctagcatacattgagctcatttgtgatcctctaactcaaactctcatacttgttgcttgagatcgcattctagtgagtgattgagaagttctagtgcatttgcatcctttgagaagttctaccgcccccttccgcatactattcctccccgcaccaccgcagcaaacgtcggccccatcccgccatcttcctctccgcgctgcccctctccctgctcggatcggcacgcatggtactgttgtttctcctactcctctcttcttcgaggttctcgatctctcagctgaggcgtctgtgtcacctgccattccctagtagtctctccttcgggtgtcctaacatactcctctctccttctcgtgtcgtcgccccgaagcatgctactcctcgcgccaccgcagtttccgtgacccctccccgtttgtctccatggcggcgcggaatccgacttgacatggcggcattcttgacagacctcacccctcttctctgttagcaactctgtcggctagggcacgaactaacagtcgctagaggtgtggagaacgggaagatatgacatggggaagaagaagatagcagggaaggcgataatagaattgttatttttgttcttcgataccctctcctgtacagatacacgccatttatatatggacgcggtcacacaagtgtatcagtattgaggcccatattacatggcccaacgtggcccaaccacatttatatttggccaggggctggcgcactttgatctcctcgactgcgcttaagccttctcttctgccgcgtctgtttctgttgtcttgttcatccctttccacttatgattgcttgctaacagcttcatcgccttgtattgacctccagttgcctccccacttgccaacctatgtggtgaccatggcagtatgtctgaccagggccgtacctgtgggggtgccaagggtgcggccgcaccaggcccccaaaatcagagggtcccctagccactagacgctaacacttttttcctgttaaacctatctattctagacacaaatacgcaaagagcgatgcgctatcaactagtctcatttagattgttaaactaatgtctcaattgcttatcgaatactccatccgataaaaaatagtatttgttttagctcttgattttttatgtttatattcaactagatgatgatgaatccactaaagaagcaaaacaaattttattttgatatagagagagtattatttactatacacatgatggttgcatcggcagagagaagctttttaaaattgaaatatttttgtgaactatttatggtcaacaataacttaagagaggttaaacggcttgacgattctatatatcgaaaaaaagttgttggatgaaattgatctcaatgatataagcgatgactttgtatcacaaaatgttagaagatatttttaatgatatcaaataagaagtaagtgcttttagctatattttacatttgttatcttataagcatcaaaacagagcataataatttttatatgttaaatattcgatactgtatgtataattatatatatttgtgtgtggatggaccctccatatcggatttcgttcaaggccttgaaaagtcaggaacggccctgacactgacattctctcgtctgcgcggcgtacattctcctagccgccatcctcaccatgccgctgcggatcccgcccgcggtatgactccctcctcacctacgtggccacgcgcgacgcagccgcaacgacctaacccccatgtcgtcgctgacctcgcgtcccgtctcgctgctacgatgccttcgtggaagcttgaaggtatgatgtcccttccatctctcttctttgatggactgctctttgttgttccagttcactactaatgtgggttttgcctattggtaggaaaaaaaattctttacatctgggatgtaaagaatctcttttacagcccctcacatacaccagctgctggtatatataaatagaagaaaaaaataaattactaaaagattattttgtaaattttgatctgtctttgtgggcctttaagtggtgcatgtgaggggctgtaaaaggtggtgttcacatgcggtatgtatagattttttttcccggtggtaagcctggtgcgatggcgttggtaacaaaaaaaaagtagaatgcacgctttatttattttgatgccaaaaattcgaatcgaaactgcaattggccgcttacaatattattgttgacaaaaaatgaaatgcgtgctagcatcatagctaacgatattatcatacatgttttggtacatttagcactaaaaggtgtgctctgatgctatttgcatcaattaaaccatctttaagaatatgtcattggttacttcatataattttgtcttgtaatttgtttgaacttgtaatgcctggagaagtctgcagtaaaaaattgttaggatgcagtcgtactgccaggttcattaattaggtgaatttaggtatttgtagttttcaaaatgatgaatatgtacacagatgaatatgtatattatctaaaatttattggatgtaacgttcaattgtttcatgatacacatgtgttggttattggaggggaacggtggtgttctgtgttaggtttcacgacatatctctgtggagcagattggcatatgtgaaattgataagacggtggtagatgtaagatctcgcttcctgtatgtgcataatactgtgcagtgaccactgatattatgttttattgacttttagatgtttgagagcatttgctttctgttagatttctctgaacaccaataatttggtctatgtgtctttatctacattcagttgaggaatgcaattgattttactgatgtcacttgatttttcgacactgatgttagctgctcctactatgccttcttcaatttttaaaatgcattcattttcgtattttggtactacatgatatgaggacagcaaatgagatgactcatgacgtggttaattgagattcctttagtcttctgaatttccttcttttatgttatttgcttagtaggttgggttggattctgtgaggggtactgattcatgattaaaattgggtggacaggaggcatatttttgtaaaaggacaacaacagaggattgttcatttgttccttctcaagggtcatgctattttgcaaactaggttacctaggaaaatatatgctttatgattcacaagcaatgggattgcttttttgttaatatgatttcttgtattgtgatcattggcagggtgatggtttttgcattatcggttctttagcgtgtcgactgtatattttgttgaaccatgtaagctgtcgtcttctctcagtgcaagctttgtgggagagatggaacaattgtgatgattcatgggctttcattcaagatttttgaagatctatctagaacttccaccaatagtccaaccattacaaatggaagaggatctagagcaactgaaagtttttgaaaacagctatcggatgaagttc

SEQ ID NO: 218900 - DNA, 2322 bp, Zea Mays
ctggagttctgcctttctcagagcccaccccaccctcacggctccactcgagtattctgcacgaaaaagttaaaaatcaaactgaaccacgacaaagttcaagctcttctcaaccacagctcttacctttgtcacgatcatgatggagatcttaatagcagtattccacgttccgtttggttttagggactaaaaattaattcattcattttagttttatttagtagctaaattggcaaataagttgcaataaaacagggactaaactgttttagtctttagtccgtcaaagatctattaaatgagactaactcatattaattcaatattttgactctccttcatttgtccatggatcgctctggtcttgcatcttacaatttgttggtcagtttatataagattcctaatgttgtatctacatgtgttgcacaatattgatattttttgctatacactctcctgttgcagcccaaactataagtcctttatgtatctagaaaagctaaaacgacttataattaggaggagggtgtataacgctaatatttttttgtttcactatccatatttctttactgtcattttttactatattattggctttagacagattactatgatacttttcgtttttcttcaatagtgctcaacataatttaggatgagaaactggctcccactaattgttgttgcattgtccctctgttagttgttgcattgtcatttgttgaactacaggtgaaccatgaattaagacttgggatcatatcatcgtcattctctcttagtctctttcttgaaaaataattttttgtgcatggaaaaatgtgataaactgtgtttgaacaggacatatgtcaggcatcaaccaataagagggaaaagtggagacatggtttttgggacatatgtcactttttgggagggaaataggcttttttctcgatgttgaaacatggttttgtctttggtcacttgggctcatttcattagcattgtatggatcatcattggcagtaagaccgatgcaaccctactccttgatggcttggtacaaggcttcaaaatatctgaagtaagcaaatctgctagcctctcaaagtgagcctgagacctgcaaacctcaaagtgtcgggaattaagtgagacaatgtagaaggtgaaagaggcgagcatggcacaaaagtgtgaacaagcgacagtgatttgttgaacgaatgacaatcttttgaagacgcccactgccaattctctgcctttgtcatgtacaagagcacaatggttgttgtagcatatgaaccctgccgtggttattcatactaaatgtgaataacagaattcttgctttgtttgtggcctttgatctgcaagagggtctagcactgctaatctcctctatccaggctctgctagaactggtggaagcagtttgtacgggctaaccaagaagatgtggctgaggataacgctatgcttcttcctaggtcctatggtgattgtcatgtacccagatagtcattggtaatcggagctccgaccgagggactgcaaccgtgctctgtgaccatgtccaggtcgaggggttcagctcgggagccttctctgacctcgtcatgagggttcaattcgatttgcatgtcattgcaccaaacaagtttatgcttcgtctgcagccacctgacttcaagacaaggaaggtgatgagttgcataggaactccgatgtgctagaaatcctcatgaataccaggtttctaatggtctatgtgcagtatgagcgttcactagaaacaatcataggacacgatcaaatcatctggctcgggggcctaaattaccgaatcatgctttcccatcagttagtgaaggcccttgtcgagatgcgcaattctagagaaagattaggtgagagcttggtaaccctcaggtttcttttggttacccagtagtccagctaccaacacttgaaacaagctcttcagatgagaagcagcagaagcaacttttctttagaatctacttggtttctaaggattgtcagcatcataagttttccgccacatcctttcttatagggtgatggtttttgcattatcggttctttagcgtgtcgactgtatattttgttgaaccatgtaagctgtcgtcttctctcagtgcaagctttgtgggagagatggaacaattgtgatgattcatgggctttcattcaagatttttgaagatctatctagaacttccaccaatagtccaaccattacaaatggaagaggatctagagcaactgaaagtttttgaaaacagctatcggatgaagttc

SEQ ID NO: 218901 - DNA, 4379 bp, Zea Mays
ctagaactggtggaagtttgtacgggctaaccaagaagatgtggctgaggataacgctatgcttcttcctaggtcctatggtgattgtcatgtacccagatagtcattggtaatcggagctccgaccgagggactgcaaccgtgctctgtgaccatgtccaggtcgaggggttcagctcgggagccttctctgacctcgtcatgagggttcaattcgatttgcatgtcattgcaccaaacaagtttatgcttcgtctgcagccacctgacttcaagacaaggaaggtgatgagttgcataggaactccgatgtgctagaaatcctcatgaataccaggtttctaatggtctatgtgcagtatgagcgttcactagaaacaatcataggacacgatcaaatcatctggctcgggggcctaaattaccgaatcatgctttcccatcagttagtgaaggcccttgtcgagatgcgcaattctagagaaagattaggtgagagcttggtaaccctcaggtttcttttggttacccagtagtccagctaccaacacttgaaacaagctcttcagatgagaagcagcagaagcaacttttctttagaatctacttggtttctaaggattgtcagcatcataagttttccgccacatcctttcttataggtgattgtttgatccccaacctagactcaaagaaactttactgttagttgcagaattgatgctcagttcctttaaaaatgtctcttatagatggaatcggaacacacttgtgcagattagtatcacgatgtaattatttttatttataataatgagtattatttattcctagagttctcagtttttcttgttgtattcaatgaatacgccgttctaatacggtactcttcataataatatgcatgtttgtcagtcgttaagggaacttacaagctaaagaatttcacaactgctgttaaatatgattagaatttatccttagaaatgaccagacatcaaggaccatttactacagtctactaatctatacatgtaggcaagaaactgcacgtgggtgtcccattgagcctcttcctttttatgtcaaatatttctttcctatattttcttgtctttgacatttttttgtcgttcatatttggcctgtcattagagtgcaaagaaactccatgtgggtgtcccattgagcctcttcctctttatgtcaaatatttatttcctatgagagccgcgtcacctattatttttgccagaggtacagaaaagtctccttttattctagataccatttttggaaattcaatgctggattacatagttcataatatcatggtttcagtgtccagaatggagccgctaataatttgtcaactagatcaactaaagaaaaattgaatcagtctcaagcacaatcgtttaatagtgtgaaaattggatgaaactaatcgatcaagtgaagaagacaaaggaaaaatataggttttgttttttgccggtcagcaggtgtttagagaagaaattgaccggattaatagggtagacggtcgtactattaagaggggtcaatgaacttgatcggtgtaaaacttagtgcctcgtataatataaacggttgcatttacatgagggctaacaacgcttcgttttttaaaatacaaaatcttttgaaaaagcgcaaaaatatcaactctgtggttggtagaacgtccgagccaggaggccagctcgtccgcgactctgtcagagaagtctgctggcgccttgtctctgtctcccttcgctaccatccaagccaggaggctggaccgtccgcataaactgaattgagtttgggcagggaaagtgtgtttttgagtccttgcactatggactgtccggggtttttagccggacggtaagtggtccatgtgcagaccgtccggccataaaatggcggacactccgctcggattgttttaactgacgagtgctatgatattccatgttgacaggtcccggaccgtccggcccaggagggtggatcgtccaggcttgactttttctgacagcactgacaggtttcaacggtctttatagccgttactggtacgatggaccgtccggccatggggcgtggaccgtccatgtgtgcgcagaagttgtgctatttgcacataatgactaggtttgagttgtgggctataaatagaaatggagcttgtgtgtgagggctctcttgaccactcctagcatacattgagctcatttgtgatcctctaactcaaactctcatacttgttgcttgagatcgcattctagtgagtgattgagaagttctagtgcatttgcatcctttgagaagttctaccgcccccttccgcatactattcctccccgcaccaccgcagcaaacgtcggccccatcccgccatcttcctctccgcgctgcccctctccctgctcggatcggcacgcatggtactgttgtttctcctactcctctcttcttcgaggttctcgatctctcagctgaggcgtctgtgtcacctgccattccctagtagtctctccttcgggtgtcctaacatactcctctctccttctcgtgtcgtcgccccgaagcatgctactcctcgcgccaccgcagtttccgtgacccctccccgtttgtctccatggcggcgcggaatccgacttgacatggcggcattcttgacagacctcacccctcttctctgttagcaactctgtcggctagggcacgaactaacagtcgctagaggtgtggagaacgggaagatatgacatggggaagaagaagatagcagggaaggcgataatagaattgttatttttgttcttcgataccctctcctgtacagatacacgccatttatatatggacgcggtcacacaagtgtatcagtattgaggcccatattacatggcccaacgtggcccaaccacatttatatttggccaggggctggcgcactttgatctcctcgactgcgcttaagccttctcttctgccgcgtctgtttctgttgtcttgttcatccctttccacttatgattgcttgctaacagcttcatcgccttgtattgacctccagttgcctccccacttgccaacctatgtggtgaccatggcagtatgtctgaccagggccgtacctgtgggggtgccaagggtgcggccgcaccaggcccccaaaatcagagggtcccctagccactagacgctaacacttttttcctgttaaacctatctattctagacacaaatacgcaaagagcgatgcgctatcaactagtctcatttagattgttaaactaatgtctcaattgcttatcgaatactccatccgataaaaaatagtatttgttttagctcttgattttttatgtttatattcaactagatgatgatgaatccactaaagaagcaaaacaaattttattttgatatagagagagtattatttactatacacatgatggttgcatcggcagagagaagctttttaaaattgaaatatttttgtgaactatttatggtcaacaataacttaagagaggttaaacggcttgacgattctatatatcgaaaaaaagttgttggatgaaattgatctcaatgatataagcgatgactttgtatcacaaaatgttagaagatatttttaatgatatcaaataagaagtaagtgcttttagctatattttacatttgttatcttataagcatcaaaacagagcataataatttttatatgttaaatattcgatactgtatgtataattatatatatttgtgtgtggatggaccctccatatcggatttcgttcaaggccttgaaaagtcaggaacggccctgacactgacattctctcgtctgcgcggcgtacattctcctagccgccatcctcaccatgccgctgcggatcccgcccgcggtatgactccctcctcacctacgtggccacgcgcgacgcagccgcaacgacctaacccccatgtcgtcgctgacctcgcgtcccgtctcgctgctacgatgccttcgtggaagcttgaagggtgatggtttttgcattatcggttctttagcgtgtcgactgtatattttgttgaaccatgtaagctgtcgtcttctctcagtgcaagctttgtgggagagatggaacaattgtgatgattcatggtcagtggatgccacttactccctccgcttgtttttatttgttgccggttagtacaaaattgaattaagtagcgtcaaataaataaaaatggaggtagtactattgagcagagctagaaagaaacgaagacttgtttgatggtgtttgactgcagaggctatgaacctgttgatatttccattggagctggct

SEQ ID NO: 218902 - DNA, 808 bp, Zea Mays
acaccaacgaacttcgttaggctaccatgccgttgccccccgcggcccgcgaacccctgcgcggttgctcttttccctttttctatttcgcgagcgtgggtttgcaattccccgcgccgccgtgcgtccccggcaatgggaagctcactctgatgatcgctggtcggctcctctcactcgcagccatctctctctccgccacccgtcctcatttgcccccgaacactgtgacaccatctgctgcgcacgcaccctttctcaatggccgaagcgaagagggggatgggaaggatccgtgcagagaaaagtcttcgtgataatggcttctagccttctggaatatttaccacctgcggccaagcgtgtgaaaattgctcggaaagattggcaagctgaatgaccgaaggggataagatcattgaccgtgtgcgcaagtctggttgctctctcaggtgtccctatcagggcttagaaaggacgtgtttggacttggacgaactcaaggagaactacataatgacgatttagtgacggggtttttttaagaagggtttagtgatgacttgttacatgcagctttcggctccaggacttgggtttggtaagctgtttctctgttaagtctgctattgggggtacagatccaatgcaccgaatgatcaacagaaccataaacgtcgggctggtttggtaacttagccagacctgtgggcagcccatcccctgaggcgttttattgggcctcacctttttttcccccagattattttggcgtcggttttcatacgccaacataaatggagcgtca

SEQ ID NO: 218903 - DNA, 1834 bp, Zea Mays
ccatggataggagagaacgagagaggagatgagctcgaagctgctcgaagtccaaacggagacaccagagaaactcatggaggcaaagaacatcgttgtgccccctgtcggaggacacaccagggataggaggaacaccatcgacactgaccatgggttcaataggacgctccgggacaggaggagacaaaccagtaaggtgaccccatatgcgctagctgttgagacacacgcggagcatggtggaccactcccagaagttggtgccatcgaagttgctcttacattaattggtggagtgcagcgtgttgatgcttctggaacaaaggtattggtaaatcccaatttttgaagtttgctgctaaattgagcaaccgatctgtgatcacaactggtctcggaagcaccagtgctggtttaactgtcacagctgtaaaggatggtggggagtggatgcttgaggctggtgctcttgttttggctgatggtggcttatgctgcatagatgaattcgacagcatgcgagagcatgacagaacaacaatacatgaagccatggagcaacagacaattagcattgcgaaggctggattagttacaacactcagtacaaggactactgtctttggtgccacgaatccaaaagggcaatatgaccctaatgaaagtttgtctgtgaatacaacactttcaggaccactgttgagtagatttgatatagttcttgttcttctggatacacaaaatactggttgggatgaaatagtttcatctcatatactgaaggagaattctgatgaaaagaaagacaaggcagatgcttctgatataaagtggatgctcccccagttgagaaggtacatcaattatgtaaggaggaagtttaaaccagtgctgacaaaggaggctgaaagagttatctcaagctattatcatctacagagaaaatcaggaacacataatgcagcaaggacaacagtgcgcatgcttgaaagtttgataaggctagcacaagcacatgcacgattaatgttcagaaatgaggttagacaacttgatgccattgctgccatattatgcatggaatcctccatgacaacatctcctatagtggacatcgttggaaatgctttgcactcaaattttacagttgaccctgatgaagaatataaaacacaggagaagaagattctcaagaaactcggaataactcaaggatccccataattcaatacaaacatcagttgctgcatcctgtagatttattaacgcatggacttacatgctattctgcatattgaatcagtgatacatgaagtctcttggtggaacaaggcctgcctttgcagttcatggtgtatatacttcttttgggcatgtaatttgtccaaatttgcaatatgtatcagattggtcttttttgtgagctctttgatgatgggaatgttgtctactgctgaaagtacaacgtcattaaatcctgtaatattcgctcccattggagtcgagtccaggacctaagatgctactaaggcttttataacccctaggctatagttccttttgctgtatcagattggctttgtaatgtgtaacaatttcttgtcacttagtttattacttatgacatctatctgttcacttagtttatatcttatggtatctatctgttcaaattgaaagaaattaagttattgaatgagtgtcgtctgtcatttgttgtgctattgttcagtaaaacattttgatgatgtgaagaggggactaaggaggatctggagtttcagttttgtggagtgaatataaatgataaatacaccagtgtttctatgaa

SEQ ID NO: 218904 - DNA, 420 bp, Zea Mays
aactactactagcatgcatgtttattttttttttaattttaggtagacgtcggggaatgagaatgtgagtctcaccacgcgccgccggcccgccgccgccattgccactactatcccatcaccatcccggccggcgaggacctcggcatcctcagtgacgacgaggagggacgtcgtggtgaggatctaccagaacttgaaattggtttatccaattttattgtcgtggacaatctgctagttgttcctccagaaaagtttgacaagcttgagaatgtcatacgcaagatatgcagccaaattggtgagataaaagaaaatggtctatggatgcctttaaacccagagtcaaagaagacatatggttactgtttcattgagtataatacacctcagtgtaggcgtccacagacgcacggt

SEQ ID NO: 218905 - DNA, 1048 bp, Zea Mays
agatgaacccacggggcccaacttttcctgctgcatgaacgtgagatcgtctggccctgcggtcctgccgtcctggtggactcctaccagccatgccgtcttccttggccggcgcggcggcgcctatcggcggccgcgttgcggggctgtcctgatggagacgtcaatccccacccgagagttcatggatcgccgataatgaatgcctcatggctgcagaggctggtgacgtcgactctgcgaggtgctcctctgccgagttatccaaacaatgcccatttgaaggagctggagaaggccccagagaatctgtatctgttcaaggctgacgagccagaccacgacacgctaacagctgcagttgagggatgcgaggggatcttccatctcgccactccggcggtgcctgaagataagattgttgatcctgaggaggacctgatggctgatgtgatgaacaagaacgacagactggtacgtcatagacgtccgtgatgcggccgaatgctctacttctactgtacgagaagaaagtgtcatctgcgagatagatacatctgctcaccgaatcacgtttgcacagaggacttggcctggtaacctggttgaagaagatgtacacaaagtacagctacataaataagtaggctcgccattgcaaaaactttgaaaccctttaggccctgttcgttttttacagattggaggtccgacacggtttctgactggattgtttctctaatttatgtaagttttgataagctgaaatgaatcttggtccaatactaaacaaacgaacggacacttactttttttcagcgtggatcgttaacatgtcagaagctgatggatctggctgggaaccaaggaaacggtcttggacacagcgttgagcgctctgaaaaaggcatggcttctccaggctgtggccgggcgtccctgccgccttccccatctcttccgtcgatctgtcatgtgacgatataggagattgatcagttgcaatcatggtgaaaatttgattgtagtattggtttttcatcctccc

SEQ ID NO: 218906 - DNA, 651 bp, Zea Mays
ctcctagatgaacccacggggcccaacttttcctgctgcatgaacgtgagatcgtctggccctgcggtcctgccgtcctggtggactcctaccagccatgccgtcttccttggccggcgcggcggcgcctatcggcggccgcgttgcggggctgtcctgatggagacgtcaatccccacccgagagttcatggatcgccgataatgaatgcctcatggctgcagaggctggtgacgtcgactctgcgaggttatccaaacaatgcccatttgaaggagctggagaaggccccagagaatctgtatctgttcaaggctgacgagccagaccacgacacgctaacagctgcagttgagggatgcgaggggatcttccatctcgccactccggcggtgcctgaagataagattgttgatcctgagcgtggatcgttaacatgtcagaagctgatggatctggctgggaaccaaggaaacggtcttggacacagcgttgagcgctctgaaaaaggcatggcttctccaggctgtggccgggcgtccctgccgccttccccatctcttccgtcgatctgtcatgtgacgatataggagattgatcagttgcaatcatggtgaaaatttgattgtagtattggtttttcatcctccc

SEQ ID NO: 218907 - DNA, 442 bp, Zea Mays
agatgaacccacggggcccaacttttcctgctgcatgaacgtgagatcgtctggccctgcggtcctgccgtcctggtggactcctaccagccatgccgtcttccttggccggcgcggcggcgcctatcggcggccgcgttgcggggctgtcctgatggagacgtcaatccccacccgagagttcatggatcgccgataatgaatgcctcatggctgcagaggctggtgacgtcgactctgcgaggttatccaaacaatgcccatttgaaggagctggagaaggccccagagaatctgtatctgttcaaggctgacgagccagaccacgacacgctaacagctgcagttgagggatgcgaggggatcttccatctcgccactccggcggtgcctgaagataagattgttgatcctgagaatgctagtgccctgtactcaccac

SEQ ID NO: 218908 - DNA, 1430 bp, Zea Mays
cctgaatgtaatatgcagcatacactttcattatttggtactgccgtactggcataagcaaaatgtttggatccccagaataataggctgcttgatatgatgtgattctggggttcacagaggcgatatttggaacagagaaagatattatattatctcatttggaaacatgtgatacatgtggtggttctggatcaaaggctggctccaagatgagaatatgttccacatgtggtgggcgagggcaagtaatgcgaactgagcaaacaccatttggtctgttctcccaggtttctatttgccccacttgtgcaggagagggcgaagtcatttcagagtattgcaggaaatgttctggagaggggcgtatccgtgtcagaaaggagatcaaagtaaaaatccctccaggagtgagcaaaggcagtactcttcgtgtacgtggggaaggtgatgctggaccaaaaggtgggcctcctggagatctctttgtttgccttgatatagaggagccatcagatatcaagagggatggtataaacttgtattcaactgtgtcaataagctatcttgaagctattttgggcactgttatgcaagtcagaactgttgatggaaccagtgaccttcgaatacctccaggtatccaacctggtgatgtaattgtcttagcgaagcaaggagttccatcattgaataagccgtctatacgtggtgatcatctcttcactgttaaagtcgcaataccgaagcgcataagtgggcgtgaaagagaattacttgaggaacttgcatctttgagtaatggtcgctttgcacgaacagacactaagccaaaacctgcccagccaaaagccatacatcaagagaaagaagttggtgctagtcaagaagatacaagcaaatctaaagaagcagagggtgactggttgaagaaacttacagattttgctgggtccattgttaatggcgctgcgaagtggctgaacgacaacctgtaggctgtaaatatttactgcaggatagaagattgtcttacatggtgctgtagtccaatcaaagttcttagattcattgggggtccccacgagctcgtatattcgttttattggagagctgcaagattttcaggctgagtggcaaccgagggagtgaaagttgtcaactaatatcgtcgcggcgttggtcccttgtcattcttgccaagcaattatttttatgtagttggagtccttttcagtctggcaagcggcgtagaagtctgaagctgtgggatgctgatcccaaaccccgggactagacaaacactgtacttgaggttttggattaatcaaattcaccgatatcgaattgcaaacttatccaacttacaagatgcgatggaactatttattagaaatacgtttcggtgatatcgaattctcagtttcgag

SEQ ID NO: 218909 - DNA, 1373 bp, Zea Mays
gttgacgtgagatgacacatgggcactttgatcaatatgatgtgattctggggttcacagaggcgatatttggaacagagaaagatattatattatctcatttggaaacatgtgatacatgtggtggttctggatcaaaggctggctccaagatgagaatatgttccacatgtggtgggcgagggcaagtaatgcgaactgagcaaacaccatttggtctgttctcccaggtttctatttgccccacttgtgcaggagagggcgaagtcatttcagagtattgcaggaaatgttctggagaggggcgtatccgtgtcagaaaggagatcaaagtaaaaatccctccaggagtgagcaaaggcagtactcttcgtgtacgtggggaaggtgatgctggaccaaaaggtgggcctcctggagatctctttgtttgccttgatatagaggagccatcagatatcaagagggatggtataaacttgtattcaactgtgtcaataagctatcttgaagctattttgggcactgttatgcaacaggtcagaactgttgatggaaccagtgaccttcgaatacctccaggtatccaacctggtgatgtaattgtcttagcgaagcaaggagttccatcattgaataagccgtctatacgtggtgatcatctcttcactgttaaagtcgcaataccgaagcgcataagtgggcgtgaaagagaattacttgaggaacttgcatctttgagtaatggtcgctttgcacgaacagacactaagccaaaacctgcccagccaaaagccatacatcaagagaaagaagttggtgctagtcaagaagatacaagcaaatctaaagaagcagagggtgactggttgaagaaacttacagattttgctgggtccattgttaatggcgctgcgaagtggctgaacgacaacctgtaggctgtaaatatttactgcaggatagaagattgtcttacatggtgctgtagtccaatcaaagttcttagattcattgggggtccccacgagctcgtatattcgttttattggagagctgcaagattttcaggctgagtggcaaccgagggagtgaaagttgtcaactaatatcgtcgcggcgttggtcccttgtcattcttgccaagcaattatttttatgtagttggagtccttttcagtctggcaagcggcgtagaagtctgaagctgtgggatgctgatcccaaaccccgggactagacaaacactgtacttgaggttttggattaatcaaattcaccgatatcgaattgcaaacttatccaacttacaagatgcgatggaactatttattagaaatacgtttcggtgatatcgaattctcagtttcgag

SEQ ID NO: 218910 - DNA, 2399 bp, Zea Mays
ccgtgtcttcttccttccatccctaaaaactgccctccgctcgcgcgacacggaccatgcatcccgattactatctgccgagccgaccagcggcaccagaacccacaaggttcactcatggcgcccacgtccatgctcccgttcgcgccctccaatacgtcgctgccctattcctcccgcgccacaactgccgccgcgttcgctcctcgtgggctccaccacgccgcggccggaaggagcggcggcggccaacggctcgcgtgcgctgcgcctcggcgccgccgcggagggggtcttgtggtcagggcgtcggccgactactacgcgacgctgggcgtgccgcgcgccgccagtaacagagacatcaaggccgcgtaccggaagctcgcgcgccagtatcatcctgatgtcaataaggagcctggagcgactgaaaagtttaaagagataagtgcagcatatgaggtgctgtcagatgaaaagaagagggcgttgtatgaccaatatggtgaagctggtgttaagagtgcagttggaggctccggtggagcttacacaaccaatccatttgatctgtttgagacattttttggagcaagcatgggtggtttttctggcatggaccagagcgcgtttaggacaagcaggcgaagcactgctatacagggtgaagacatcagatatgatgtgattctggggttcacagaggcgatatttggaacagagaaagatattatattatctcatttggaaacatgtgatacatgtggtggttctggatcaaaggctggctccaagatgagaatatgttccacatgtggtgggcgagggcaagtaatgcgaactgagcaaacaccatttggtctgttctcccaggaaagctatgtatcatttgattgaagatgaaaaaaggcacagagaagaaacaccgaaacacaacacagtcacaccacaataacaacatacacatggtttctaggaacttaaaacaagtgtactatggacaacaaaaggacgaccacagcacagtgctaattaccaggggtgatagaatagcccaatggcccagttcctgtgatccccaaccctagcagcacaccagtcagttccttctttaatcactggtctgaccaccataataactgagcggcattgctaaaaacagagttgttatgatgcttccacagttcccaagcagcaaggatgataagagtattaaggtgttcctgcgcgttcgagaaaaaaaaaagaggattaaggtttctatttgccccacttgtgcaggagagggcgaagtcatttcagagtattgcaggaaatgttctggagaggggcgtatccgtgtcagaaaggagatcaaagtaaaaatccctccaggagtgagcaaaggcagtactcttcgtgtacgtggggaaggtgatgctggaccaaaaggtgggcctcctggagatctctttgtttgccttgatatagaggagccatcagatatcaagagggatggtataaacttgtattcaactgtgtcaataagctatcttgaagctattttgggcactgttatgcaagtcagaactgttgatggaaccagtgaccttcgaatacctccaggtatccaacctggtgatgtaattgtcttagcgaagcaaggagttccatcattgaataagccgtctatacgtggtgatcatctcttcactgttaaagtcgcaataccgaagcgcataagtgggcgtgaaagagaattacttgaggaacttgcatctttgagtaatggtcgctttgcacgaacagacactaagccaaaacctgcccagccaaaagccatacatcaagagaaagaagttggtgctagtcaagaagatacaagcaaatctaaagaagcagagggtgactggttgaagaaacttacagattttgctgggtccattgttaatggcgctgcgaagtggctgaacgacaacctgtaggctgtaaatatttactgcaggatagaagattgtcttacatggtgctgtagtccaatcaaagttcttagattcattgggggtccccacgagctcgtatattcgttttattggagagctgcaagattttcaggctgagtggcaaccgagggagtgaaagttgtcaactaatatcgtcgcggcgttggtcccttgtcattcttgccaagcaattatttttatgtagttggagtccttttcagtctggcaagcggcgtagaagtctgaagctgtgggatgctgatcccaaaccccgggactagacaaacactgtacttgaggttttggattaatcaaattcaccgatatcgaattgcaaacttatccaacttacaagatgcgatggaactatttattagaaatacgtttcggtgatatcgaattctcagtttcgag

SEQ ID NO: 218911 - DNA, 2082 bp, Zea Mays
ccgtgtcttcttccttccatccctaaaaactgccctccgctcgcgcgacacggaccatgcatcccgattactatctgccgagccgaccagcggcaccagaacccacaaggttcactcatggcgcccacgtccatgctcccgttcgcgccctccaatacgtcgctgccctattcctcccgcgccacaactgccgccgcgttcgctcctcgtgggctccaccacgccgcggccggaaggagcggcggcggccaacggctcgcgtgcgctgcgcctcggcgccgccgcggagggggtcttgtggtcagggcgtcggccgactactacgcgacgctgggcgtgccgcgcgccgccagtaacagagacatcaaggccgcgtaccggaagctcgcgcgccagtatcatcctgatgtcaataaggagcctggagcgactgaaaagtttaaagagataagtgcagcatatgaggtgctgtcagatgaaaagaagagggcgttgtatgaccaatatggtgaagctggtgttaagagtgcagttggaggctccggtggagcttacacaaccaatccatttgatctgtttgagacattttttggagcaagcatgggtggtttttctggcatggaccagagcgcgtttaggacaagcaggcgaagcactgctatacagggtgaagacatcagatatgatgtgattctggggttcacagaggcgatatttggaacagagaaagatattatattatctcatttggaaacatgtgatacatgtggtggttctggatcaaaggctggctccaagatgagaatatgttccacatgtggtgggcgagggcaagtaatgcgaactgagcaaacaccatttggtctgttctcccaggtttctatttgccccacttgtgcaggagagggcgaagtcatttcagagtattgcaggaaatgttctggagaggggcgtatccgtgtcagaaaggagatcaaagtaaaaatccctccaggagtgagcaaaggcagtactcttcgtgtacgtggggaaggtgatgctggaccaaaaggtgggcctcctggagatctctttgtttgccttgatatagaggagccatcagatatcaagagggatggtataaacttgtattcaactgtgtcaataagctatcttgaagctattttgggcactgttatgcaagtcagaactgttgatggaaccagtgaccttcgaatacctccaggtatccaacctggtgatgtaattgtcttagcgaagcaaggagttccatcattgaataagccgtctatacgtggtgatcatctcttcactgttaaagtcgcaataccgaagcgcataagtgggcgtgaaagagaattacttgaggaacttgcatctttgagtaatggtcgctttgcacgaacagacactaagccaaaacctgcccagccaaaagccatacatcaagagaaagaagttggtgctagtcaagaagatacaagcaaatctaaagaagcagagggtgactggttgaagaaacttacagattttgctggatgcataacctctgttgaaatttgagccatcctaactgtgttagttgtgttcgagaaaaataaaaggtccattgttaatggcgctgcgaagtggctgaacgacaacctgtaggctgtaaatatttactgcaggatagaagattgtcttacatggtgctgtagtccaatcaaagttcttagattcattgggggtccccacgagctcgtatattcgttttattggagagctgcaagattttcaggctgagtggcaaccgagggagtgaaagttgtcaactaatatcgtcgcggcgttggtcccttgtcattcttgccaagcaattatttttatgtagttggagtccttttcagtctggcaagcggcgtagaagtctgaagctgtgggatgctgatcccaaaccccgggactagacaaacactgtacttgaggttttggattaatcaaattcaccgatatcgaattgcaaacttatccaacttacaagatgcgatggaactatttattagaaatacgtttcggtgatatcgaattctcagtttcgag

SEQ ID NO: 218912 - DNA, 2911 bp, Zea Mays
aagaaaggaaagcggtgcgagcggaggaggcgaccgaagcgccacttgcttgagtagcgaagcgcgagagcaatggcgtcgctgtcgtgcgcctccacgctgccctggacccccgcctcctccccgcggccctcggcggaccgccgcctcacggcctctcgccgggctccgtcgctggtcatcgtcgcccaggggaaggtgaagaaacaccctcaggtcatattgacagatgacatagaagaggtggggaagaaaggggatacaatgaaggtgcgagctggattctaccgcaactccttgcttcccaagggcaaggctgcgcttctaaccccagcagtccacaagcaaaatacaatagtggcatctgagaatgaaaatccacctttaatgccggcaatcatgactcctggtggtgcgcttgatctcgcaactgtactactgggaaatcgtataatcttcattggccaatatattaactcccaggtggcccaacgtgtgatatcacagcttgtaacacttgctgccatcgatgaagaggctgatattctgatatatcttaactgccctggtggaagtctctattcgatcttagcgatttatgattgcatgtcctggataaagcccaaagttgggacagtgtgctttggtgttgttgctagtcaagcagcaattatccttgcaggtggcgagaagggaatgcgctatgcaatgccaaatgctagagtaatgattcatcaacctcaaggtggatctgagggtaatgtggaggaggtgaggcgacaggttggagaaaccatctatgctcgtgataaagttgataaaatgtttgctgctttcaccgggcaaccacttgacatggtgcagcagtggacagagagggatcggttcatgtcttcttcagaggccatggatttcggattgcttgatgctttactggaaacaagatactagagaagggacacaacccacattctattagcagactagaaatactgcagaactggagccaaagttagatgcttgccgtccatctcgattaaagccctggaatgacagatgtttaccgaagaacaagatttgcttccattgcatttatggttgtaccattcaccagcttatggtggcacgtaggatggcattgtcatgcactcatgctaaaacgatgaagactgtttaatgtagacctagatgatctttgcggatgggagaaaagtgccagtttgcaaacttatagcccaggaaaggagaagtggtttaagaaatcgtttggattcaacatattggatttatgtatcatcctgatgtcaataaggagcctggagcgactgaaaagtttaaagagataagtgcagcatatgaggtgctgtcagatgaaaagaagagggcgttgtatgaccaatatggtgaagctggtgttaagagtgcagttggaggctccggtggagcttacacaaccaatccatttgatctgtttgagacattttttggagcaagcatgggtggtttttctggcatggaccagagcgcgtttaggacaagcaggcgaagcactgctatacagggtgaagacatcagatatgatgtgattctggggttcacagaggcgatatttggaacagagaaagatattatattatctcatttggaaacatgtgatacatgtggtggttctggatcaaaggctggctccaagatgagaatatgttccacatgtggtgggcgagggcaagtaatgcgaactgagcaaacaccatttggtctgttctcccaggtttctatttgccccacttgtgcaggagagggcgaagtcatttcagagtattgcaggaaatgttctggagaggggcgtatccgtgtcagaaaggagatcaaagtaaaaatccctccaggagtgagcaaaggcagtactcttcgtgtacgtggggaaggtgatgctggaccaaaaggtgggcctcctggagatctctttgtttgccttgatatagaggagccatcagatatcaagagggatggtataaacttgtattcaactgtgtcaataagctatcttgaagctattttgggcactgttatgcaagtcagaactgttgatggaaccagtgaccttcgaatacctccaggtatccaacctggtgatgtaattgtcttagcgaagcaaggagttccatcattgaataagccgtctatacgtggtgatcatctcttcactgttaaagtcgcaataccgaagcgcataagtgggcgtgaaagagaattacttgaggaacttgcatctttgagtaatggtcgctttgcacgaacagacactaagccaaaacctgcccagccaaaagccatacatcaagagaaagaagttggtgctagtcaagaagatacaagcaaatctaaagaagcagagggtgactggttgaagaaacttacagattttgctgggtccattgttaatggcgctgcgaagtggctgaacgacaacctgtaggctgtaaatatttactgcaggatagaagattgtcttacatggtgctgtagtccaatcaaagttcttagattcattgggggtccccacgagctcgtatattcgttttattggagagctgcaagattttcaggctgagtggcaaccgagggagtgaaagttgtcaactaatatcgtcgcggcgttggtcccttgtcattcttgccaagcaattatttttatgtagttggagtccttttcagtctggcaagcggcgtagaagtctgaagctgtgggatgctgatcccaaaccccgggactagacaaacactgtacttgaggttttggattaatcaaattcaccgatatcgaattgcaaacttatccaacttacaagatgcgatggaactatttattagaaatacgtttcggtgatatcgaattctcagtttcgag

SEQ ID NO: 218913 - DNA, 548 bp, Zea Mays
ggatgattttcgcctcggctgtgttaacagaactctgcccaagaatcgtcgaccaccgcgcacatcacctgttcgacgaaacgctccctcggacagcatatgtgttcgaccggtctacaagggcgacgggtcagccgccagccgccgcgaggttcgtgctgatccgagagctgcacccgctgggcacggagatgacacgggctctgtcgactgccaactgccatgccgccatggagatgacacacggacggacgagtggtctgtgtgccgacggatcaacgttttgcatttgggcgggggcagcaagctagaggcggcaactgcataacttgcgataaacttgttggaccatggtgtgctgatgattttaccgcaagttatgcagttgctgcctcaagcttgctgcctccctttgccaaacctgtaggaataagatgaagttcatccgtataggtatagaaaccttccatagccatgtatcctatatttaccatgagatgaaacagaagcaatgatgcaagaatgcaattttctccctctattctaaa

SEQ ID NO: 218914 - DNA, 923 bp, Zea Mays
ggatgattttcgcctcggctgtgttaacagaactctgcccaagaatcgtcgaccaccgcgcacatcacctgttcgacgaaacgctccctcggacagcatatgtgttcgaccggtctacaagggcgacgggtcagccgccagccgccgcgaggttcgtgctgatccgagagctgcacccgctgggcacggagatgacacgggctctgtcgactgccaactgccatgccgccatggagatgacacacggacggacgagtggtctgtgtgccgacggatcaacgtatgctgatccatggaccaagatcaagacacacatgtttgaaaccacagcataggatggtgagcccaattgaagggctgctggataggcagaatccaagatgcaaaagcactcatggcctggtgtcccttgcacgcagcttcagcgaagctgcctatctgacatagatgaaattgttattgtctgctaaccatgttcaaagtgttattaccaattaagaatcagtggcagctagatgtcttgagacaactactttataccatacgcaacaatcaggagtccatcccaaaactgagaagatattcagtagcactggattttttttattatatgcgctcatggtagatgacacatgagaggtgtccgtctgtctgtcagttcttgattgtgataattttgaaaggcaatctcagggattttttttgttcaatcatggccagtgtgaattaaaataatgtactcattttactaatagagaggcgtccaatcaacgttaggttgctccacgcaagttggaatctttcttgtctgtacatgtgaagtgacttaactaatttatacaatcaacgttaggttgccaaattgtcactaaaccaaacggtacggtataattgtttttctgacttgttgccttgtctgtgcc

SEQ ID NO: 218915 - DNA, 2002 bp, Zea Mays
tatttcgttacaatatatttttcttctctggcctatggtcattatacagcagaaaagatgaagcagttacttgcaaattctgctcttacatgcatgcaactctctgagttctgaaagtctgatttctagtagagtttattggctacactgactttttttattctacagaacaaaggagaaaaaacaaacggatcctttaaagcaggatatagtgcgtcttcatgttcgtctggatcaccaggttatgtttggtgagcatgttggcattattggttcgacaaaagagcttggctcatggaagagtcaggttgatatggattggacaccaaatggttgggtctgccagcttgatgtccctggggaagcacttctggagttcaagtttgtgataattttgaataaaggcaaggacaaaatatgggaggatggtgataaccgtgtagttaatttgccaaaaaatggttcatttgatatgccatgccactggaataagacaaaagagcctttagatcttttaggatcatcagagattaagttgtctggagatactgaggtgataggtgaagatgctaaactatctgaaaatattgctctagaagagatggggagtatctgcaacgctggggttggcgatctgacaccaaaacacgagtcaagcacacttggtggccaatggcaagtatcgctgaaattggtggagggtgataaagcatcaagaaactggtggcggaagttggagcttgtccgtgtgctcttgtctgaatatgttcaagatcagagtcacttggaggctcttacatattctgctatatatctaaagtggatatatactggtcaaataccatgctttgaggatggtggtcaccatcgacccaataaacatgctgagatatctaggcaaatttttggtgaaattgaaaggatatactatggaaaaaacacatcgtctcaggttgattgcttcattcctcatagtagttgtgaaatcaacattgtccttcaattattttatttatatcactaatttctataaaaaacttgactgatggggcaaagagcccatgactttgcactaagaagaaacctcgtcgaaactacccatgaacctggcgaagatagaccatgttttctgcactactagttgggaggattcctttcctgactgtctgctttatagcaatgcctctgaatcctctgatcactgtcccttaacactcaaattcagggaggattgtaggggaaagcgcagatttcacttcgaggtttctggcctaaaattcctggatttttggatgtggtagctgcctcttggaaccaaccaatttaggcctcctgtcctatggagaggttgtcgctaaagcttaaaagtctggctaaaaatttgcagtcttgggggcataaggaagtgggtaatttaaggaaccagttggagcttgctcgggaagtgatgcataggctggaaacggcttaggacagcagagttttgtcgggagaagagctttggttgttaagaaaagtgcagcagcactgcctagttcttgcttctctagaaagaactattgcacgtttgagatccagaatccaatacttgaaagaacgagatgctaattctaagttcttccatatgcaagcttgctttcgaaagaaaaggaatttaccaaactagaggaggaaggaagggtggttatatacatgaagtgttagatgggtttttttccaacttgtttggtgctggttttcagagacagtatacaattgatttgatgaattgtcacagagatgcagttgatctcagtgccctggattgccctctctgaaaaggaagtgatggacactattgcatgcctcccatccgacaaagctaccgggcctgatgtgtttactgggaggttttataaaacctgttggaacattattaaggtggatctaagaggttttataaaacctgttggaacattattaaggtggatctaatggaggctctggctgtccttcatcaagg

SEQ ID NO: 218916 - DNA, 593 bp, Zea Mays
acagaacaaaggagaaaaaacaaacggatcctttaaagcaggatatagtgcgtcttcatgttcgtctggatcaccaggttatgtttggtgagcatgttggcattattggttcgacaaaagagcttggctcatggaagagtcaggttgatatggattggacaccaaatggttgggtctgccagcttgatgtccctggggaagcacttctggagttcaagtttgtgataattttgaataaaggcaaggacaaaatatgggaggatggtgataaccgtgtagttaatttgccaaaaaatggttcatttgatatgccatgccactggaataagacaaaagagcctttagatcttttaggatcatcagagattaagttgtctggagatactgaggtgataggtgaagatgctaaactatctgaaaatattgctctagaagagatggggagtatctgcaacgctggggttggcgatctgacaccaaaacacgagtcaagcacacttggtggccaatggcaagtatcgctgaaattggtggagggtgataaagcatcaagaaactggtggcggaagaatttgtaaagctttcaaccgaga

SEQ ID NO: 218917 - DNA, 707 bp, Zea Mays
ctcccccacctggtgtggctttgttaaactccaaatcccgacccccttcagtgtcgccgcttcttctctcacgcgttctccactgctattccgcctccacccaagtgcctgctctgcttccctccgctcctctccaggtgcgctgctctgcttccctctccggatgtgctgatcaagcaattcatgagtgggagatggaagagatctagccagcagaagaaaaatcaagcaggccaccagcagaatcgatgaggagacagcggaatctagggggcataggcatgcgaataaggcgacgaggcatcacctaacccctgaggtgaccttcgaccgctctggcgcttaagcaccgcttaagtgatgccttaataacaatggctgaaaaggtgctccaaagatgagctatccaacctaaaagcaaaattccgaatgatgtgctgtaaaactgtattctgtaatagcatatatttattatttttctattcagtccattttcttccctttcagcacaaacagaaaaattaatctgcaattggttctgttgcaaatgatttattattaaacaaaatggcaggctgctacttcatgagagaatgcttagttggaagttgggaccaacgagtactcatgtattttttctactggattttctagattgtcatcaatggtgaaacacagtgaccgtacacctgattcggcaaaaccag

SEQ ID NO: 218918 - DNA, 467 bp, Zea Mays
gctttgttaaactccaaatcccgacccccttcagtgtcgccgcttcttctctcacgcgttctccactgctattccgcctccacccaagtgcctgctctgcttccctccgctcctctccaggtgcgctgctctgcttccctctccggatgtgctgatcaagcaattcatgagtgggagatggaagagatctagccagcagaagaaaaatcaagcaggccaccagcagaatcgatgaggagacagcggaatctagggggcataggcatgcgaataaggcgacgaggcatcacctaacccctgagaagctgttgatgctactcgtgctgcggttgttgcagctgcggaggccagatgtgcggcgttggttgctgagaaggaggcacgtgcggctgttgaatctgccactattgcagccgataaggttcaacttgtcgtctctgctgtgaagtatagaagatttgttgaag

SEQ ID NO: 218919 - DNA, 678 bp, Zea Mays
ttgtccagatggagaggagagaatagcatgttcagttggaacaggtccagttgatgcagcttacaaggctattgaccaaataatccagatcccaactgttctccgagaatatggtatgacctcagtcaccgaaggcatcgacgcaatcgcaacaacccgggtggttgtcaccggagatgtgaccaacaactccaaacatgccttgactggccgcgctttcaaccgctccttcagcgggagcggggcagcaatggacatcgtcgtctccagtgtcagagcttacctgagtgccctgaacaagatgtgtagctttgctggtgccgcgaaagccagcggcgaggtacctgagagtgcaagcgtccaaagcgcagagtgagcttggcgacgatttggttctcatgtggactgggcggcgtaagagccagagcaactgttaaagagggtgacatttcgtttctgtattaggctgttcaatgttgggggttttgccttgtcagtgtggtgtgactgtactgttctttttttggaggatagcccagcttggaacgtgcaggcaattttggacctaggtagtgtacaatttgtatcttatatgaacaatacttccaataatcgaaagacttaagatgggttgctggagtctgttctcgtatcatgttgcgctttggcagtgggagg

SEQ ID NO: 218920 - DNA, 487 bp, Zea Mays
  misc_feature (1)..(2): n is a, c, g, or t
nntcttgtttacactacacatgatttcctgtttgcgcgtagtcggttgggacaatgacttaattttgttggagttgctcggcagacagctaagagcaggagagcacaggaaatcgagagaagagagaagccaggagagggtcttcttacgtgggtattatttgatctttggtttggcaggccatgtattaattcgtagtgattatgttatctttcctactcgatcatttctattttcaaaatagatttgcctatttgatgaatatgaatctacttcctggaggctccatctatcatgtatttgctgcagaatataaggagttattaggcgtttggctgatgatctatctgatctgcacctatctatactaccgtgccttttctttaggcacaatggcaccttgaaagttgcatacaaaactggcagatccttctgtgctagttggatgtgcattattcttgtgttcctgatgatgtgtactccctcc

SEQ ID NO: 218921 - DNA, 999 bp, Zea Mays
gccccccatacgaccaggcaacctctccaagcttccagatcctcacccccgcccactcggctggaggtccacagtccgatcctcatcccacttgggtgtgccgtccccgcgcacacacacatggatggatatgaagggataggaggcagaggcggcgattgcgaagatggtcgggagcatgcaggcggcggacccagcgggtcggataagcgcactgctcgcgctgcgccaactcctcgccatgctccagtcgctggccctgctcctacccgtccagtggcgcgcgtagcgggggcgttcgatgccgcggcctccgtgctgtgactagcgggaaaaggggaaggcaacggcgtcagtggttctacgtgtgctggtcgggtcgctcatggtcgccgcgcgaagggagatagccacacaccgggcgcaggaggctgggcgagagtacgagctgatccccaggacatgtgccacaatgtggtttaaaggaatggtgagatgaaggaatgctatccttcaaggtccagttcgtgcatatactgtcctgttggcttaatgcagctatgagtattccaccaacgccactaccaagctgcagttgtcgctgcacagcggccccagccgaggtcgcctctgcacccacgaaagatgtttaacaccgctgcaactactagaagctattgcggttctgcgacctgactcgacaccatgtggtttacttttctatgttgttgctgatttctccccttgtatgatggtgtgatttatatgcctaggaaacccttccatataatgcatatagcctatctaatatgttgttgtgtattatagattacctgtatggctaacactgcctcactcttgtgtacagacagcctgactatgccctaacctaaatatgctaagcttacaatgtttatttgcaaatcacactggaataaatacacatggcgacgcacgggcgaaggcacgcggtcaaacactagtttattacagacttgt

SEQ ID NO: 218922 - DNA, 2895 bp, Zea Mays
ctccgagctggtccacgttgtcctttttttcagtcgttagatcacgcaccaacggtctcctagccagcctctccattcggtgatgccccccatacgaccaggcaacctctccaagcttccagatcctcacccccgcccactcggctggaggtccacagtccgatcctcatcccacttgggtgtgccgtccccgcgcacacacacatggatggatatgaagggataggaggcagaggcggcgattgcgaagatggtcgggagcatgcaggcggcggacccagcgggtcggataagcgcactgctcgcgctgcgccaactcctcgccatgctccagtcgctggccctgctcctacccgtccagtggcgcgcgtagcgggggcgttcgatgccgcggcctccgtgctgtgactagcgggaaaaggggaaggcaacggcgtcagtggttctacgtgtgctggtcgggtcgctcatggtcgccgcgcgaagggagatagccacacaccgggcgcaggaggctgggcgagagtacgagctgatccccaggttcttggagatgggagcgagattttgaagttttaaggcctgcagtgccgtggcctagctcctcgcggcctcgcttattttcatatttcatttctctctcactctcgcaaactaagcctagggcctgagtttggtgaacaaaccactacaatgcagaccaattaactgatgatctattgtgttgtctcataccttggcgagcattgaagcactactcttgaaatgcttgttttatcatctttacatataatgcttcttttgttttatttactcctgttgtggtcaggagactaccattcatcatgtcattacttattttaatatgagtctggctactcttgttagtgcatttcctgtgaattggtgtagatttgtatgcctctcacactctcgatagaacataacaattgatgatactgcatttatgatattactggttgtccttctcatttggttagttagttgggtcatgctattgtgttatttactaacctaggggttctttgtatttcttgttaagacaagccattgttgatgagtgctatgcatctctggtttgtatcgatgtgtctttaatagcatatagcatctgctgatgtgcataaacatgcaggatgcttcatcgtattcccttgcttgtacgttgttttttagttgcttataatccattggagtgacatagtttatgtcagttctgtctatcgccagtttatcaatatcaacttgtgcggcgattccacagatttgtagctactatccaaaggacaatggtcaaaagcacagtttcctaactctaaccgttagatgtcatcatgttgatctattctgtaattgttcttctacgtttttcatttgggttccttgctgctatcagatggatgataaccaaaagaaaaacctctaaaagtatgccccttgcggacaatgaggaggtagatgtatgtgagatgatcaatagttttgataaataaattaaagtctcaactaaatggtaaatgataccgaggctcaaaaaggaaggtgttgagaagagcgtagtaaagcaccgaaagtgtttgctcagatccaacttgatttgagagaaataaaaacaggattgtgaatgagaggcgagcaaatgtatgccatgtctgagcttgttaatgaatttagttagttatatattttgttgatgtacttaaaacaatctattgttaggaagaagcaccgagggatttataaagagtgaagagggagagtgaaaagtcgaggagggatttatagagagtgaatagggagagtgaaaagtcgaggtctgaattggctgaaattagtaagatgcatcaggcccaattaaccgtggattggctaaaaacttcaatgtagaaagagcttacagctcattgaaggagtgcaaaagagcaccttctttaccctctcactactactgtattattgtacccttcttttttgaaaaaagatggcatctttgccccatcttctgagttagaactgagcaagttgtgtaatttcactgagatgcaggtttatgtatatttgaatatgcatatgcgtcctttcttttctctgctaggaaaatttgggagctaacttcaagttcaaacaaaatgaaaactgagaaatcgtgcctactaatttgtcttcagtgataaacattccctgggcctgtttcgatctcagtaaattcctgagatactttatggtcaagctatgactgctatttttgcttgctaaatttgtagagactatcttgcttgcctttgctatttttgcttgctaaatttgtatagactatcttgcttttatttccaggacatgtgccacaatgtggtttaaaggaatggtgagatgaaggaatgctatccttcaaggtccagttcgtgcatatactgtcctgttggcttaatgcagctatgagtattccaccaacgccactaccaagctgcagttgtcgctgcacagcggccccagccgaggtcgcctctgcacccacgaaagatgtttaacaccgctgcaactactagaagctattgcggttctgcgacctgactcgacaccatgtggtttacttttctatgttgttgctgatttctccccttgtatgatggtgtgatttatatgcctaggaaacccttccatataatgcatatagcctatctaatatgttgttgtgtattatagattacctgtatggctaacactgcctcactcttgtgtacagacagcctgactatgccctaacctaaatatgctaagcttacaatgtttatttgcaaatcacactggaataaatacacatggcgacgcacgggcgaaggcacgcggtcaaacactagtttattacagacttgt

SEQ ID NO: 218923 - DNA, 3176 bp, Zea Mays
atgcggtggctacccaggctgctctctcactccatcgaggtcgggagggcctccgcggcggggaggtccaaccctagtctcgtcaaggcaggatcccatgggttcgccagcggcggctgggatgggtcaccagcggtgccccgggagtggctgcggaagctgtgggtagacgtgctgaagaagcagaaggaggacgcgaggaggtggggcatcggcgcgtcacccgggaacgccggcagcggtgcggagccttcgctatgcgcgttcgcgaattctgtggaggctgcaggagcgaccagggaggcaccttcaaggagctatcagtacgaatacaggggtctcgccggattagtagtgcaaatgagcaaatccaatccccttttgttcatgtttcagctactcagaacaagacggccatttgttgcagaaataacggatgctatgggtaacgagatatttaaggttcgtaggccattttggtggatcaacagctcaatttatgcagaagtggatggtaaggagataggcgtagtccacaggcgttggcacctttggcagagaatctatgacctgtacttagggaataggcaatttgcagttgttgagaatccaggattctggaactggacctttagcctagtggatgaagatgacaaactgttggctcagattgatcgtaattggaggggcatcggctttgagaggacttccgtttctgattgccacggagtaggcacacgaaccaccatctgccgtatacaaggaatttctttattctcgttcctgaagaggctagcagttacactcattactgttgtcaggtgatcggcatcatcgccagaggcagaaactgtttctgccgttctgcgtgcttttgactcattactgctgtcaggagatttccgaagccttcctttcccctttgtttctgctatggagatgcacacatgcgtggcttgtttggatggctatggtcatatattcctctcactccagatgtgttgaaatagtttggtgttagatacaggctaaactatttcatgacacatggattaaaagatacatggacatccaaacgataccgcatttaagttctagtacactggagcctgatgtttacagtgcaactcgtctgctaggctacttggatgtgaatgtatattgtttaggaattagatccattcggttagcctggctagacagttagacctaaaagggccatttctggtactcgttccgacgggaacaaaacgaggcctgatgtagctgtcagctgtgagtactgaattgatagttccaaacgattctgggtcagacaattcagaacagtggaagccaccgagctttgtatcattgtattcaacccagtgcgcaacaagtgggcggggccttgaaggccgaaggtgcgtcggcctgcacacttgtggcaggggccaattatccgcttctatcgccctcttccttccattttcttctcgatggtttcaatagcaaataaaggagtaaggctggtttcaacgcgaggaggtaataagtagtgacgtaggtaattcagtttaatcgatcaatgggtctattgattggttggtcctgtaccaaccatattagatctaaattggttggtaccgattgctacattataccgatcatttttagtcatgtgtcacgttttgattgatccaccttattttgaagaccaaaaaaatataaatataaaaaaattggaatctaatctataaatagaggggatgtttggattcatttacatccctcactctccaattagctcctaccacttactgtttcactccttttactccaaaccgctaccaccatgtcttccttaggctccaacgttgaagtcaattgcactacaacatttgactccatgaattgtcttagaatgttgtattcataaatgaaattgtttcagatagaattgaattgattctagattatttcatttcagctatctttgctattgaaaggcatggtggtggcacctcctgataaatttcgtgtgtgtttgatctgctatgatttagtttatggaggattttagattcttgctacattttgctttgttatgacttaactattggaccacaggagaaactttagttaacgagagaattaatggaggaacatttactagaagttagaatttccagctctcgaacaacatagttccagtaagtttggttttgtactaaagatgcacactaccactctctgattgtgattactatgcttttctaacaagtgactagcctttaatcaattagtacttaggactggcacgctgattttagctacttgagtagttgccccatgaagccatgatcttttaccacgttttgaacattaaacatttgttttctaccgaagctaatgagaacatattttatctccatcactgtagggtgcaacatgttcagtgttctacaccagattaactccattgcattttttttaaagttaagcaacctatacagagacaccctaataatatgttgaatgataagatcatggcatcgtgctatgtgtttctacaattggctgctctgctttcatttgtacaatcagagagaacggtaacccaagattacagtgtcctggtctgctgaagaacaaccgagatggaaagagctaaaatcctaatttggcatccatgcctcctgaaaatcttaagacgggcatagtaagtaagtcctgagaatgtgatttacagttttagcaatgtcttgcttgatctcctgagtggaaagcacgttcaaccaaatcatttctttgtaggtgtcctggtgtaccaatggtgagcatcacgtagacacgattggccatcgccacgacacggacaggagaacgtgcttgtgctgctcgcgctctgtaaggaactaaatgatttcactatatgtggttctttgaagtttcggttaatagaccttatgctaattcactacttcaaaagcaaaaatatggagatgatgattaaatacataggtagtcatttgtaacttatttttgctattgatatagttgtggcacattcatgtatgagagtttgtgaaaatattccatctgaactgccagatcctacatcttcatttcttaacagacagacaagttctttagaacctggtgatttcacaagtcctctcttcagtggcttcttt

SEQ ID NO: 218924 - DNA, 1172 bp, Zea Mays
cgccttctccacgtttagttttcaatccatcatcgtctctgcaggtgcggatggtccggtatggtataaattctagtggtctacagatatgaagacctttgaattttgagctgatttttggtgagcagcttccttatggccttgtacctccgggtcatcaagttctatgttactgccatcatcaaatcaatgggattgatctcaagttcgcacaatgttgttggcacaacatggaggtcattatcatcacgctgatgctattttttatcatgtgtggactctcactaatttcaaaggtaattaagtaaatgttcaagcaaaatacttatgaaattgagatgattgatcgtaaatttaaaattattaggctaataaatttttcacggagcctgcactaattggccatctagcctcagttagcatctctagctagctcttctccacgtttagctttcaatccatcatcgtctctgcagtagcgatactgctggccagaattttgggaatagtatggctccaacatctactcgcaaagatctttggaacaggtgaccaacaacacgacgatgaatccgaggcaacgaccacgcatggtgatgaatcccacacgacgaccacgcatggtgatgaatctcagacgacgaccatgtatggtgatgaatcccagacgatgaccacgtatggtgatgaatcctagacgatgaccacgtatggtgatgaatcccagacgatgaacatgtatgacgcagcgcggtcctctttgtattacacagcgtcgtcctcttcgttcttctactcagccgagcagtcaccaaccattgatagtgaaaccgaccaacaaccacctcgtccgctgccgccgccttcattgttctcccctcgcaccatagaactgcaaatattcgaggtacaagatatcagtacctctggcatgaatgaagaggaggacgacgatgactttattagagaatgggagagtgaataattggtcgatagtaactaacaatttgtaattcgacattggaggcatattaattgggtctatgatatggtgtaatatagacgtgccctcgaacatatgtgtatgtatgactttttcactttatattcaaatttgatgcaaatgggcatattaggtcaattcaaaagtttattctatgcatacatttagg

SEQ ID NO: 218925 - DNA, 1184 bp, Zea Mays
cgccttctccacgtttagttttcaatccatcatcgtctctgcagatcaatttttaggtgcggatggtccggtatggtataaattctagtggtctacagatatgaagacctttgaattttgagctgatttttggtgagcagcttccttatggccttgtacctccgggtcatcaagttctatgttactgccatcatcaaatcaatgggattgatctcaagttcgcacaatgttgttggcacaacatggaggtcattatcatcacgctgatgctattttttatcatgtgtggactctcactaatttcaaaggtaattaagtaaatgttcaagcaaaatacttatgaaattgagatgattgatcgtaaatttaaaattattaggctaataaatttttcacggagcctgcactaattggccatctagcctcagttagcatctctagctagctcttctccacgtttagctttcaatccatcatcgtctctgcagtagcgatactgctggccagaattttgggaatagtatggctccaacatctactcgcaaagatctttggaacaggtgaccaacaacacgacgatgaatccgaggcaacgaccacgcatggtgatgaatcccacacgacgaccacgcatggtgatgaatctcagacgacgaccatgtatggtgatgaatcccagacgatgaccacgtatggtgatgaatcctagacgatgaccacgtatggtgatgaatcccagacgatgaacatgtatgacgcagcgcggtcctctttgtattacacagcgtcgtcctcttcgttcttctactcagccgagcagtcaccaaccattgatagtgaaaccgaccaacaaccacctcgtccgctgccgccgccttcattgttctcccctcgcaccatagaactgcaaatattcgaggtacaagatatcagtacctctggcatgaatgaagaggaggacgacgatgactttattagagaatgggagagtgaataattggtcgatagtaactaacaatttgtaattcgacattggaggcatattaattgggtctatgatatggtgtaatatagacgtgccctcgaacatatgtgtatgtatgactttttcactttatattcaaatttgatgcaaatgggcatattaggtcaattcaaaagtttattctatgcatacatttagg

SEQ ID NO: 218926 - DNA, 786 bp, Zea Mays
cattctctatctttggagataatgctaaacaagtcattgattgcaaatctgtcagcggcaaactgttacaaatctgagcatctaaagagaccagagaactgggcactagttgaaaaggcaaaatacatctacattgctggatttttccttacagtgtcgcctgattctatccagctagtcgctgagcatgctgcagcaaataacaaggtgttcctgatgaacctctctgctcccttcatttgtgagttcttccgtgatgctttcgttggaggcttcctctcacagttggttctaggcaagggcattgaagactgcgtgagggcaggttgctatgccgcaaacgttatcatccagcgcccgggctgtacttacccggagaagcctgacttcaactagtgcaaaactgaggcacgtcatgagagggactgttataggcacacttaattgttaaccagtgcgtggttcggtgtctacacaccctgtattcttccgaggcttctcttctgatccggccaatatttttgccgtgaaatttgtgttctgcaactatggacgtctcctttgttgctgtataaggcatgatttgccatcattctgttgcttcggtgatgcttgcaatgcaatgagaatgtgttggaacgagatgtttttgattgcgttttgctttgttcctagcaggccagcaaggtagcatcagccttgccctaagttgaaggccgccatctatttatatgttgcagtcatcgatcaatccaattagataacttgctgtttctttttcataaa

SEQ ID NO: 218927 - DNA, 745 bp, Zea Mays
caaacttcacatctctacttatgtataatctctcagttgtaggatcaaccattctgtaaccctttgtgcctgattcatatcctagcagaactattttagtagacctgtctgacagcttgtcgactccaggacctaccttcttgacatgacctatgcatccaaaagttctgagatgacccacttgtggtttactgccatgccatgcctcatatggagttttcccttgcacacttcttggcaatattatatatgaggaggtgaagcaagctagaagctcatcttgtacccgcaacaagttggtacctgcagcacgtggacaaagctagatggcatggacaaagctagatgggaagcctagtataattgcaaagtgaatcagttagattctagtagttactaaaatttttaagtgatatttgtatgatattgccactttggctttgcttctttgtgaacacaattggcagttactgaacatgtttgctatcgagttagttagcttcttgatattttgccaaggccaaaagcaatattattgagggtttataatttgatttttttaacattcatctcgatgcacatttatatatatataaatatataaatgaaaacatcttttttggcacgtaataaagtgttacagtataacgtgtctatattattacaaacaaatatagatgtatgtacaaaatcgtttctacaggtcttaatacacactttgacgttactatataacgtattgata

SEQ ID NO: 218928 - DNA, 1032 bp, Zea Mays
ttatattctatattcttttggtttctgaaagggtgcctgaaatatcctatagatgtctttagtagagggtccaaataatggcctgcaaggtttcttgaattggatcgcacaaaattccatctgcttcagaattgagctaagcgcatcctaacatcttgactcctaataccgactaagaattactagcatttcatctcgaaagatcactctgtcgaccaatccaaggaaggcacctgaagcttagggaggacacctcacaagtcacggctacccgtgctgcatctgtgtgattttgtaatttgaatgagcaaatctatctggcgtcagtgcggggttggggtagtttcctagagggaggaacatcgtgggatgcaggtcccaaggaacaccagatattttgaggcagaccgtggcgaggtgcccaagggcagcgcctagatcttcttctggatggtcaagttctggaacgataatgtggcagaggagatgccctggtcttcgtttaaatgcaggatattacaaaagtcaggttggagaactcccttgtttaggcttttgtcttgcttctgcagaaggagagatgacgtgtttcatctctgcatgacatgatggcatgtgaggcagcagtctctgctccgcaacccttgtcatggcttggagttggtattctaggaaggggcacaattttattagggtagccactagagttgaggtcccttttcaatggacgaacttggtgctgtggacgacatctgctattgtagctaggcgcatacatgttttcctataaatgctagctctgcaatcaccaaaggaaaacacaagagtactcttggaggaaagtttagcattcaatttaaaaaaccttaccaactcatgccttatttgaatgcaataatgcatgttctgttgccatgctgttgcttggacacatgcttggcatggctattttctggttatgtcacaactcatatctcccatgtaaatttatggctatgatatgcatcaaacaagcttatattttgctctcaa

SEQ ID NO: 218929 - DNA, 2498 bp, Zea Mays
cacaaagtccattattagcaagacaagactacaagatgaaatgggaatggttctgcagtttgtaggctatgctctgttcacagtttggatgatttctcactttgctagctgcggtggacaggtggtaaagtgaaccagaactggtaaaatgctggcatgtgattgggaaaacaaacagctgacatggtggtttcttttctgctacactcttgtttattaactatactcattacattctgtgttggagttattccagtcagtgcagttcttgcagacaaggatgtcatgctgtgtatcagaccatgggaacatggtagtatgaccaaatctctatacttttctctgctctcttttcttctttccaacttttctccgcttcaaggttttccaatcaaggaaaaaaaatgcttacgtgctgacgtcaaaacttagaattaggggcatgttgatgttcaaattgaagcatcaaagaaccatatagtgccgccggccaacagcagcatcaaagaacaatattgattgtcttgcaaagtgccgccggccaacagcagcatccaagattctcttcttctttttttttgtgagagggcctctagccgagttagttaggtggtctgacattcttcgggttctgggttcgacttgttgtggaagcgaattttagctgtggttaaaaaatcacctcaactgtctcacgccaaatcctatgtgaggaaatcttttcttaatataatactcggggctatcttatctcgtagatcgatttttttaatttctttttctcaatatattccttttttttgtctccacggagtgaactaatttagataaagtttgtgttaaatcactaacatgttgtttttactgtatttaccccatctttgatgttcgccagcctcgtgaagacagacaccctcgcagacgtcatttctttatgaatagtaagatgcatgcatcatcatgtatgatttaatcacagcctcaaggaaggactgaacggtcacagaaagtaccctcagtccataaatatatgacacgttgactttttaaaaaaactttgaccactcgtctcatttaaaaaagaatgagttattatttatttttatgatttattttatcacttaaggttgtttgtgtttgacttaaaattttatattttaaataaatattttgaataagggagtgactaaagtttttttaaaaaaagtcaacggtgtcatatatttgtgaatgaagttagtactggtttgtagatgtttaagtgccatatgaacttttgaacacaacacacatcttattaggtttttatgacagttaaaccctgtttggttagagggactaatctttagtccctaatttttagtccctattttgccaaacgaaggactgaattagggactaattagctttagtctttatgctctcacatgggtgctaaaagggaccaaatgacaatatttactccaattatccttgccttgcctagaaagctaacgtcatacacaataaacaagaaaatagatattttagtctttatgtgttgtatttaatgtatttagaatcttttttacaaccaaacaagatagtgactaaactttagtctatgactaatggagccaaacggggccttaatatagcgatctcattcatgattcgtggcactctgggttggacagcttgcaacatcttgaagccactgtagccctttaggtccttggtcatggccttatgctcagcaggaaaccttggaaacctgctactgatcattgtcccggctgtatgcgttgaaagaagggaacccgtttgggaacgatcccaagcatttgctgctcatgcagtctcctactcgtccttgtccatgggccatggctgatggctgtagtgtaggttctgctctcttttagttccaaaaaggggcaacctgtcttgtttattcaaagatgttgttgtgtcaaaggtttagattactgagggggttaattattagggatccgctgtgtggagataagatttcagggaaatatttttagtggagcccctgtacatagtttttgaggaaaaaaatccttgaaagacttttgggcacggatcttaaaaccttttttagactacatctttgaacatcattgttgcacacagagtgcaaataactccagcttcatgttgtatcaaaattaaatagacataatatgtaatggtctactagttatatgtccgtgcattgcttcgtttatatatatatatatagtttatctattaagagccctgggctctatataactgtagagagccccagcccacgtccgatcactttttacgcaagcgaacagatttagcgtaaacggaaacccattttagcgtaaacagagtaacaaccgcgagccctacatgtttacgttattccattcttccgtttatacataatagtgatttagcataactacttcagccgacccacgttccagaaataaaggaatgggcccactaccccacttccc

SEQ ID NO: 218930 - DNA, 2599 bp, Zea Mays
cacaaagtccattattagcaagacaagactacaagatgaaatgggaatggttctgcagtttgtaggctatgctctgttcacagtttggatgatttctcactttgctagctgcggtggacaggtggtaaagtgaaccaggtagtaatcccatcacatggctatttgaaaggtgtgagagacttttgttctaaacacaacgttttgatgattgctgatgagatccaaattggcgtagctagaactggtaaaatgctggcatgtgattgggaaaacaaacagctgacatggtggtttcttttctgctacactcttgtttattaactatactcattacattctgtgttggagttattccagtcagtgcagttcttgcagacaaggatgtcatgctgtgtatcagaccatgggaacatggtagtatgaccaaatctctatacttttctctgctctcttttcttctttccaacttttctccgcttcaaggttttccaatcaaggaaaaaaaatgcttacgtgctgacgtcaaaacttagaattaggggcatgttgatgttcaaattgaagcatcaaagaaccatatagtgccgccggccaacagcagcatcaaagaacaatattgattgtcttgcaaagtgccgccggccaacagcagcatccaagattctcttcttctttttttttgtgagagggcctctagccgagttagttaggtggtctgacattcttcgggttctgggttcgacttgttgtggaagcgaattttagctgtggttaaaaaatcacctcaactgtctcacgccaaatcctatgtgaggaaatcttttcttaatataatactcggggctatcttatctcgtagatcgatttttttaatttctttttctcaatatattccttttttttgtctccacggagtgaactaatttagataaagtttgtgttaaatcactaacatgttgtttttactgtatttaccccatctttgatgttcgccagcctcgtgaagacagacaccctcgcagacgtcatttctttatgaatagtaagatgcatgcatcatcatgtatgatttaatcacagcctcaaggaaggactgaacggtcacagaaagtaccctcagtccataaatatatgacacgttgactttttaaaaaaactttgaccactcgtctcatttaaaaaagaatgagttattatttatttttatgatttattttatcacttaaggttgtttgtgtttgacttaaaattttatattttaaataaatattttgaataagggagtgactaaagtttttttaaaaaaagtcaacggtgtcatatatttgtgaatgaagttagtactggtttgtagatgtttaagtgccatatgaacttttgaacacaacacacatcttattaggtttttatgacagttaaaccctgtttggttagagggactaatctttagtccctaatttttagtccctattttgccaaacgaaggactgaattagggactaattagctttagtctttatgctctcacatgggtgctaaaagggaccaaatgacaatatttactccaattatccttgccttgcctagaaagctaacgtcatacacaataaacaagaaaatagatattttagtctttatgtgttgtatttaatgtatttagaatcttttttacaaccaaacaagatagtgactaaactttagtctatgactaatggagccaaacggggccttaatatagcgatctcattcatgattcgtggcactctgggttggacagcttgcaacatcttgaagccactgtagccctttaggtccttggtcatggccttatgctcagcaggaaaccttggaaacctgctactgatcattgtcccggctgtatgcgttgaaagaagggaacccgtttgggaacgatcccaagcatttgctgctcatgcagtctcctactcgtccttgtccatgggccatggctgatggctgtagtgtaggttctgctctcttttagttccaaaaaggggcaacctgtcttgtttattcaaagatgttgttgtgtcaaaggtttagattactgagggggttaattattagggatccgctgtgtggagataagatttcagggaaatatttttagtggagcccctgtacatagtttttgaggaaaaaaatccttgaaagacttttgggcacggatcttaaaaccttttttagactacatctttgaacatcattgttgcacacagagtgcaaataactccagcttcatgttgtatcaaaattaaatagacataatatgtaatggtctactagttatatgtccgtgcattgcttcgtttatatatatatatatagtttatctattaagagccctgggctctatataactgtagagagccccagcccacgtccgatcactttttacgcaagcgaacagatttagcgtaaacggaaacccattttagcgtaaacagagtaacaaccgcgagccctacatgtttacgttattccattcttccgtttatacataatagtgatttagcataactacttcagccgacccacgttccagaaataaaggaatgggcccactaccccacttccc

SEQ ID NO: 218931 - DNA, 2311 bp, Zea Mays
caaacaaataaagattttaaactcgatcagcgttaaatagggagagagagagagagaaaaaggaaaaaaaaaacgcggcgcagaagccagaagaaccagcgagccaactcccaacctctcgcccgatctcgatctcgatctcacgggcgccgccgccgccagcgacgatggatccagagatgctgcggctggcgcaggagcagatgcgccgcatgtccccggacgacatcgcccggatgcagcagcagctgatgtctaaccctaacctaatgaggatggcgtctgagagtatgaagaacatgaagcctgaggacttaaggcgagctgcagagcaactgaatcaaacaagaccggaggatatgcgtgatatgaccgagaaaatcgccaacactactccggaggagtttgctgctatgaaggcgcaagcagatgctcaaatgtcctatgcgatgtctggtgctaagatgttaaagaagcagggaaacggacttcataaccagggaaagtattcagatgctgctagtaaatataagcttatgacctaaaactaacagttaaactatatgcaatgttcttgatcaggctaaggataacttaaaaagcataccatcgtctacggcgcatactctgcagttgcaatgtacacttaatttaatggcttgttacttgaagacaggccagtttgatgaatgcataagtgaaggtacagaggttctaagttatgattcaaacaatgtcaaagcatattatcggaggggtcaggcatataaaggactcgggaagttggaggcggctgttgctgatttgagtaaagcccatgaaatttgcccagaggacgaaactattgctgaggttctaagagatgctgaagaaaaacttgcacgggaagggggaggagtgagcacgcggaaaggtgttgttattgaagaagttgttgaagatggcgcttcacagccatcaagcagtgaaagaaattcttctgggtatactgtttcacaaccacctgaaggagcaggaaatattgggctgtcagggtctttagaaaggccaagggatgatcctacttctatcaggtcatcccaaaattatgtgtccaagagcgatcctgaaggcttatcaaacttcggaattgaaggaatgtcgcctgaacttgtcaaaactgccactgatatgattggctcaatgaaaccagaggagcttcagaaaatgttcgaagttgcttcttcattgaatagcactagctccgctggtccaaatctgggacccaatatgccagaaatgtctcctgatatgcttaagatggcatctgacatgattgctagtatgcctcctgatgacgtacagaaaatgatgagttttgcttctcagatgggtgggcctggtggtgcccccaggagttcagagaatattaactttggaccttcagtgagagctacaacgagtaattctgcccgtggatcatcatctcaacctgttttggagaaccctgatgaactatcagatgaccaaaggatgagccagtcatcctctagtcttccaccttctacagctgatatgcaagaaaccatgaggaattctatgaaagaccctgcaatgcggcagatgcttacatccatgatgaagaacatgagccccgagatgatggcaaatatgagcgagcagtttggaatgaaactgtcaaaggaggatgccgcaaaagctcaacaagccatgtcgtcattatctccagaggatttggatagaatgatgagatggatggagcgagcacagaaagcggtagaagtcgcgaagaagacaaagaactggctcttgggccggcaaggcttgatccttgctattgtcatgctgatcctagctttcatccttcatcagtttgggtttatcggcagatgatggggggtgacttgggtggctgcatcagcatggaaatagattgttagatggcgatgcagagttccctcttgctaacaactgcttaaaagcgctttgggggaaggccggattacgagaattctttgtatccgtatcttttgaaagtgtaactctgtccataaagctacatcctatttttaccagcaaaggtagtagaaaggaatcgagccgaaactgttgtgataacaagccgacatgtaatatgataatatccttgtggtgctttcagttttaagtagcagttttgtttaataaagcatatgcaaaaggtgaagtggaacaaagtacatgcgcatacaaagactaactggaagataggcatcttcaattctttaacatgtgtttagtttgggaactatatgctttgctgagataatat

SEQ ID NO: 218932 - DNA, 2257 bp, Zea Mays
caaacaaataaagattttaaactcgatcagcgttaaatagggagagagagagagagaaaaaggaaaaaaaaaacgcggcgcagaagccagaagaaccagcgagccaactcccaacctctcgcccgatctcgatctcgatctcacgggcgccgccgccgccagcgacgatggatccagagatgctgcggctggcgcaggagcagatgcgccgcatgtccccggacgacatcgcccggatgcagcagcagctgatgtctaaccctaacctaatgaggatggcgtctgagagtatgaagaacatgaagcctgaggacttaaggcgagctgcagagcaactgaatcaaacaagaccggaggatatgcgtgatatgaccgagaaaatcgccaacactactccggaggagtttgctgctatgaaggcgcaagcagatgctcaaatgtcctatgcgatgtctggtgctaagatgttaaagaagcagggaaacggacttcataaccagggaaagtattcagatgctgctagtaaatataagcttgctaaggataacttaaaaagcataccatcgtctacggcgcatactctgcagttgcaatgtacacttaatttaatggcttgttacttgaagacaggccagtttgatgaatgcataagtgaaggttctaagttatgattcaaacaatgtcaaagcatattatcggaggggtcaggcatataaaggactcgggaagttggaggcggctgttgctgatttgagtaaagcccatgaaatttgcccagaggacgaaactattgctgaggttctaagagatgctgaagaaaaacttgcacgggaagggggaggagtgagcacgcggaaaggtgttgttattgaagaagttgttgaagatggcgcttcacagccatcaagcagtgaaagaaattcttctgggtatactgtttcacaaccacctgaaggagcaggaaatattgggctgtcagggtctttagaaaggccaagggatgatcctacttctatcaggtcatcccaaaattatgtgtccaagagcgatcctgaaggcttatcaaacttcggaattgaaggaatgtcgcctgaacttgtcaaaactgccactgatatgattggctcaatgaaaccagaggagcttcagaaaatgttcgaagttgcttcttcattgaatagcactagctccgctggtccaaatctgggacccaatatgccagaaatgtctcctgatatgcttaagatggcatctgacatgattgctagtatgcctcctgatgacgtacagaaaatgatgagttttgcttctcagatgggtgggcctggtggtgcccccaggagttcagagaatattaactttggaccttcagtgagagctacaacgagtaattctgcccgtggatcatcatctcaacctgttttggagaaccctgatgaactatcagatgaccaaaggatgagccagtcatcctctagtcttccaccttctacagctgatatgcaagaaaccatgaggaattctatgaaagaccctgcaatgcggcagatgcttacatccatgatgaagaacatgagccccgagatgatggcaaatatgagcgagcagtttggaatgaaactgtcaaaggaggatgccgcaaaagctcaacaagccatgtcgtcattatctccagaggatttggatagaatgatgagatggatggagcgagcacagaaagcggtagaagtcgcgaagaagacaaagaactggctcttgggccggcaaggcttgatccttgctattgtcatgctgatcctagctttcatccttcatcagtttgggtttatcggcagatgatggggggtgacttgggtggctgcatcagcatggaaatagattgttagatggcgatgcagagttccctcttgctaacaactgcttaaaagcgctttgggggaaggccggattacgagaattctttgtatccgtatcttttgaaagtgtaactctgtccataaagctacatcctatttttaccagcaaaggtagtagaaaggaatcgagccgaaactgttgtgataacaagccgacatgtaatatgataatatccttgtggtgctttcagttttaagtagcagttttgtttaataaagcatatgcaaaaggtgaagtggaacaaagtacatgcgcatacaaagactaactggaagataggcatcttcaattctttaacatgtgtttagtttgggaactatatgctttgctgagataatat

SEQ ID NO: 218933 - DNA, 398 bp, Zea Mays
atcagtatgtgcttgcccctctttagagacgagggtacaggagtgtagcaccaattagttcgagtgatgtatctctgcccacatcatcattagatctcccagatgttgcagatctctttgctccccctgcagacaatgcatcaaggaagagggaatcaaatagttcatggtctgtcttattttcccccctacaattcatctacgacagtttgccagtagcactaaatcttttaactgtgctggggagaaagaagataagtgagaggatgaagcttcttcaagatcttgttcctgaatgcagtaagttcttgtcaacgaaactcgcaactgttaaccccgagcttggctttgacattgagcagatcatatccaaacaaatgctgctttcacaagactga

SEQ ID NO: 218934 - DNA, 2308 bp, Zea Mays
ttgcttgctcgcagtcgcatcgcctattcgcctgcgccggtgaagcggacgccatgaccgcgacgccggcagtgatcgggctgagcgctgggcaccgcctcctcgccacctcgttcggctcccccgacctcgcgtccccggacgcgcactcgtcgctgcagttcgcggccgccgcaccgaagctcaccgtcgtcgcgcaccgcgcccccgcctcctcttcctcctcctctccgcccaacgtcgggcgcggctcttccgccgccggccacgcgcgcgcgcgcgccatccgggcgctcaggaaccactccgcgcccgcgctcgccacgccaccgccgcctcctctaccggcggacccgactccggacctagactcggagttcgagtcctcgctcgaggccatcgtgctgctgcagcgctccatgctcgagaagcagtgggagctccccttcgaggacgacatcatttccactgacgacgagcaggacgacagggttagcaaggccacggtggtggcggcgcggtcgggcgtctcggcgcggcagcggcggatgagcggccggcggcggggagctggtcggaagagcgttgccatcagcccggagctgatgcagagccggaaccgcatctacctcaggggcaccgtcagcaaggacctcctcacgcacaagcaggtcatccagctctccaggaagatcaaggacggcatctggcttcagcaccaaagatcaaagctgaaggagaaactggggaacgagccatcatacaagcagctggcacagtcactgcggatatcagctcctgaactgcgcgcaaggatgcgcgagtcgtttctcgcgagggagatgctgacaatgagcaacatccgtctggtcatatccattgcccacaagtatgataacctcggtgtcgacttggcagaccttattcagggtggtctgatagggctactccgagggatcgaaaaatttgatgcatcgaggggattcaggatttccacctatgtgtattggtggattcgtcagggtgtttcaagagcattggctgataactcaaaaacgttcaggctccctacgtatttgcacgagaggttgatagcaattcgtggtgcaaagtacgcgttagaggatcaaggaattgctccgacaatagagaacatagcagagtcgctcaatatatcggaaaagaaagtgcacaatgctacagaggctgtgaacaaggttctttcactggatcaacaggcgttcccctccttaaacggtctacctggggacacactccatagttacatagaggatcaaaacgtcgcaaatgatccatggcatggatttgaggaaatgtatctcaaggaggaagttaacaatcttataaattcaaacctcaacgagcgtgagagggacattattcgattataccatggcataggaaaacagtgccatacatgggaggatattagcagacaatttgggttgtcgagggagcgtgtgaggcaagtaggactcgttgcgatggagaagctgaagcatgctgcgaggaggaagcatttggatgcattgcttgaggattattgagtgagatgtttttcgtttacacaaatgcagtggctgtatatactcggaaacatagggttcatcatccttgaaaggctttaccgctactcactcggcagataactatacatgtacatttgtgacaatcaataggcacgattcagatatctatgtctgcagctgcacagtcatcaaaacgacccaacaaaaagagaagctgtttttttccttgggaagcttcgtaaattttctgtaatgtatcatttagcaccttaatcagcagaagagcaacatttatgtaccggatctgtattattatctagttacaattacatggaagcaaaatgcttacaggaatatggtgcctacaaaatttatcttacatgtgcctaaaatgtgcgatcaaataaatttcaggagaaatttctgaatatcttggaaaacttttgttgacatatgggcatatggccagagtttggtcagggtaattccgcaagaatatgtacgtgacgtctcatttaggcctgcatattccatcaataattctagttgcatcaaatcaaccagaagatttttgcatgtctgaaatagcaacaatatggtggtattctgcaaatgattttgggaaacttgaaatgatagacctcaagaaaaatctctgaacattcccgagaactcctgattgacgtgtagcatgagctctaatcaaggcaactctacaaaaatgtatgtgtgatgaagcaattaaggaaatgcttgaa

SEQ ID NO: 218935 - DNA, 2643 bp, Zea Mays
cctctcctctcctccttcaccggctccgaacgctcacccgcacctccatgccgcgcgcgcgcggtaacacacctccgtgagtctcctcttgctcgtagtaaaacactagcggaccagaaaacgcctctctatctctctttcctcgtcagtccctctctctcggcgtgtggtgggcatagcttccctgcctccacttgtcttctttgtttcctctgctgagggctagtaggatcagttcagttcctcgccgccggtctcctactgcgtgcacttctgctgcctgctgtcctagccctgtaccgccgactctactgtacctcatcattcgccttgctgcatccgccgcctcggtcgcgcaggtgaagcggacgccatgaccgcgacgccggcagtgatcgggctgagcgctgggcaccgcctcctcgccacctcgttcggctcccccgacctcgcgtccccggacgcgcactcgtcgctgcagttcgcggccgccgcaccgaagctcaccgtcgtcgcgcaccgcgcccccgcctcctcttcctcctcctctccgcccaacgtcgggcgcggctcttccgccgccggccacgcgcgcgcgcgcgccatccgggcgctcaggaaccactccgcgcccgcgctcgccacgccaccgccgcctcctctaccggcggacccgactccggacctagactcggagttcgagtcctcgctcgaggccatcgtgctgctgcagcgctccatgctcgagaagcagtgggagctccccttcgaggacgacatcatttccactgacgacgagcaggacgacagggttagcaaggccacggtggtggcggcgcggtcgggcgtctcggcgcggcagcggcggatgagcggccggcggcggggagctggtcggaagagcgttgccatcagcccggagctgatgcagagccggaaccgcatctacctcaggggcaccgtcagcaaggacctcctcacgcacaagcaggtcatccagctctccaggaagatcaaggacggcatctggcttcagcaccaaagatcaaagctgaaggagaaactggggaacgagccatcatacaagcagctggcacagtcactgcggatatcagctcctgaactgcgcgcaaggatgcgcgagtcgtttctcgcgagggagatgctgacaatgagcaacatccgtctggtcatatccattgcccacaagtatgataacctcggtgtcgacttggcagaccttattcagggtggtctgatagggctactccgagggatcgaaaaatttgatgcatcgaggggattcaggatttccacctatgtgtattggtggattcgtcagggtgtttcaagagcattggctgataactcaaaaacgttcaggctccctacgtatttgcacgagaggttgatagcaattcgtggtgcaaagtacgcgttagaggatcaaggaattgctccgacaatagagaacatagcagagtcgctcaatatatcggaaaagaaagtgcacaatgctacagagaattcacgtttgcaggctgtgaacaaggttctttcactggatcaacaggcgttcccctccttaaacggtctacctggggacacactccatagttacatagaggatcaaaacgtcgcaaatgatccatggcatggatttgaggaaatgtatctcaaggaggaagttaacaatcttataaattcaaacctcaacgagcgtgagagggacattattcgattataccatggcataggaaaacagtgccatacatgggaggatattagcagacaatttgggttgtcgagggagcgtgtgaggcaagtaggactcgttgcgatggagaagctgaagcatgctgcgaggaggaagcatttggatgcattgcttgaggattattgagtgagatgtttttcgtttacacaaatgcagtggctgtatatactcggaaacatagggttcatcatccttgaaaggctttaccgctactcactcggcagataactatacatgtacatttgtgacaatcaataggcacgattcagatatctatgtctgcagctgcacagtcatcaaaacgacccaacaaaaagagaagctgtttttttccttgggaagcttcgtaaattttctgtaatgtatcatttagcaccttaatcagcagaagagcaacatttatgtaccggatctgtattattatctagttacaattacatggaagcaaaatgcttacaggaatatggtgcctacaaaatttatcttacatgtgcctaaaatgtgcgatcaaataaatttcaggagaaatttctgaatatcttggaaaacttttgttgacatatgggcatatggccagagtttggtcagggtaattccgcaagaatatgtacgtgacgtctcatttaggcctgcatattccatcaataattctagttgcatcaaatcaaccagaagatttttgcatgtctgaaatagcaacaatatggtggtattctgcaaatgattttgggaaacttgaaatgatagacctcaagaaaaatctctgaacattcccgagaactcctgattgacgtgtagcatgagctctaatcaaggcaactctacaaaaatgtatgtgtgatgaagcaattaaggaaatgcttgaa

SEQ ID NO: 218936 - DNA, 1528 bp, Zea Mays
cgacagcaaacagcaaaaagcaaaacccgcttctccctcctgcactccactacttgccttcccgcccgtcctctactcccccaaatccgccgggccaaaccctagagaaggcgatcggcatttccccgacggcgagcgggcggaagcggacaattatgccccgctgccgccgcgacaaggggcaggcgctcatcgacctcgacagcgacgccgaagacgagtgccaaagcaagggttctcaaacaagtagaacaacaacattgaagacatctgggagattgaaaaatgtattaacaacaacattgaagacatctgggaggagatccaaaaatgtattgccttcattttatgataacctcccccagggcagagcctcacgccatgcaactagcaggaggaacaagacaaatcaagacaagctaaatactgatatttttgaattatacatggatggacactggagcctccttgtcttatgccactttggtgatgcaaactgttcggatattaagaaaggaccacggatgatggtgctggactcactcaatacgacagatccgacaaggttgcgatcagcaatcagaaaattcattattgacatttacaagactgaggagcgggaagaaagcaagcagttcataaacaaaatctgcctcgagtttcccaaagtgccacagcaaaatggggatgaatgtggaatttatgttctttatttcatccgctgttttctactgaacaaaaaactgacagaagttcttgaaaacaaaaaattggaagaaaaatttacccagctgtttgatgatggctggtttaacccagaggaactagagaacttccgcaaggatatccattcattccaagcgaatcgaaataacaaagttgcagagtagggtatatagcaaaatggtgccaagtatataaattgcttcatccaccatgtagattgctgagtttcatcttcctttgtggctcattccgaggacatttgaaggctgttgaggatatgttgtatttccgttttatccatggaagagggagtacatagagcttcgctggcagacagcaaactagccatttatcgtatttaaaatatcgaacttggtagtgtatatatattatatctggaagtgctagattagcatcaccctcttggataatgttagcatttagcagggttacacacgatgtactagtgtatgtattctcattctagagatgctgtagagtctcctgcttatccgggtatagacgttacagtttcacatctgttgtgccgagatggtgatggtaatagtaagtaaaaaaaaaaaaaaactcgcagcagcttcctgtttcagatatcctgtagattctgctgttgctgttgtgacggggatagattagaatcagactttttccttgttcatgttttgcttacgtgagggcatctgctagattgttactgttatgtcagttttttaacctgatttgggtataaataagattctgtgttgaacatgccaaatgccctaagcctgttaaatttgct

SEQ ID NO: 218937 - DNA, 779 bp, Zea Mays
gcaaaacccgcttctccctcctgcactccactacttgccttcccgcccgtcctctactcccccaaatccgccgggccaaaccctagagaaggcgatcggcatttccccgacggcgagcgggcggaagcggacaattatgccccgctgccgccgcgacaaggggcaggcgctcatcgacctcgacagcgacgccgaagacgagtgccaaagcaagggttctcaaacaagtagaacaacaacattgaagacatctgggagattgaaaaatgtattaacaacaacattgaagacatctgggaggagatccaaaaatgtattgccttcattttatgataacctcccccagggcagagcctcacgccatgcaactagcaggaggaacaagacaaatcaagacaagctaaatactgatatttttgaattatacatggaagatctttggaagcacattgatgaagataagaagagtgcttatgcatacttggattctttatggtttaacatgtattaccatgggagtaataaacctaatgtccttaaatggataaaagctaagagaatattttcaagacaatatgtttttgttcctattgtttgttttggacactggagcctccttgtcttatgccactttggtgatgcaaactgttcggatattaagaaaggaccacggatgatggtgctggactcactcaatacgacagatccgacaaggttgcgatcagcaatcagaaagcaccgaaagagagaactttattgcttctttggttgatggggag

SEQ ID NO: 218938 - DNA, 1506 bp, Zea Mays
ctatacgaaaacgattgctggtcggagtgccaaagcaagggttctcaaacaagtagaacaacaacattgaagacatctgggagattgaaaaatgtattaacaacaacattgaagacatctgggaggagatccaaaaatgtattgccttcattttatgataacctcccccagggcagagcctcacgccatgcaactagcaggaggaacaagacaaatcaagacaagctaaatactgatatttttgaattatacatggaagatctttggaagcacattgatgaagataagaagagtgcttatgcatacttggattctttatggtttaacatgtattaccatgggagtaataaacctaatgtccttaaatggataaaagctaagagaatattttcaagacaatatgtttttgttcctattgtttgttttggacactggagcctccttgtcttatgccactttggtgatgcaaactgttcggatattaagaaaggaccacggatgatggtgctggactcactcaatacgacagatccgacaaggttgcgatcagcaatcagaaaattcattattgacatttacaagactgaggagcgggaagaaagcaagcagttcataaacaaaatctgcctcgagtttcccaaagtgccacagcaaaatggggatgaatgtggaatttatgttctttatttcatccgctgttttctactgaacaaaaaactgacagaagttcttgaaaacaaaaaattggaagaaaaatttacccagctgtttgatgatggctggtttaacccagaggaactagagaacttccgcaaggatatccattcattccaagcgaatcgaaataacaaagttgcagagtagggtatatagcaaaatggtgccaagtatataaattgatagcttcatccaccatgtagattgctgagtttcatcttcctttgtggctcattccgaggacatttgaaggctgttgaggatatgttgtatttccgttttatccatggaagagggagtacatagagcttcgctggcagacagcaaactagccatttatcgtatttaaaatatcgaacttggtagtgtatatatattatatctggaagtgctagattagcatcaccctcttggataatgttagcatttagcagggttacacacgatgtactagtgtatgtattctcattctagagatgctgtagagtctcctgcttatccgggtatagacgttacagtttcacatctgttgtgccgagatggtgatggtaatagtaagtaaaaaaaaaaaaaaactcgcagcagcttcctgtttcagatatcctgtagattctgctgttgctgttgtgacggggatagattagaatcagactttttccttgttcatgttttgcttacgtgagggcatctgctagattgttactgttatgtcagttttttaacctgatttgggtataaataagattctgtgttgaacatgccaaatgccctaagcctgttaaatttgct

SEQ ID NO: 218939 - DNA, 795 bp, Zea Mays
caaacacgaaggccgcgggattccacctctcacgcccgtctccctccggctgcctccccccttcgtgctccgtctcgcgccgacccatctgggctggggcatgcggtgataatttactcgtcggtacagggaccccgggttcgaaacgccgacacctcccttgcaccgacaaatatctctgtccctgatctcctctctgcggctgcacgcgatagatctctgctcgctagcgcacaatctgctcgatctgcacggttcgagctagatctggtggtaaagaaagcagacaaaaaggaatggggctcgcgtttgggaagctcttcagccgctcttcgccaataaggatatgcagatccttatggtcggcctcgacaccactggtaaaaccaccatcctctataagctcaagcttggtgagatcatcacaaccatccccgccatcggtcacattcagaggaacacattggacaaggttctagacactgttgcaaaaggaggacagacctcaagtaaaataggattgtcgtatgcttgagacgataacgatggagatcttttcaaataatggctggtctttttatcatagattgagtgcttgaatttgtgaaacctttgtcgaatgtgagattttcattccagagtggaaccctatgtttgtgagtttgaacagtcacatgtatcaaccaataccgaagctggaatattaataatattcccttttctaaaaaaatatttgtttcttttctatagaagctttgataggatagagcttaatgaattaatgttaggtgacca

SEQ ID NO: 218940 - DNA, 733 bp, Zea Mays
acaaacacgaaggccgcgggattccacctctcacgcccgtctccctccggctgcctccccccttcgtgctccgtctcgcgccgacccatctgggctggggcatgcggtgataatttactcgtcggtacagggaccccgggttcgaaacgccgacacctcccttgcaccgacaaatatctctgtccctgatctcctctctgcggctgcacgcgatagatctctgctcgctagcgcacaatctgctcgatctgcacggttcgagctagatctggtggtaaagaaagcagacaaaaaggaatggggctcgcgtttgggaagctcttcagccgctcttcgccaataaggatatgcagatccttatggtcggcctcgacaccactggtcacattcagaggaacacattggacaaggttctagacactgttgcaaaaggaggacagacctcaagtaaaataggattgtcgtatgcttgagacgataacgatggagatcttttcaaataatggctggtctttttatcatagattgagtgcttgaatttgtgaaacctttgtcgaatgtgagattttcattccagagtggaaccctatgtttgtgagtttgaacagtcacatgtatcaaccaataccgaagctggaatattaataatattcccttttctaaaaaaatatttgtttcttttctatagaagctttgataggatagagcttaatgaattaatgttaggtgacca

SEQ ID NO: 218941 - DNA, 1388 bp, Zea Mays
ctcgtgggcttgtcgagttgggatgagataaccgcgtgacggccgtccgctcacaagttcgctaccccgctcgccatgccgccgccctccctcgtctccatcctccccgccgcgtccatctcgccacgaagacgccaagcaaagcaccccaagacccccaccgcgagccatcccttcttctcccgaagacttgtgtcccaaccgccgcgccacgcctcgatctccccctccgctgccggcgggagcgggagcgacgagctccaccttctcgagaagccgttacctgccgtcgcagaggataacgaggccgaggaggagctcgagtctgctccggtgtcatcaacagaagaagcgctcgcgccttttctcaagttcttccagataaaacagctaaatgtacccatcaagatcaaaatttatgagtggaatgctagtggcttgctatctagaattgagggccttcgggcattccttcccaaacctgagatgatgactagaccaagaaatttcactgacctaaagaacaaagttgatcaagaaatgcatgtctgcattacgaggattgatgaagagaccaacgaattgataattagtgaaaaagaggcatgggcggtgacatgccttagagaagggactctcttgcaaggcacagtacgcaagttgtttccatacggtgcacaaattaggattggcgagactaacagaggtggtttactacatatctcgaacatgacacatggcaagctgagatctgtggctgatgtgctgaaagtcggcgagacggtgaaagctcttgtcataaaatcaactccagacagaattgctctgagcacaaaggacctcgagagcgaacctggattgcttatcactaacaaagagaaggtgttttctgaggctgaagagatggcgcgaagataccgggagcaaattgcagagccacagccacctggatccattgccgcggaagactcctgtgacgatgctgtccccttcaacgacgaatcccggtcctatgctaactggaagtggctgaaatttagcaagtccgacgacgtggcaaaccccaaatctggcgtcgaatcgtaatcgtggtgcaggaactctgtagaaattttgatcaattcagatattcagtttccatgcttacttaattgtgcggcttggcgccttggccgcctgcacccgggaaggtccgcgaggggcgacgctcgggttgcttcgacttcgaagcgtggtcgccgaaggtttttgcgatctcactccaactccgagcacgccactacgccagggacttgggcttgccccccccccccccgacctgtggtggtttgtagacagcaaagtgttccgagctgattaggcccaccggcctgtgacttggacttggg

SEQ ID NO: 218942 - DNA, 1832 bp, Zea Mays
atgccgccgccctccctcgtctccatcctccccgccgcgtccatctcgccacgaagacgccaagcaaagcaccccaagacccccaccgcgagccatcccttcttctcccgaagacttgtgtcccaaccgccgcgccacgcctcgatctccccctccgctgccggcgggagcgggagcgacgagctccaccttctcgagaagccgttacctgccgtcgcagaggataacgaggccgaggaggagctcgagtctgctccggtgtcatcaacagaagaagcgctcgcgccttttctcaagttcttccaggtgaagagcaccgaccccgacgtgggcgcagacaccgcggatggcgaggtgccggaggaggcgtcaaggagagatgtattgtccgccgctggtgagcgtggggttagttactacgaccccaagcccggggacttcgtcgccggcgtcgtggtccggagtgacgggaggacgctcgacgtcgacatcggttccagcggcgaaccagcgctgatgctggccaaggagtcggcgccggtgcccgcggaggagttcgggtacctagcgtgcgacgtcgcgtccaagtgtgcggcggagtttgcagcggaagggcgggtcggcgtcgtggtcaggcaattcaggggaggaggagagggggacggggaggcgatcatcgggaggaatgggaaggagaaagttgcgccggtgctgcgcgccggtacgatcgtgttcgctgaggttctcggccgaacacttggcgggcggccgctgctgtcagcgcgcagactgttccggcgcgtcgcgtggcacagagcgaggcagataaaacagctaaatgtacccatcaagatcaaaatttatgagtggaatgctagtggcttgctatctagaattgagggccttcgggcattccttcccaaacctgagatgatgactagaccaagaaatttcactgacctaaagaacaaagttgatcaagaaatgcatgtctgcattacgaggattgatgaagagaccaacgaattgataattagtgaaaaagaggcatgggcggtgacatgccttagagaagggactctcttgcaaggcacagtacgcaagttgtttccatacggtgcacaaattaggattggcgagactaacagaggtggtttactacatatctcgaacatgacacatggcaagctgagatctgtggctgatgtgctgaaagtcggcgagacggtgaaagctcttgtcataaaatcaactccagacagaattgctctgagcacaaaggacctcgagagcgaacctggattgcttatcactaacaaagagaaggtgttttctgaggctgaagagatggcgcgaagataccgggagcaaattgcagagccacagccacctggatccattgccgcggaagactcctgtgacgatgctgtccccttcaacgacgaatcccggtcctatgctaactggaagtggctgaaatttagcaagtccgacgacgtggcaaaccccaaatctggcgtcgaatcgtaatcgtggtgcaggaactctgtagaaattttgatcaattcagatattcagtttccatgcttacttaattgtgcggcttggcgccttggccgcctgcacccgggaaggtccgcgaggggcgacgctcgggttgcttcgacttcgaagcgtggtcgccgaaggtttttgcgatctcactccaactccgagcacgccactacgccagggacttgggcttgccccccccccccccgacctgtggtggtttgtagacagcaaagtgttccgagctgattaggcccaccggcctgtgacttggacttggg

SEQ ID NO: 218943 - DNA, 1828 bp, Zea Mays
atgccgccgccctccctcgtctccatcctccccgccgcgtccatctcgccacgaagacgccaagcaaagcaccccaagacccccaccgcgagccatcccttcttctcccgaagacttgtgtcccaaccgccgcgccacgcctcgatctccccctccgctgccggcgggagcgggagcgacgagctccaccttctcgagaagccgttacctgccgtcgcagaggataacgaggccgaggaggagctcgagtctgctccggtgtcatcaacagaagaagcgctcgcgccttttctcaagttcttccaggtgaagagcaccgaccccgacgtgggcgcagacaccgcggatggcgaggtgccggaggaggcgtcaaggagagatgtattgtccgccgctggtgagcgtggggttagttactacgaccccaagcccggggacttcgtcgccggcgtcgtggtccggagtgacgggaggacgctcgacgtcgacatcggttccagcggcgaaccagcgctgatgctggccaaggagtcggcgccggtgcccgcggaggagttcgggtacctagcgtgcgacgtcgcgtccaagtgtgcggcggagtttgcagcggaagggcgggtcggcgtcgtggtcaggcaattcaggggaggaggagagggggacggggaggcgatcatcgggaggaatgggaaggagaaagttgcgccggtgctgcgcgccggtacgatcgtgttcgctgaggttctcggccgaacacttggcgggcggccgctgctgtcagcgcgcagactgttccggcgcgtcgcgtggcacagagcgagataaaacagctaaatgtacccatcaagatcaaaatttatgagtggaatgctagtggcttgctatctagaattgagggccttcgggcattccttcccaaacctgagatgatgactagaccaagaaatttcactgacctaaagaacaaagttgatcaagaaatgcatgtctgcattacgaggattgatgaagagaccaacgaattgataattagtgaaaaagaggcatgggcggtgacatgccttagagaagggactctcttgcaaggcacagtacgcaagttgtttccatacggtgcacaaattaggattggcgagactaacagaggtggtttactacatatctcgaacatgacacatggcaagctgagatctgtggctgatgtgctgaaagtcggcgagacggtgaaagctcttgtcataaaatcaactccagacagaattgctctgagcacaaaggacctcgagagcgaacctggattgcttatcactaacaaagagaaggtgttttctgaggctgaagagatggcgcgaagataccgggagcaaattgcagagccacagccacctggatccattgccgcggaagactcctgtgacgatgctgtccccttcaacgacgaatcccggtcctatgctaactggaagtggctgaaatttagcaagtccgacgacgtggcaaaccccaaatctggcgtcgaatcgtaatcgtggtgcaggaactctgtagaaattttgatcaattcagatattcagtttccatgcttacttaattgtgcggcttggcgccttggccgcctgcacccgggaaggtccgcgaggggcgacgctcgggttgcttcgacttcgaagcgtggtcgccgaaggtttttgcgatctcactccaactccgagcacgccactacgccagggacttgggcttgccccccccccccccgacctgtggtggtttgtagacagcaaagtgttccgagctgattaggcccaccggcctgtgacttggacttggg

SEQ ID NO: 218944 - DNA, 873 bp, Zea Mays
caaacacctcataagtaagaaaggagtatatgtacaaacctagcctgtgtttcggagatgccatttttcttcttgttcggctgaacctgaatgtacgttcagaactggtgcaccaatgcaccccatgtccccatttccttgccatttcaatatttgtcaccactcaccagtgatgctggaatttcctttctgtggtttactacatatctcgaacatgacacatggcaagctgagatctgtggctgatgtgctgaaagtcggcgagacggtgaaagctcttgtcataaaatcaactccagacagaattgctctgagcacaaaggacctcgagagcgaacctggattgcttatcactaacaaagagaaggtgttttctgaggctgaagagatggcgcgaagataccgggagcaaattgcagagccacagccacctggatccattgccgcggaagactcctgtgacgatgctgtccccttcaacgacgaatcccggtcctatgctaactggaagtggctgaaatttagcaagtccgacgacgtggcaaaccccaaatctggcgtcgaatcgtaatcgtggtgcaggaactctgtagaaattttgatcaattcagatattcagtttccatgcttacttaattgtgcggcttggcgccttggccgcctgcacccgggaaggtccgcgaggggcgacgctcgggttgcttcgacttcgaagcgtggtcgccgaaggtttttgcgatctcactccaactccgagcacgccactacgccagggacttgggcttgccccccccccccccgacctgtggtggtttgtagacagcaaagtgttccgagctgattaggcccaccggcctgtgacttggacttggg

SEQ ID NO: 218945 - DNA, 2063 bp, Zea Mays
acatctcgtttagtcattttagtcaatggatatctattgtttcatctcgaggttctgagtcctctggtagcagcccaagagttggttcaggtcctaacttgcaactacaagatgatgagatgcatgttactgctgaaccaattcaatggtgggatgtgtgccgtaggacaaactggccagaaagagatgaaaacattgccaacattgtattgtataaccaaagaagcagtatgatggctatgggtgcttctgactgtgaagatagcgagcattcggattccactgcatcaaatgatggtatctctgggaaagagattatgagaatccgagaaaggtcaagctggtatctatctaatgcagaagtacagataaactcgtggcggattcccatctggcagaaatctaagatttgcttctatgtgatgggctatcctgctgcagagttggtcgaatcagttagcagtggtggtggagaaattgagattgagaagttacctcttcacgaggttgagatcaggagaagggaattgctccctgtattcaagcagttccaatattctgatcgacattccagtgataggaatattgcaaatggaggctttcagaatgccttgtcccacatcagtaatgcacagaatagctctgtaaaggataatggtgaatatgaaaccaaaccggtggctttgtctgggttttacgcaggtaagcatatgatgtcaatgtatatgtcattgttgtattatactattgttgattggaaaatctttctattgtagacacgaggaaaacagctaacacaaatggtctagctaggcaaacattctcagctgttaatcttcagcaagtggggaagtgcaattctattgaatctcttaacactgcaattgtgtctggcaaaacagagaatgggaacaatggctatatatccacgccacctgaaacaaaagcgtctatcagatcattgagcagctattctctcttggatggacatgtggacggaatgctgtctccaaatagcgcatcacacaagccagaaacaacaaataattctgtgctcagcaatgctgcaagcactgatgtacaaaatgggtgtctcaccactgtcgattctggacagcaggaggcgtctcattctcacagctcagtggagtttacccagtatttccaagagggctattgtaaaatatcagaactcgatgactgccgtgagttaactgaagctgttactgatgctgacagcagcagcagccactgcgagagagagaagcccgaggaagatggggataacgatgatttgctcggaggagtttttgccttcagcgaagaaggttctagccatctattcatataagttataggtttccatgtgtctactgatattcatcatcttatttctgccccttatcacgtcgcaggttgaacttactatatactgccttacttgagatcgagatataacgaaaaatgtgctcaaaacaaaacattcagtgtgcaatagtatgtaggggatggctttcatggaataaagctgtgtggaatcgatcatctggtacatatttttcaaggtaaaccttgcgcctagttctcaaaatgtgaggccaagattcctccaggcaatttactaatctgtggatccacgttgaaactttggaaggagttggtgttgtcgagaagttgctattgcctgccgtaacaccagttccttagcgttggtttgtacatatactgtaagacccatttgttttgtgccatacttccgggacatttgggtggttctggatctcgtaccttggcagccgtatttgttgaccgcctctgccagggcctgtgaatgttccatgtttatttgtacatatactctctgttttttttgggagaaaggaaaaaaaatgtagtgacaaattaactttataaacattcagtaaaggatttgcgttcatgatgatgtgcttatttgcatgtgctaggctcgctcctgtgtccgtcttcgtagtttgtacccgtgtctctttgatggagtcgagaaagttcccatttccaatccggtagacactgcatgcttc

SEQ ID NO: 218946 - DNA, 2648 bp, Zea Mays
cacaaatactcctttattgtcaaacacaggccgcctaagtccacagaacctcacaccttcgccaggagtgagcccatctacttctcccagcagtggaagtttagttgctagatatgcaatggagtctagcaagcagttagcttctggtattattgacatgggatatacattttcaaagtactgccaggaacttctgccagatggttctaactcccctttgtcatcgagcccaggcaggagatctggtaaaattctttccagtgtgcatccactggaagctgacaatgcaggcatggtagtcatcaaggatttcacatccaaaattgttgtctcacagtttaaggctcacacaagatcatgccaacctgcattgctaatggctcaggcgcaacacgttatgattggacagcttctcatgttcatctctataaactgtatcgtggcatgacatcagctgtcatacaagacatctcgtttagtcattttagtcaatggatatctattgtttcatctcgaggtacctgccatatttttacattgtccccatttggtggtgatgccagtctgcagccacagaattctcacagtgatgggccccctcttgccccatgtcagtcaaggccatggtggtcaaagccatcctttcttatggaccaacagcttcaccaagttccctcaactgtgacacattcggttgtcagtaggataaagaataacacttctggttggctaaataatgtcagcaatgtggctgcttctgcaagtggaaaactatctgtaccatctggcgctgtaactgctgttttccataattccatctaccagggttctttgccagttccatctaaggctaatgctttagagcatctactggtgtattcgccatctggtcatgtcattcaacatgaacttttaccttcttcaggttctgagtcctctggtagcagcccaagagttggttcaggtcctaacttgcaactacaagatgatgagatgcatgttactgctgaaccaattcaatggtgggatgtgtgccgtaggacaaactggccagaaagagatgaaaacattgccaacattgtattgtataaccaaagaagcagtatgatggctatgggtgcttctgactgtgaagatagcgagcattcggattccactgcatcaaatgatggtatctctgggaaagagattatgagaatccgagaaaggtcaagctggtatctatctaatgcagaagtacagataaactcgtggcggattcccatctggcagaaatctaagatttgcttctatgtgatgggctatcctgctgcagagttggtcgaatcagttagcagtggtggtggagaaattgagattgagaagttacctcttcacgaggttgagatcaggagaagggaattgctccctgtattcaagcagttccaatattctgatcgacattccagtgataggaatattgcaaatggaggctttcagaatgccttgtcccacatcagtaatgcacagaatagctctgtaaaggataatggtgaatatgaaaccaaaccggtggctttgtctgggttttacgcagagaatgggaacaatggctatatatccacgccacctgaaacaaaagcgtctatcagatcattgagcagctattctctcttggatggacatgtggacggaatgctgtctccaaatagcgcatcacacaagccagaaacaacaaataattctgtgctcagcaatgctgcaagcactgatgtacaaaatgggtgtctcaccactgtcgattctggacagcaggaggcgtctcattctcacagctcagtggagtttacccagtatttccaagagggctattgtaaaatatcagaactcgatgactgccgtgagttaactgaagctgttactgatgctgacagcagcagcagccactgcgagagagagaagcccgaggaagatggggataacgatgatttgctcggaggagtttttgccttcagcgaagaaggttctagccatctattcatataagttataggtttccatgtgtctactgatattcatcatcttatttctgccccttatcacgtcgcaggttgaacttactatatactgccttacttgagatcgagatataacgaaaaatgtgctcaaaacaaaacattcagtgtgcaatagtatgtaggggatggctttcatggaataaagctgtgtggaatcgatcatctggtacatatttttcaaggagttggtgttgtcgagaagttgctattgcctgccgtaacaccagttccttagcgttggtttgtacatatactgtaagacccatttgttttgtgccatacttccgggacatttgggtggttctggatctcgtaccttggcagccgtatttgttgaccgcctctgccagggcctgtgaatgttccatgtttatttgtacatatactctctgttttttttgggagaaaggaaaaaaaatgtagtgacaaattaactttataaacattcagtaaaggatttgcgttcatgatgatgtgcttatttgcatgtgctaggctcgctcctgtgtccgtcttcgtagtttgtacccgtgtctctttgatggagtcgagaaagttcccatttccaatccggtagacactgcatgcttc

SEQ ID NO: 218947 - DNA, 3839 bp, Zea Mays
cctcgtattccccttgcgtgcaaagctcactccccgtgccctcgccacgggcacccgaggaaagcctcgtgcactcgcggataggcagtgggccctgggtggaagagagtttgctccggggacgcgaagccgggtggggagaggcaaaccgggtgggatttcttgggattatttaagggcgagggagggagataggcacacgaaagcaacagcgaggagagagaagggaaaagggtgaaggaagccagggcccagggagttgttgaatttcggttctggtcggcgtcggaggggaagggacgacgagcggcgaggaagaggtgtgcgaggggaggagggatatggtggccagctgagtctgcggattgcggcggcagcggggatcggaggcagtgaggggcggcggcactcggatggtactggctttcgccagccccggaggcggcgatcgtggatgggcagcggcgggattgcggggcgggggttgtaggagcggtggcggcggggaagttggactcggagcgggtgcttgtgctggtctccgggctggggcagggagaggaggtgagggagcggcggggagggatgaggcgggggaagggggcaaggaatgggttgctgccgagttcgctgcggatcatatcgtcctgcctcaagacggtgacctccaacgccggctccgtcgcgtccagcgtgcgctcggccggcgcctccgtcgccgcatccatctcctcccaggcagaggacgagaaggatcaggttttgtgggctggattcgataaactagagcttcatccatcatcattcaagcatgtcctgcttgttggttattcaaatgggtttcaagtgcttgatgttgaggatgctgcaaatgtttgtgaattggtctcaaaacatgatggcccagttacgtttttacaaatgcaacccactccagtcggctctgaaggcattgaaggattcagagcatcacatcccatgcttctagttgttgctggtgatgagacaaacggcctgggtgcgattcaaggtggtcgcttaagtgctcttatcagagacacaaacagtgagcatcaagctgtaaattgcatttcaaccccaacagttgtccgtttctactctttgaagtctcacacctatgtacatgttcttcgattccggtctgctgtatatttagttcgctgcagtcctaggattgttgctgtagcacttgcagcacaaatctactgctttgacgctgttactcttgagaacaagctcagcgtcttgtcatatcctttgcaaggtgcacctggggtaaatattgggtatggcccgatggctgttggccccagatggttagcctatgccacaaatactcctttattgtcaaacacaggccgcctaagtccacagaacctcacaccttcgccaggagtgagcccatctacttctcccagcagtggaagtttagttgctagatatgcaatggagtctagcaagcagttagcttctggtattattgacatgggatatacattttcaaagtactgccaggaacttctgccagatggttctaactcccctttgtcatcgagcccaggcaggagatctggtaaaattctttccagtgtgcatccactggaagctgacaatgcaggcatggtagtcatcaaggatttcacatccaaaattgttgtctcacagtttaaggctcacacaagatcatgccaacctgcattgctaatggctcaggcgcaacacgttatgattggacagcttctcatgttcatctctataaactgtatcgtggcatgacatcagctgtcatacaagacatctcgtttagtcattttagtcaatggatatctattgtttcatctcgagtcaaggccatggtggtcaaagccatcctttcttatggaccaacagcttcaccaagttccctcaactgtgacacattcggttgtcagtaggataaagaataacacttctggttggctaaataatgtcagcaatgtggctgcttctgcaagtggaaaactatctgtaccatctggcgctgtaactgctgttttccataattccatctaccagggttctttgccagttccatctaaggctaatgctttagagcatctactggtgtattcgccatctggtcatgtcattcaacatgaacttttaccttcttcaggttctgagtcctctggtagcagcccaagagttggttcaggtcctaacttgcaactacaagatgatgagatgcatgttactgctgaaccaattcaatggtgggatgtgtgccgtaggacaaactggccagaaagagatgaaaacattgccaacattgtattgtataaccaaagaagcagtatgatggctatgggtgcttctgactgtgaagatagcgagcattcggattccactgcatcaaatgatggtatctctgggaaagagattatgagaatccgagaaaggtcaagctggtatctatctaatgcagaagtacagataaactcgtggcggattcccatctggcagaaatctaagatttgcttctatgtgatgggctatcctgctgcagagttggtcgaatcagttagcagtggtggtggagaaattgagattgagaagttacctcttcacgaggttgagatcaggagaagggaattgctccctgtattcaagcagttccaatattctgatcgacattccagtgataggaatattgcaaatggaggctttcagaatgccttgtcccacatcagtaatgcacagaatagctctgtaaaggataatggtgaatatgaaaccaaaccggtggctttgtctgggttttacgcagacacgaggaaaacagctaacacaaatgagaatgggaacaatggctatatatccacgccacctgaaacaaaagcgtctatcagatcattgagcagctattctctcttggatggacatgtggacggaatgctgtctccaaatagcgcatcacacaagccagaaacaacaaataattctgtgctcagcaatgctgcaagcactgatgtacaaaatgggtgtctcaccactgtcgattctggacagcaggaggcgtctcattctcacagctcagtggagtttacccagtatttccaagagggctattgtaaaatatcagaactcgatgactgccgtgagttaactgaagctgttactgatgctgacagcagcagcagccactgcgagagagagaagcccgaggaagatggggataacgatgatttgctcggaggagtttttgccttcagcgaagaaggttgaacttactatatactgccttacttgagatcgagatataacgaaaaatgtgctcaaaacaaaacattcagtgtgcaatagtatgtaggggatggctttcatggaataaagctgtgtggaatcgatcatctggtacatatttttcaaggagttggtgttgtcgagaagttgctattgcctgccgtaacaccagttccttagcgttggtttgtacatatactgtaagacccatttgttttgtgccatacttccgggacatttgggtggttctggatctcgtaccttggcagccgtatttgttgaccgcctctgccagggcctgtgaatgttccatgtttatttgtacatatactctctgttttttttgggagaaaggaaaaaaaatgtagtgacaaattaactttataaacattcagtaaaggatttgcgttcatgatgatgtgcttatttgcatgtgctaggctcgctcctgtgtccgtcttcgtagtttgtacccgtgtctctttgatggagtcgagaaagttcccatttccaatccggtagacactgcatgcttc

SEQ ID NO: 218948 - DNA, 1137 bp, Zea Mays
gttatttgccaaattgaggttgtccatttgggagatggcatcaagttcattgaagacagtgttgctgcaaatcagtcagtaaatggcagtaccagaaatgcattcaaaatacttatcctcgatgttgattcatctgatctaagctctgggctgtcttgcccaccagaaaactttgtcgaagatcctttccttctaatagcaaaggagttccttttggagggcggcctttttgtcatcaatttagtctcgcggtcaacctcagtgagggaaacggttgtttcaagactgaaagcggtcttcgaacacctgtactcactgcaacttgaagaagacataaatgaggttctgtttgcatcaccgagcggaagatacctagaaatcaatgacattagtgcaggagcctccaaactgcaggacttgctcaaaattccggtggatgtagaatcagatatacagaagttgcagaaactccagtaacaatctcacctgacgcggagcaccatccatttgcatccacttgatttaggtgctgttcagttctcaccccagcagggcacaccaaaatgtcctttgttttgctcgtggaagccaaattaggaccagctgttttgtacaccagaattttgtctaactgcgctatagaaaaattttggcctgccagaatgtcttttacaaccaaagaggtgaaaaatctggcttgacctgattgggcctagaacaggctagagcgcatttcaaacttttaaacgtccacaaattggccgtgttttcccatatgtttgcctcgccaactctgcatgggtaaaacagtgcagctgtacagatttagaggatgtgtggaggaaacagaatgtgcatcatgcttggtctctgatggtttacaaatttcagcgaatatattgatcagaattcaggctgtgttatgatagctgtagcgtgtttggcaatgtgagtgtcgggtaggctctcgggaccctcgtaagcattcacacctcccgtcctagcagagtagcagcttcatgtactatgactatgggtgtactcggatacgaatgataagatttgtatgaatatgacatcttaaatactcaactttaagaatatgaatacggataaatattggataatgagtatcca

SEQ ID NO: 218949 - DNA, 1156 bp, Zea Mays
ggggaatcaaccaaattctggacagaccgttggctacaaggtccatttgggagatggcatcaagttcattgaagacagtgttgctgcaaatcagtcagtaaatggcagtaccagaaatgcattcaaaatacttatcctcgatgttgattcatctgatctaagctctgggctgtcttgcccaccagaaaactttgtcgaagatcctttccttctaatagcaaaggagttccttttggagggcggcctttttgtcatcaatttagtctcgcggtcaacctcagtgagggaaacggttgtttcaagactgaaagcggtcttcgaacacctgtactcactgcaacttgaagaagacataaatgaggttctgtttgcatcaccgagcggaagatacctagaaatcaatgacattagtgcaggagcctccaaactgcaggacttgctcaaaattccggtggatgtagaatcagatatacagaagttgcagaaactccagtaacaatctcacctgacgcggagcaccatccatttgcatccacttgatttaggtgctgttcagttctcaccccagcagggcacaccaaaatgtcctttgttttgctcgtggaagccaaattaggaccagctgttttgtacaccagaattttgtctaactgcgctatagaaaaattttggcctgccagaatgtcttttacaaccaaagaggtgaaaaatctggcttgacctgattgggcctagaacaggctagagcgcatttcaaacttttaaacgtccacaaattggccgtgttttcccatatgtttgcctcgccaactctgcatgggtaaaacagtgcagctgtacagatttagaggatgtgtggaggaaacagaatgtgcatcatgcttggtctctgatggtttacaaatttcagcgaatatattgatcagaattcaggctgtgttatgatagctgtagcgtgtttggcaatgtgagtgtcgggtaggctctcgggaccctcgtaagcattcacacctcccgtcctagcagagtagcagcttcatgtactatgactatgggtgtactcggatacgaatgataagatttgtatgaatatgacatcttaaatactcaactttaagaatatgaatacggataaatattggataatgagtatcca

SEQ ID NO: 218950 - DNA, 1319 bp, Zea Mays
gagttggccccttaaagtagttgaagttgaatgccagctttgttgtggtcagcatcaccgttgtaggccttggtgctggttgtttcccaatgtttctccgtggatgtctgcctttcgtagatattgaggtcgttgagttggaccccttggtggctgagctagcaaagaaatattttggcttttcaatggatgagcaattgaaggtccatttgggagatggcatcaagttcattgaagacagtgttgctgcaaatcagtcagtaaatggcagtaccagaaatgcattcaaaatacttatcctcgatgttgattcatctgatctaagctctgggctgtcttgcccaccagaaaactttgtcgaagatcctttccttctaatagcaaaggagttccttttggagggcggcctttttgtcatcaatttagtctcgcggtcaacctcagtgagggaaacggttgtttcaagactgaaagcggtcttcgaacacctgtactcactgcaacttgaagaagacataaatgaggttctgtttgcatcaccgagcggaagatacctagaaatcaatgacattagtgcaggagcctccaaactgcaggacttgctcaaaattccggtggatgtagaatcagatatacagaagttgcagaaactccagtaacaatctcacctgacgcggagcaccatccatttgcatccacttgatttaggtgctgttcagttctcaccccagcagggcacaccaaaatgtcctttgttttgctcgtggaagccaaattaggaccagctgttttgtacaccagaattttgtctaactgcgctatagaaaaattttggcctgccagaatgtcttttacaaccaaagaggtgaaaaatctggcttgacctgattgggcctagaacaggctagagcgcatttcaaacttttaaacgtccacaaattggccgtgttttcccatatgtttgcctcgccaactctgcatgggtaaaacagtgcagctgtacagatttagaggatgtgtggaggaaacagaatgtgcatcatgcttggtctctgatggtttacaaatttcagcgaatatattgatcagaattcaggctgtgttatgatagctgtagcgtgtttggcaatgtgagtgtcgggtaggctctcgggaccctcgtaagcattcacacctcccgtcctagcagagtagcagcttcatgtactatgactatgggtgtactcggatacgaatgataagatttgtatgaatatgacatcttaaatactcaactttaagaatatgaatacggataaatattggataatgagtatcca

SEQ ID NO: 218951 - DNA, 1437 bp, Zea Mays
gtctgctctgtttcttcttgtttctgtaattttaatgtgcaaggatccaagaacagtctgagaattgaccataaatttcttggtagctcatatcacagcagtatcatatctgggctttctttagttgcatcttctctgagtgctgctgcttcatctggagaaaaagtcagcatcaccgttgtaggccttggtgctggttgtttcccaatgtttctccgtggatgtctgcctttcgtagatattgaggtcgttgagttggaccccttggtggctgagctagcaaagaaatattttggcttttcaatggatgagcaattgaaggtccatttgggagatggcatcaagttcattgaagacagtgttgctgcaaatcagtcagtaaatggcagtaccagaaatgcattcaaaatacttatcctcgatgttgattcatctgatctaagctctgggctgtcttgcccaccagaaaactttgtcgaagatcctttccttctaatagcaaaggagttccttttggagggcggcctttttgtcatcaatttagtctcgcggtcaacctcagtgagggaaacggttgtttcaagactgaaagcggtcttcgaacacctgtactcactgcaacttgaagaagacataaatgaggttctgtttgcatcaccgagcggaagatacctagaaatcaatgacattagtgcaggagcctccaaactgcaggacttgctcaaaattccggtggatgtagaatcagatatacagaagttgcagaaactccagtaacaatctcacctgacgcggagcaccatccatttgcatccacttgatttaggtgctgttcagttctcaccccagcagggcacaccaaaatgtcctttgttttgctcgtggaagccaaattaggaccagctgttttgtacaccagaattttgtctaactgcgctatagaaaaattttggcctgccagaatgtcttttacaaccaaagaggtgaaaaatctggcttgacctgattgggcctagaacaggctagagcgcatttcaaacttttaaacgtccacaaattggccgtgttttcccatatgtttgcctcgccaactctgcatgggtaaaacagtgcagctgtacagatttagaggatgtgtggaggaaacagaatgtgcatcatgcttggtctctgatggtttacaaatttcagcgaatatattgatcagaattcaggctgtgttatgatagctgtagcgtgtttggcaatgtgagtgtcgggtaggctctcgggaccctcgtaagcattcacacctcccgtcctagcagagtagcagcttcatgtactatgactatgggtgtactcggatacgaatgataagatttgtatgaatatgacatcttaaatactcaactttaagaatatgaatacggataaatattggataatgagtatcca

SEQ ID NO: 218952 - DNA, 1796 bp, Zea Mays
aactggacattcatcacaatttctcacgaaaaagttggcatttgcagtgttcagaccataatgaaaattcaacaaattattaaagcatgctcttaagagtttgtagtttgagcaaatacgggttcatgatggcaggtgatggtgttaaacaaagacatactctgcaagaggtaacttcagaaataactggtccaatggttgtggaagatgttgtctatgaaaatgctgatggagatcaaggttccatgtctgagaaaatgttccgtcgtcttatttttggaagaagttctggtttagtgcaatctgaagcgttgttaatcagagatcctcccagtgatgaggtagacaaaaagaacaaaagtgcagctgcaacatctaaaaaaagaaggaaccataaaaggggatccaagaacagtctgagaattgaccataaatttcttggtagctcatatcacagcagtatcatatctgggctttctttagttgcatcttctctgagtgctgctgcttcatctggagaaaaagtcagcatcaccgttgtaggccttggtgctggttgtttcccaatgtttctccgtggatgtctgcctttcgtagatattgaggtcgttgagttggaccccttggtggctgagctagcaaagaaatattttggcttttcaatggatgagcaattgaaggtccatttgggagatggcatcaagttcattgaagacagtgttgctgcaaatcagtcagtaaatggcagtaccagaaatgcattcaaaatacttatcctcgatgttgattcatctgatctaagctctgggctgtcttgcccaccagaaaactttgtcgaagatcctttccttctaatagcaaaggagttccttttggagggcggcctttttgtcatcaatttagtctcgcggtcaacctcagtgagggaaacggttgtttcaagactgaaagcggtcttcgaacacctgtactcactgcaacttgaagaagacataaatgaggttctgtttgcatcaccgagcggaagatacctagaaatcaatgacattagtgcaggagcctccaaactgcaggacttgctcaaaattccggtggatgtagaatcagatatacagaagttgcagaaactccagtaacaatctcacctgacgcggagcaccatccatttgcatccacttgatttaggtgctgttcagttctcaccccagcagggcacaccaaaatgtcctttgttttgctcgtggaagccaaattaggaccagctgttttgtacaccagaattttgtctaactgcgctatagaaaaattttggcctgccagaatgtcttttacaaccaaagaggtgaaaaatctggcttgacctgattgggcctagaacaggctagagcgcatttcaaacttttaaacgtccacaaattggccgtgttttcccatatgtttgcctcgccaactctgcatgggtaaaacagtgcagctgtacagatttagaggatgtgtggaggaaacagaatgtgcatcatgcttggtctctgatggtttacaaatttcagcgaatatattgatcagaattcaggctgtgttatgatagctgtagcgtgtttggcaatgtgagtgtcgggtaggctctcgggaccctcgtaagcattcacacctcccgtcctagcagagtagcagcttcatgtactatgactatgggtgtactcggatacgaatgataagatttgtatgaatatgacatcttaaatactcaactttaagaatatgaatacggataaatattggataatgagtatcca

SEQ ID NO: 218953 - DNA, 3009 bp, Zea Mays
gatttgatgctgaagccgaagccagcgcgatgcttctcgattgttcgatgaaatggtcaagtacgtttattgactacgtgatacggaggatcagaactgagtcgaccacaagatgtcgccgcgcgtgagtttctccacaagatgatgctgacggacgaaactgaagatggacagacgaagcaagtatcagaacaaaaggatgatcgccaagtggtcgtcgtctaacaaacactaacgtagtgtttattccaggcaagccccggtgcatttaccccttccttgtgtttttaaaaagatttttatacactttaagtctagcgaaatgtgcattaagtttataggagttgcttggaaaccctttgatgcattgcctaccttgatatccatacctttatagatacttctggtgaagtatcaaaacatgatttacaaaaatgcttagccctgcttataagcagatggagtttgtcctttgcacttatgcccagctcaggtttatcctgaggaaggatggcttctacctgcaacaatatttttcttgggagcatggtgggatcttactgcaaagttccctataatgctcttttcatcctaaggaacacaaaacaatcctaaggatggaagtacttaaatcgggacttgggctaggaacaggtgatgctccgcccaagttagttaaggattggatgcgtatgtaggcctgtatgatcaaggactatcttaactagccacatgccctggatatgggacaggataagcttgaacccggctattccatacatgaaaagacaatcgcgcactgggagtggagagatggcgagagtggcacgtaccctcctggcaaaggaccgcctaaaaagggtggtgtgctctcgggtggcgcggacctgttcatgcagtggaggatccgtgggaatggttgacatatgcaagggttaagtgctacatatgtcgtgtggttagaaatcctcagctgagtaaatcgattcggatcgccgttatatccccggagagtggagacttgatcgctgccctgcaacctaagtcaggatgtgaacctcatgaataaaaatgatgttgtattgatgagatggtgaaattagaccagatgcaaatagagtctattaatatttaatctgacgttaaaatattgaaagtaaggactcactttagtaagctatttctgcaaaagtatctaagttgatttttgctaaagcctctccttgattcccaaatccagcatatccttgagagtcttttctttagtcgggtaagtcttgctgagtaattccatactcagggttttattccctattgtttttcaggtcatagttttgtgctgctgatgatggtgttaagtgtcggtgggctcgaccttcttataagtctaagtaacccttctatacttcttaatgaggatggtcccttgagctagcatatatttcaaacttatacttttgtaatcactccgataaactaatgtaaaatttttgtaacctgtaaaatttggtagtaagatttacgctgcaacaatattggtgtgtgtgatttgtgttacttaatcccgcggttctggttgtaagtggtttatccgatgtccttgggacactcggacggatcctgttaagttatttggtgcacatgcatagtcgtctgaggtctttgagacaaggacaggtgcatgtgggcccaataacttgggaggttctgccacactggggctaggcatgccgcttttaaaaatttgctttgcttttaaagatttgctgacaagctgaagaattcgatacaggtagaatgctaatacatgagagcacaacacaactaattaatgtctgtttacatctaattttatacagatataagaggacaaataattgatgaactaatgctagaaaattgcagttaagaacactgtaggcacacaacaataatcaaaagtctgcaaatgtggactacaagaagattgaacgatttcagttaaatctgctataaccgataagagaataagtcaaattaatagtttgaagtgaagcaatgctatggcttataattgaatgctatttgagagactatccataggatatgtcatttggaaacaacatattcaatactgattgcttcaagtagaagataggctatctgtaatttctgaatcttcaaaagtttgcatccaatggcaaatagataccggaatgagctcaagtgatacatttagagcaatgattaattccatctacttctttgcaatatttaagcaaatgcatttctaacgttacaaatttgatcacttttgaggtatgaacatttagaagccgaagaccatggcggcataggtacacagtgccaacgttgcctccgtcgatgcggcgcagcagcctagtgtcacgcggtctcaacggcgccgcggccggcgccgacgccacgtggatggtcacccacgccatcgacgaggtcagagcagcagtagccgccatgggtagcgcgcagatgtggagcagtcgaatgagaaagacgggctggagcaccacagcaggttggtgttgctgctggccagcagccgctcctctccccaccggcgccgagaggggacctgtgacccaaggatctgtttttcggggggatatggtgttcgcggtcgtcaaggatctcaggctcaaccactccaaggacccatcggccatgtggttacgcaatccaaaggcctccctcaccgatttcatctagggtccagttcttgaaagggtgggaatgtgtccaagaagacaaaggcatcgacccgccaattcttcgctacaaattcaaacagcactaggttaagctgaatgcaaaccatcgagatggtccaggtcgaggacctccatggcacctacgttggtgtgggttatgccacctcatcgtgactgtcatcgattgggcctccgagtccaggagaatacctacgatgaagaaagagacatgctgcacatgcacgagatatcaaatgcagaatttacatttgcaccgtgg

SEQ ID NO: 218954 - DNA, 3657 bp, Zea Mays
gatttgatgctgaagccgaagccagcgcgatgcttctcgattgttcgatgaaatggtcaagtacgtttattgactacgtgatacggaggatcagaactgagtcgaccacaagatgtcgccgcgcgtgagtttctccacaagatgatgctgacggacgaaactgaagatggacagacgaagcaagtatcagaacaaaaggatgatcgccaagtggtcgtcgtctaacaaacactaacgtagtgtttattccaggcaagccccggtgcatttaccccttccttgtgtttttaaaaagatttttatacactttaagtctagcgaaatgtgcattaagtttataggagttgcttggaaaccctttgatgcattgcctaccttgatatccatacctttatagatacttctggtgaagtatcaaaacatgatttacaaaaatgcttagccctgcttataagcagatggagtttgtcctttgcacttatgcccagctcaggtttatcctgaggaaggatggcttctacctgcaacaatatttttcttgggagcatggtgggatcttactgcaaagttccctataatgctcttttcatcctaaggaacacaaaacaatcctaaggatggaagtacttaaatcgggacttgggctaggaacaggtgatgctccgcccaagttagttaaggattggatgcgtatgtaggcctgtatgatcaaggactatcttaactagccacatgccctggatatgggacaggataagcttgaacccggctattccatacatgaaaagacaatcgcgcactgggagtggagagatggcgagagtggcacgtaccctcctggcaaaggaccgcctaaaaagggtggtgtgctctcgggtggcgcggacctgttcatgcagtggaggatccgtgggaatggttgacatatgcaagggttaagtgctacatatgtcgtgtggttagaaatcctcagctgagtaaatcgattcggatcgccgttatatccccggagagtggagacttgatcgctgccctgcaacctaagtcaggatgtgaacctcatgaataaaaatgatgttgtattgatgagatggtgaaattagaccagatgcaaatagagtctattaatatttaatctgacgttaaaatattgaaagtaaggactcactttagtaagctatttctgcaaaagtatctaagttgatttttgctaaagcctctccttgattcccaaatccagcatatccttgagagtcttttctttagtcgggtaagtcttgctgagtaattccatactcagggttttattccctattgtttttcaggtcatagttttgtgctgctgatgatggtgttaagtgtcggtgggctcgaccttcttataagtctaagtaacccttctatacttcttaatgaggatggtcccttgagctagcatatatttcaaacttatacttttgtaatcactccgataaactaatgtaaaatttttgtaacctgtaaaatttggtagtaagatttacgctgcaacaatattggtgtgtgtgatttgtgttacttaatcccgcggttctggttgtaagtggtttatccgatgtccttgggacactcggacggatcctgttaagttatttggtgcacatgcatagtcgtctgaggtctttgagacaaggacaggtgcatgtgggcccaataacttgggaggttctgccacactggggctaggcatgccgcttttaaaaatttgctttgcttttaaagatttgctgacaagctgaagaattcgatacaggtagaatgctaatacatgagagcacaacacaactaattaatgtctgtttacatctaattttatacagatataagaggacaaataattgatgaactaatgctagaaaattgcagttaagaacactgtaggcacacaacaataatcaaaagtctgcaaatgtggactacaagaagattgaacgatttcagttaaatctgctataaccgataagagaataagtcaaattaatagtttgaagtgaagcaatgctatggcttataattgaatgctatttgagagactatccataggatatgtcatttggaaacaacatattcaatactgattgcttcaagtagaagataggctatctgtaatttctgaatcttcaaaagtttgcatccaatggcaaatagataccggaatgagctcaagtgatacatttagagcaatgattaattccatctacttctttgcaatatttaagcaaatgcatttctaacgttacaaatttgatcacttttgaggtatgaacatttagaagccgaagaccatggcggcataggtacacagtgccaacgttgcctccgtcgatgcggcgcagcagcctagtgtcacgcggtctcaacggcgccgcggccggcgccgacgccacgtggatggtcacccacgccatcgacgaggtcagagcagcagtagccgccatgggtagcgcgcagatgtggagcagtcgaatgagaaagacgggctggagcaccacagcaggttggtgttgctgctggccagcagccgctcctctccccaccggcgccgagaggggacctgtgacccaaggatctgtttttcggggggatatggtgttcgcggtcgtcaaggatctcaggctcaaccactccaaggacccatcggccatgtggttacgcaatccaaaggcctccctcaccgatttcatctagggtccagttcttgaaagggtgggaatgtgtccaagaagacaaaggcatcgacccgccaattcttcgctacaaattcaaacagcactagggtgagatcagtgggcttgagagtagcatcatccttcaaacaagatcaatattttgccacaactcataatgagatcgagatttcattgtacatgcatccacaaggcatctttttatattttttaacatgagtgtactgatgcaatgtcgttctgttttgtcattttatttttgttatatcttggagatgtcgagcttgatcaatattttgccattgaatttatgagtggcctatatgttcactgtttgcccatttcttcagttaagctgaatgcaaaccatcgagatggtccaggtcgaggacctccatggcacctacgttggtgtgggttatgccacctcatcgtgactgtcatcgattgggcctccgagtccaggagaatacctacgatgaagaaagagacatgctgcacatgcacgagatagatgtcggctctatggacgaacactcgaccaagtcagttgaggagtatgagggcctagccatgcgcgacgtgatgactactggtccgacgatgtgcagcaagttgtgagttaaagatgaactcacctgccctggagagcaacattcataggagtgaggcaaaatggctggtaccaccacaacatggacccattcctgaagatgtccaaggaggtggtagtcgacaccataatgtcttgcgcgtcattgtgtcaccaacaggcaacacgctgcgctggtaccgacgggtgttgtgtttcttaggcatctgcttctgtgctttgagctgtgctatagagtggttgtgccaactactgattttaaaagaaaaaggtgagctgagaaccattgttgaaaacaaatatgtaacggttcgttct

SEQ ID NO: 218955 - DNA, 846 bp, Zea Mays
atgatgctcatgacatttcccaatgcaacaaaatatctgaaaaaggtggggggctatcgcgtcggctacgacatcaagctctctggcaccgagtcccctaggtcggtcacggggctcgagggcgtccgcgtccgtgtgctatttgcctgggtgctcatcaccggcgtcgaggcgaccgacggagaggtcactgtccacatcgagccaatcaggaagtcgttccccgccattgggttcaaatccagccctcggtgcatcatcggattggcgacgggggtggagactaaggatccaagccactatcacggaccacaacatcaagtgtatgaggcagggcaaagaggccaacaggtgcaggttttcctcatttttattagatcctttcttagcgatcttggatctccactctccaggactccagggtttgccgttttcttgacgatcacacgtatcaaaaagggttctcaagtattattggtaaagtatcacaattagatatagcttgaagttgcattttacgcgttgagctatcacattgtagactaacttgtacagttttcttttgcagtccttcttgcttgctttcacatttggggtcttctgctattatttacgttgattatttttcccctgcaatttggcatgcatacaaacatttgctctctatttttctatccaacacttgttcctccccgacggtgcattcagcaacaccgtcttcttctccgtgtcggagcaccttgggccacaggggcgaacccgtgaacgacattctttcggcgtgtcacgacctcctgtcgcaagctcgatgctctccccatcgacacacgagccccttggaggggc

SEQ ID NO: 218956 - DNA, 464 bp, Zea Mays
ctcaacattgtgttttttggttgctgtattggacaatgctaatggagttacaactccaaggacaggaaggtttaagcaagtcaaggatggactgctttctgcagtttcggaaatgcaatactgcgctagagagatgaggaagattattaactcgctatggacaatgaatttgaatgaagtgtcgtcgagacttcaagagatggctgtgtttctcgaaggtgcagctgatcgtggtcatatggctgctgaggagcttagtcctccccgcctcaatttctaatgatttgtatgcagaaaacactatgtacataggggaactgggaggggtaactgatgccgactgggcacttgacaatggaggatatttgagatggttcaatgtaatctatggtgataatatgaaccatgtgggtggttgtagggtgcttttatctgaaacatctctatgtgattaaagagacaag

SEQ ID NO: 218957 - DNA, 3950 bp, Zea Mays
atcacaggcaataactagataagcagattgataagtcagcgcacatatcagactgtctcatatcctagcagtataaattatcgctcaactcggtgtcctaacagtttctactcctcaacctggttcggtggtgtgattatctccctctaccaggcggttccgtagtaaacaactcggcccggcagtcgttcccagggcgagatcggatcgatcgagagcttcctagacctggacctgcgctagacctcaaagactcgatcgcaccgcatcttctctctctgctcctcgttcgcttcgtcgccggcgaccccgccgccagcttccccttccgctggccgccctttgcctcgcccctgaggcgtcggtttccactgcataggagtggggcggcgatccgactggacctagggttgcgagaccccatagggtgaccctaggagcatccgcctccacgtgggtgaggcggaggagggaggatgtcgtcgctcagccgggagctggtcttcctcattctgcagttcctcgatgaggagaaattcaaagagaccgtccacaagcttgagcaggagtccggattctatttcaacatgaagtactttgaggacgaggtcgtcaatgggaattgggatgaggtggagcgctaccttggtggattcacaaaggtcgacgataaccgctactccatgaagatattctttgagatccgcaaacagaagtatctcgaggctcttgataagcatgatcggtcaaaggctgttgaaatcttggtcaaggaccttaaggtatttgcatcctttaatgaggagttgtttaaggagatcacacagcttctgaccttggagaactttagggaaaatgagcagctttctaagtatggcgatacaaaatctgcaagagcaataatgtttgttgagctgaagaagctgattgaagctaaccccttgttccgtgataagctacaatttcctagcctgaagaattctaggctgcggacacttattaaccagagcttaaactggcagcaccagctttgcaaaaatcccaggcctaatcctgacatcaagactctatttgttgatcattcatgtggacaaccaaatggtgcacgtgctccatcaccagcaaacaatccattactcggatctatgcccaaacctggaggtttccctccattgggtgcccatggaccttttcaaccttcaccaacacctgttccacctctggctgggtggatgtcaaaccctccagcagtaacacatcctgctgtgtctggtggtgccattggatttggcactcctacaaatcctgccgctttgttgaagcatcctagaacacccacaactgctaatcctggtatggattatccatcaggagattctgatcacatctccaagagaactagaccagttggcatgtctgaggaggtgaatcttccggtgaatatgctgcctgtgacttatccgcagagccataattaccaacaagatgatttccataaaactgttgcacggaccttgagccaaggatcaacaccgatgagcatggattttcatccacttcaacaaactcttcttcttgttggtaccaatgttggcgacattggattgtgggatgttggtaccaaagacagactcgttgtaaggaacttcaaagtctgggacctcagtaaatgtacaatgattctccaggcatcactggttaaggatccagctgtgtcagttaatcgcataatatggagtcctgatggaaccttgtttggtgttgcttattcaaggcatattgtacaaatttattcctataatggtggcgacgatattagacaacacttggagattgatgcacatattggtggtgtaaatgacattgcatttgctcatccaaataagcagttatgtataattacatgtggagatgataagacaattaaggtatgggaggccaccagtggagctaagcaatttacatttgaaggacatgaagctcctgtttattcagtttgtccacattacaaggaaaatattcagttcatcttctcgactgctttagatgggaagatcaaggcatggctatatgataatatgggatctagagttgactatgatgcaccaggtcattggtgcactacaatggcatatagcgcagatggttcaaggttattttcatgtgggactagcaaggatggtgaatcacatctagtagaatggaatgaaagtgaaggagcagtgaagagaacatatcagggatttcgtaagcgatccatgggtgtcgtgcaattcgataccacacggaacaggtttttggccgctggggatgaattcatgattaagatatgggacatggacagcacgggtcttctaactaccattgatgcagatggtggcttaattgcaagtccacggatacgcttcaacaaggaaggaactcttttggctgtctctaccgttgacaatggcatcaagatcttagcaaatgctgatggacttcggttgctgcgcacgctggaaaatcgttcttttgatgcttctcgtaatgcatctgaggctgtaacaaagcctctaataaatcccttgactgctgcggcaaatgcagctgcagcaagcagttcaggagctggtgctccgtcagctgtaactgcaatgaatggggataccagaagtttggttgatgtaaaacctagaatagctgatgagtcactggacaagtcaaaggcgtggaagcttatggagataactgagtcaactcagtgcagatcaattaaactggcagacaacatgagaacgagcaagatctcgagattgatttacacaaattctggtcttgctatcttggctttaacttcaagtgctgttcatctactctggaaatggccacgcagtgatcggaattctggaaaggcaagcgcgagtgtgtctcccacactatggcaaccaccaagtggcattttgatgactaatgacacgactgacaacaatcctgaagaagctgttcactgctttgctttgtcgaagaatgattcatatgtcatgtccgcttctggaggaaaaatctctctgtttaacatgatgactttcaagacaatgacaacatttatgcctgcaccgccggcagcaacttttcttgcatttcacccccaagataacaacataattgcaattggaatggatgactcaaccatccaaatctataatgtccgaattgatgaggtcaaaagcaagctcaggggtcactctaagagaatcacgggtcttgccttttcaaatgtgctaaatgtcttagtctcttccggagctgatgctcagttatgtgtttggaacacggatggatgggaaaagcaaaagaacagatttttgcagataccgtcaggtcgccaatctaatatcttggacactcgtgttcagttccaccaagatcaaatgcactttcttgttgtgcatgaaacccagattgccatctatgaaactacaaaactagaaccagtgaagcagtggcctgttcgagagaattcacctccaatcacacatgctgcattctcgtgtgacagtcaactgatctatgcaagctttatggatgccactgttggcatatttaatgcatcgagtttgagacttcaatgtcggattcttccagcttcgtatctccccccaaatatcagtccgagtgttcatcctgttgtggttgcggcacacccttcggaagcgagtcagtttgctctagggctgactgatggtggtgtttttgtgttggaacctttggaatcagatagaaaatggggaaatcctccaccggtagaaaatgggtctgctagcaacttgtccgcaccgcctcctaatggagcttcaagttctgatcaacctgaaagatgattgagaagatggaactggtagatttttcgtggcatgagtctaaccaagtttttctatcaaggtgttgaaattgtcagaagaaacatg

SEQ ID NO: 218958 - DNA, 3908 bp, Zea Mays
tatcgctcaactcggtgtcctaacagtttctactcctcaacctggttcggtggtgtgattatctccctctaccaggcggttccgtagtaaacaactcggcccggcagtcgttcccagggcgagatcggatcgatcgagagcttcctagacctggacctgcgctagacctcaaagactcgatcgcaccgcatcttctctctctgctcctcgttcgcttcgtcgccggcgaccccgccgccagcttccccttccgctggccgccctttgcctcgcccctgaggcgtcggtttccactgcataggagtggggcggcgatccgactggacctagggttgcgagaccccatagggtgaccctaggagcatccgcctccacgtgggtgaggcggaggagggaggatgtcgtcgctcagccgggagctggtcttcctcattctgcagttcctcgatgaggagaaattcaaagagaccgtccacaagcttgagcaggagtccggattctatttcaacatgaagtactttgaggacgaggtcgtcaatgggaattgggatgaggtggagcgctaccttggtggattcacaaaggtcgacgataaccgctactccatgaagatattctttgagatccgcaaacagaagtatctcgaggctcttgataagcatgatcggtcaaaggctgttgaaatcttggtcaaggaccttaaggtatttgcatcctttaatgaggagttgtttaaggagatcacacagcttctgaccttggagaactttagggaaaatgagcagctttctaagtatggcgatacaaaatctgcaagagcaataatgtttgttgagctgaagaagctgattgaagctaaccccttgttccgtgataagctacaatttcctagcctgaagaattctaggctgcggacacttattaaccagagcttaaactggcagcaccagctttgcaaaaatcccaggcctaatcctgacatcaagactctatttgttgatcattcatgtggacaaccaaatggtgcacgtgctccatcaccagcaaacaatccattactcggatctatgcccaaacctggaggtttccctccattgggtgcccatggaccttttcaaccttcaccaacacctgttccacctctggctgggtggatgtcaaaccctccagcagtaacacatcctgctgtgtctggtggtgccattggatttggcactcctacaaatcctgccgctttgttgaagcatcctagaacacccacaactgctaatcctggtatggattatccatcaggagattctgatcacatctccaagagaactagaccagttggcatgtctgaggagcaggtgaatcttccggtgaatatgctgcctgtgacttatccgcagagccataattaccaacaagatgatttccataaaactgttgcacggaccttgagccaaggatcaacaccgatgagcatggattttcatccacttcaacaaactcttcttcttgttggtaccaatgttggcgacattggattgtgggatgttggtaccaaagacagactcgttgtaaggaacttcaaagtctgggacctcagtaaatgtacaatgattctccaggcatcactggttaaggatccagctgtgtcagttaatcgcataatatggagtcctgatggaaccttgtttggtgttgcttattcaaggcatattgtacaaatttattcctataatggtggcgacgatattagacaacacttggagattgatgcacatattggtggtgtaaatgacattgcatttgctcatccaaataagcagttatgtataattacatgtggagatgataagacaattaaggtatgggaggccaccagtggagctaagcaatttacatttgaaggacatgaagctcctgtttattcagtttgtccacattacaaggaaaatattcagttcatcttctcgactgctttagatgggaagatcaaggcatggctatatgataatatgggatctagagttgactatgatgcaccaggtcattggtgcactacaatggcatatagcgcagatggttcaaggttattttcatgtgggactagcaaggatggtgaatcacatctagtagaatggaatgaaagtgaaggagcagtgaagagaacatatcagggatttcgtaagcgatccatgggtgtcgtgcaattcgataccacacggaacaggtttttggccgctggggatgaattcatgattaagatatgggacatggacagcacgggtcttctaactaccattgatgcagatggtggcttaattgcaagtccacggatacgcttcaacaaggaaggaactcttttggctgtctctaccgttgacaatggcatcaagatcttagcaaatgctgatggacttcggttgctgcgcacgctggaaaatcgttcttttgatgcttctcgtaatgcatctgaggctgtaacaaagcctctaataaatcccttgactgctgcggcaaatgcagctgcagcaagcagttcaggagctggtgctccgtcagctgtaactgcaatgaatggggataccagaagtttggttgatgtaaaacctagaatagctgatgagtcactggacaagtcaaaggcgtggaagcttatggagataactgagtcaactcagtgcagatcaattaaactggcagacaacatgagaacgagcaagatctcgagattgatttacacaaattctggtcttgctatcttggctttaacttcaagtgctgttcatctactctggaaatggccacgcagtgatcggaattctggaaaggcaagcgcgagtgtgtctcccacactatggcaaccaccaagtggcattttgatgactaatgacacgactgacaacaatcctgaagaagctgttcactgctttgctttgtcgaagaatgattcatatgtcatgtccgcttctggaggaaaaatctctctgtttaacatgatgactttcaagacaatgacaacatttatgcctgcaccgccggcagcaacttttcttgcatttcacccccaagataacaacataattgcaattggaatggatgactcaaccatccaaatctataatgtccgaattgatgaggtcaaaagcaagctcaggggtcactctaagagaatcacgggtcttgccttttcaaatgtgctaaatgtcttagtctcttccggagctgatgctcagataccgtcaggtcgccaatctaatatcttggacactcgtgttcagttccaccaagatcaaatgcactttcttgttgtgcatgaaacccagattgccatctatgaaactacaaaactagaaccagtgaagcagtggcctgttcgagagaattcacctccaatcacacatgctgcattctcgtgtgacagtcaactgatctatgcaagctttatggatgccactgttggcatatttaatgcatcgagtttgagacttcaatgtcggattcttccagcttcgtatctccccccaaatatcagtccgagtgttcatcctgttgtggttgcggcacacccttcggaagcgagtcagtttgctctagggctgactgatggtggtgtttttgtgttggaacctttggaatcagatagaaaatggggaaatcctccaccggtagaaaatgggtctgctagcaacttgtccgcaccgcctcctaatggagcttcaagttctgatcaacctgaaagatgattgagaagatggaactggtagatttttcgtggcatgagtctaaccaagggtaatacttcttttaggacttgtttgggaatacttcttttaggacttgtttgggagcaagtgaattggaaagggattgagcggactaaaatccttcccaaacacgcccttactgctgaacaaaag

SEQ ID NO: 218959 - DNA, 1783 bp, Zea Mays
tctcctatactatactagtgccaaattgcttctgcattctcttcccttcctgcatttcctcctctgtctcatcggggacccctgtccctcgtggcgacggccggtcgaccgccgctgccgaggacttcgccggcgacgaccacccccacgcccactacattatatgttgaagaatggcttggagctaacagtactgacaccaacttttggttatgatcagaagcgactggagtgcagtaatgaatctctaattgtttgcaatataagaaccagatacctcattcaaatggtttttccatgttacagattggtagccaagaacaaagagaaaaacacacaacagtaatgggtcacgaccatatgtctcgtataaagatgcatatggcagaaggttcttttggtgacaggatccggtgccagcaacctgggtgcaatgaggttgtcgatagaagggtagtgtactgcaaaattcacagtggagagttgtcatgccaacacagtgccatgcactgagcaagagttacatgtcaagcatgaaggtggtgatcgaggtaaactaaaggatagttctgggtacactttgggtcaggctgcacaatttatcttctctggggcaagcatgctttgcaagaacgataactgcagcaagcaagcacacgagaactcaatccactgtaagttgcatagcggcggcgttaacaagggctgcatggcacggggctgtacaagaggtgcgcatggaggcacgcctttgtgcattgggcacggaggtgggaggcggtgtgtggtccctggatgcccaaatgcagcatgtggccaaggccgtagcgaccgctgcgtgaggcacggtggcggcaagagatgtaaattcgaagggtgcgcgaagggcgcgcaagggaacaccgatcactgcataaggcacggtgggggaaggcggtgcaggttccaaggatgtacaaagagtgcgcagggacgcacagatttctgcatcaagcatggtgggggcagccggtgcaggttccaagggtgtggcgcgagcgcaaaatggggaacggatttgtgctctgtgcacaggaagagcctgttgggcggtgacaatgccatccctgaagctttggccgccccttcagaaaaacgacgccgggccaagacgccccaaagggaagcgaagccgtccgaggtcttccaagagaatgtcacaacagcagctactgctggtaacagcacacagcacacgggcttccttctcgtagctgcccctgttgctaaccgtgacatactgaccaatggtatggcagtgacggggcaagctgcaatagccccccaacggatagtggcaccgatgttcatgagatcaccaacgccatctggatcagtggctgcctcggcacagaggtgggaggcgggagcaagcaggggtatgctgggtctgtagaaaggtggtataatttgggaaggcttggagacaccttgcccaagatagttctctgattattggctttcagactgagaaacctctgaaacttgacagccttgtgccgtcaacggactctagtgatgtcctgtgcagctgtgctctctcatttgtattgtaaattgtaatgcaaatctctagttgttcttgtgtatgttctcttgtcgccttgtagtagcgtggaaaccggtcgggggaccatctggaactttggatgataagcaataatattgtggcatggcctagctttgcaggtccagttggacttttttaagtagtggacattttacacattattttttcgtaccc

SEQ ID NO: 218960 - DNA, 1500 bp, Zea Mays
ttctgacacattccatgtgctagtgtggacaggatccggtgccagcaacctgggtgcaatgaggttgtcgatagaagggtagtgtactgcaaaattcacagtggagagttgtcatgccaacagttcagttacctccagagcggactggagagctcaggtttatctgtgcgccctgttaacgacagccaatttaagggatctgtttccattgcagcagtgccatgcactgagcaagagttacatgtcaagcatgaaggtggtgatcgaggtaaactaaaggatagttctgggtacactttgggtcaggctgcacaatttatcttctctggggcaagcatgctttgcaagaacgataactgcagcaagcaagcacacgagaactcaatccactgtaagttgcatagcggcggcgttaacaagggctgcatggcacggggctgtacaagaggtgcgcatggaggcacgcctttgtgcattgggcacggaggtgggaggcggtgtgtggtccctggatgcccaaatgcagcatgtggccaaggccgtagcgaccgctgcgtgaggcacggtggcggcaagagatgtaaattcgaagggtgcgcgaagggcgcgcaagggaacaccgatcactgcataaggcacggtgggggaaggcggtgcaggttccaaggatgtacaaagagtgcgcagggacgcacagatttctgcatcaagcatggtgggggcagccggtgcaggttccaagggtgtggcgcgagcgcaaaatggggaacggatttgtgctctgtgcacaggaagagcctgttgggcggtgacaatgccatccctgaagctttggccgccccttcagaaaaacgacgccgggccaagacgccccaaagggaagcgaagccgtccgaggtcttccaagagaatgtcacaacagcagctactgctggtaacagcacacagcacacgggcttccttctcgtagctgcccctgttgctaaccgtgacatactgaccaatggtatggcagtgacggggcaagctgcaatagccccccaacggatagtggcaccgatgttcatgagatcaccaacgccatctggatcagtggctgcctcggcacagaggtgggaggcgggagcaagcaggggtatgctgggtctgtagaaaggtggtataatttgggaaggcttggagacaccttgcccaagatagttctctgattattggctttcagactgagaaacctctgaaacttgacagccttgtgccgtcaacggactctagtgatgtcctgtgcagctgtgctctctcatttgtattgtaaattgtaatgcaaatctctagttgttcttgtgtatgttctcttgtcgccttgtagtagcgtggaaaccggtcgggggaccatctggaactttggatgataagcaataatattgtggcatggcctagctttgcaggtccagttggacttttttaagtagtggacattttacacattattttttcgtaccc

SEQ ID NO: 218961 - DNA, 269 bp, Zea Mays
atcactttgcactacccttttatctagtcgctgcagggccagggcagtgaagtctcttcccgttcttgagttctagcgagagtgcatcgtgtgagtgttgtggttcatgttcacgtcggtgtttactctccccggccatcagtgtctcgtcgggaacgccgcggtgccgccggtgaacgccgctgggaacggtctcgccgtggcagaccttatctggggccggttgcgtgcgtgatctggggttggtctgctctgtggagaagttttat

SEQ ID NO: 218962 - DNA, 750 bp, Zea Mays
ggtgtgcctgtgaaccaacccaagttcgatgctttggtgttgcttgcatgttggcgtggggcttggaagcttagccacgtgtttgagccatgttgtgctggcgccatcaaagccttctctaccgtgaaccggccgagctcaatcactttgcactacccttttatctagtcgctgcagggccagggcagtgaagtctcttcccgttcttgagttctagcgagagtgcatcgtgtgagtgttgtggttcatgttcacgtcggtgtttactctccccggccatcagtgtctcgtcgggaacgccgcggtgccgccggtgaacgccgctgggaacggtctcgccgtggcagaccttatctggggccggttgcgtgcgtgatctggggttggtctgctctgtggtgagtcgcaagtgcctgctccaccatggttgggaactctactgcatcgtcgttccggcttaacaccatcgaagttggaagccgccgacacgcgcagaggaagcgcgggcgcgcgcggtgctggagcctagggctgtaagcgctgtctgagtgggccggttttgcctggagttgggctggctggaacaccaagaacaagaattggtccttgtgaagatggaacctactccagtgctattgatccagtggtggactccatctaactgcctatcgtgatagaagatctcagatctcctcctgtaataaggcaagccccggtgcatttgccccttccttgtgttttaaatgcttt

SEQ ID NO: 218963 - DNA, 732 bp, Zea Mays
ggtgtgcctgtgaaccaacccaagttcgatgctttggtgttgcttgcatgttggcgtggggcttggaagcttagccacgtgtttgagccatgttgtgctggcgccatcaaagccttctctaccgtgaaccggccgagctcaatcactttgcactacccttttatctagtcgctgcagggccagggcagtgaagtctcttcccgttcttgagttctagcgagagtgcatcgtgtgagtgttgtggttcatgttcacgtcggtgtttactctccccggccatcagtgtctcgtcgggaacgccgcggtgccgccggtgaacgccgctgggaacggtctcgccgtggcagaccttatctggggccggttgcgtgcgtgatctggggttggtctgctctgtggtgagtcgcaagtgcctgctccaccatggttgggaactctactgcatcgtcgttccggcttaacaccatcgaagttggaagccgccgacacgcgcagaggaagcgcgggcgcgcgcggtgctggagcctagggctgtaagcgctgtctgagtgggccggttttgcctggagttgggctggctggaacaccaagaacaagaattggtccttgtgaagatggaacctactccagtgctattgatccagtggtggactccatctaactgcctatcgtgatagaagatctcagatctcctcctgtaataaggcaagccccggtgcatttgccccttcc

SEQ ID NO: 218964 - DNA, 1477 bp, Zea Mays
tagaatgaatataaacattttctagaggaagctaagaaacgtgatcataggatattagggaaagcacaggaactcttctttttccatgaacttagccctggaagctgcttcttccttccacatggtgctaggatatataacaaactgatggacttcatgcgacaacagtacagagatagaggataccaagaggtgttgagcccaaatatttacaatatgcaactatgggaaacttctggacacgccgcaaactataaggagaacatgtttgtttttgagatcgagaaacaggaatttggacttaagccaatgaattgtccaggacactgtctaatgtttgctaatagggttcggtcgtacagagagttgcctcttcgcatggctgattttggagtgcttcatagaaatgagcttagtggtgctcttacaggtttgacacgtgttagaagattccagcaggatgatgctcatatcttctgcagagaagaccaaatcaaggatgaagttaaggctgttttggaattcatcaattatgtttatgagatatttggcttcaaatatgagttggagttgtctacgagaccagagaagtatctaggtgaagttgaaacttggaacaaagctgagcaacaattgacagaagctttaaatgagtttgggaagccatggaagattaatgaaggggatggtgctttctacggcccaaaaattgatattggtgtgtttgatgcccttaagaggaaatttcagtgtgcaaccctacagctggattttcagctgcccattcggttcaagctggcttattctgctgaggatgaagccaaaattgaaaggcctgtgatgatacacagggcaatcctaggttcggttgaaaggatgcttgccattcttttggagcattacaatggtaaatggcccttatggctaagccctcgccaggccattgtttgctcggtatcttctggttcagtggaatatgcgaaacaggttcttgccactctacatgaagctggttttcatgttgatattgacgcgagtgacaggacaatacaaaagaaggtacgggaagctcaactggcccaattcaactacattcttgtcgtaggtgcacaagaggccgagactggaaatatatgcgttagggtaagagacaatgctgacctggtcacaacgagtgtagatggcttcatcacacgtttgagggaggaaatcgcagccttcaaatgattttgatgctgcataatttcctactactcgtttgtgattttgacgagtttttagtgaccagcatcgagttcctcgtgttactgttcttgtttgtatgaagctaaaaggttgtctttttgttattaattacagatgcgaagttaaatactgccgctagtaaaaaaatatgcttgttgacttccagtgatttacgttactgttggacagtgtcttcagttttcgccctctcttaccacccaccatgttgacc

SEQ ID NO: 218965 - DNA, 1438 bp, Zea Mays
agattcgtcactgcggctatactgaaactgggtcaagcaatcttggatatcatcttgagctggaaagcaagaagaaacatgtctcttgttgttaagctacgatacatcttgaagttactatcagctgcttcttgggttgtgattttgcctgtaacttatgcatacacttggaagaatccaactggtcttgcaagagcaattaaaagttggcttggtgatggtcagaatcagccatcattatacattttggcagttgtgatttatttggcaccaaacttgctgtccgctacactatttcttttccctgtaattaggagagctcttgagagatcaaatcttaaagtcgtaacattcataatgtggtggtcgcagcctcgcttatttgttggaagaggaatgcatgagggcgcattctcccttttcaagtatacaatgttctgggtcttgcttttggccactaaattggttgtgagcttctatgtggagatcaaaccacttgtgcagccaacaaaagatataatgaaggagccaatacgaacatttaagtggcatgagtttttcccccatgcaaataacaacattggtgttgtcattgcgctttgggctcctattattcttgtctatttcatggatactcaaatttggtatgcaattttctcaacgctaattggtggtgtctatggggcttgtcgccgtcttggtgagataaggacattggggatgttgagatctcggttcgaatccctgcctaaggctttcaatcaatgcttgattccatctgacacaagcaaaaggagaggattccgggctgctttctccaaaccttctaagacatctgaggataccagagaacaagaaaaaatagccgcaagatttgctcagatttggaatttaattatcacaagcttccgtgaggaagatttgatagacgacagagagaaggacttgttacttgttccatactgcaaagatcgtgatatggatataatccaatggccaccattcctgcttgccagcaagattccaatagcattggatatggccgcagatagtggtggaaaagatcgtgatctaaagaagaggatgaaatcggatccatattttacttatgctatcaaggaatgctatgcttctttcaaaaacatcatatatgaactagtgatcgattcacgagagagaggttacatacaaaagatcttcgatgcggtggatgagcacatagcagaagagactttgataaaggagctgaacatgagtaaccttcctaccctaagcaagaagttcattgagctgcttgacttactggaaagtaacaacaaagaagatcatgatcagatcatcatattgttccaagacatgcttgaagtggttacaagggacataatggttgaccagctcagcgagagaactgcacaccattgtattaagaagataaagg

SEQ ID NO: 218966 - DNA, 2229 bp, Zea Mays
agattcgtcactgcggctatactgaaactgggtcaagcaatcttggatatcatcttgagctggaaagcaagaagaaacatgtctcttgttgttaagctacgatacatcttgaagttactatcagctgcttcttgggttgtgattttgcctgtaacttatgcatacacttggaagaatccaactggtcttgcaagagcaattaaaagttggcttggtgatggtcagaatcagccatcattatacattttggcagttgtgatttatttggcaccaaacttgctgtccgctacactatttcttttccctgtaattaggagagctcttgagagatcaaatcttaaagtcgtaacattcataatgtggtggtcgcagcctcgcttatttgttggaagaggaatgcatgagggcgcattctcccttttcaagtatacaatgttctgggtcttgcttttggccactaaattggttgtgagcttctatgtggagatcaaaccacttgtgcagccaacaaaagatataatgaaggagccaatacgaacatttaagtggcatgagtttttcccccatgcaaataacaacattggtgttgtcattgcgctttgggctcctattattcttgtctatttcatggatactcaaatttggtatgcaattttctcaacgctaattggtggtgtctatggggcttgtcgccgtcttggtgagataaggacattggggatgttgagatctcggttcgaatccctgcctaaggctttcaatcaatgcttgattccatctgacacaagcaaaaggagaggattccgggctgctttctccaaaccttctaagacatctgaggataccagagaacaagaaaaaatagccgcaagatttgctcagatttggaatttaattatcacaagcttccgtgaggaagatttgatagacgacagagagaaggacttgttacttgttccatactgcaaagatcgtgatatggatataatccaatggccaccattcctgcttgccagcaagattccaatagcattggatatggccgcagatagtggtggaaaagatcgtgatctaaagaagaggatgaaatcggatccatattttacttatgctatcaaggaatgctatgcttctttcaaaaacatcatatatgaactagtgatcgattcacgagagagaggttacatacaaaagatcttcgatgcggtggatgagcacatagcagaagagactttgataaaggagctgaacatgagtaaccttcctaccctaagcaagaagttcattgagctgcttgacttactggaaagtaacaacaaagaagatcatgatcagatcatcatattgttccaagacatgcttgaagtggttacaagggacataatggttgaccagctcagcgaactactggaattgatacatggtgcaaataataaaagatctgaaggaatgacatcacttgaccaacaagatcagttgttcacgaaagctattgattttcctgtaaagaaaacccaagcatggaatgaaaagataaaaaggcttcgacttttactcacggtgaaggaatcggctatggatgtccctacaaacctggatgctaggaggaggatatctttctttgctaattctctttttatgtcgatgccagatgctccaaaagtgcggcaaatgttgcccttctctgtcttgactccttattataaagaagatgttcttttctcttcacaagcactagcagaacagaatgaggacggagtttccatccttttttatttgcaaaaaatctacccagatgaatggaaaaattttcttgaaagggtgcattgtgagagtgaagatcaactccacgagactgagcattctgaagagcagcttcgcctttgggcatcataccggggacaaactttgacaagaactgtaagagggatgatgtactacagacaagctttagtccttcaggcttcccttgatatggccagagatgatgaccttatggagggttttagagcagctgacctgttatctgaatctgatgaatcaccactattgactcaatgcaaagctatagctgatatgaaattcacatatgttgtatcatgccagcaatacggtattcagaaacgttctggtgatccacatgcacaggatattctgagattgatgaccacttaacaaagtaatcgaggttgaggtggaggcggttgaagtcgtggagggagcagccac

SEQ ID NO: 218967 - DNA, 4458 bp, Zea Mays
agattcgtcactgcggctatactgaaactgggtcaagcaatcttggatatcatcttgagctggaaagcaagaagaaacatgtctcttgttgttaagctacgatacatcttgaagttactatcagctgcttcttgggttgtgattttgcctgtaacttatgcatacacttggaagaatccaactggtcttgcaagagcaattaaaagttggcttggtgatggtcagaatcagccatcattatacattttggcagttgtgatttatttggcaccaaacttgctgtccgctacactatttcttttccctgtaattaggagagctcttgagagatcaaatcttaaagtcgtaacattcataatgtggtggtcgcagcctcgcttatttgttggaagaggaatgcatgagggcgcattctcccttttcaagtatacaatgttctgggtcttgcttttggccactaaattggttgtgagcttctatgtggagatcaaaccacttgtgcagccaacaaaagatataatgaaggagccaatacgaacatttaagtggcatgagtttttcccccatgcaaataacaacattggtgttgtcattgcgctttgggctcctattattcttgtctatttcatggatactcaaatttggtatgcaattttctcaacgctaattggtggtgtctatggggcttgtcgccgtcttggtgagataaggacattggggatgttgagatctcggttcgaatccctgcctaaggctttcaatcaatgcttgattccatctgacacaagcaaaaggagaggattccgggctgctttctccaaaccttctaagacatctgaggataccagagaacaagaaaaaatagccgcaagatttgctcagatttggaatttaattatcacaagcttccgtgaggaagatttgatagacgacagagagaaggacttgttacttgttccatactgcaaagatcgtgatatggatataatccaatggccaccattcctgcttgccagcaagattccaatagcattggatatggccgcagatagtggtggaaaagatcgtgatctaaagaagaggatgaaatcggatccatattttacttatgctatcaaggaatgctatgcttctttcaaaaacatcatatatgaactagtgatcgattcacgagagagaggttacatacaaaagatcttcgatgcggtggatgagcacatagcagaagagactttgataaaggagctgaacatgagtaaccttcctaccctaagcaagaagttcattgagctgcttgacttactggaaagtaacaacaaagaagatcatgatcagatcatcatattgttccaagacatgcttgaagtggttacaagggacataatggttgaccagctcagcgaactactggaattgatacatggtgcaaataataaaagatctgaaggaatgacatcacttgaccaacaagatcagttgttcacgaaagctattgattttcctgtaaagaaaacccaagcatggaatgaaaagataaaaaggcttcgacttttactcacggtgaaggaatcggctatggatgtccctacaaacctggatgctaggaggaggatatctttctttgctaattctctttttatgtcgatgccagatgctccaaaagtgcggcaaatgttgcccttctctgtcttgactccttattataaagaagatgttcttttctcttcacaagcactagcagaacagaatgaggacggagtttccatccttttttatttgcaaaaaatctacccagatgaatggaaaaattttcttgaaagggtgcattgtgagagtgaagatcaactccacgagactgagcattctgaagagcagcttcgcctttgggcatcataccggggacaaactttgacaagaactgtaagagggatgatgtactacagacaagctttagtccttcaggcttcccttgatatggccagagatgatgaccttatggagggttttagagcagctgacctgttatctgaatctgatgaatcaccactattgactcaatgcaaagctatagctgatatgaaattcacatatgttgtatcatgccagcaatacggtattcagaaacgttctggtgatccacatgcacaggatattctgagattgatgaccacttatccttcacttagggttgcgtacatcgatgaagtcgaagagcctagcaaagacaaaaataagaaaatagagaaggtttactactccgcattggtgaaggcagcagtaacgaagcctgatgatcctggccagaaacttgatcagggatatatataggataaagcttccaggaaatgcaatgctaggtgaaggaaaaccagagaaccagaaccatgccataattttcacacgaggtgaaggtctccaaaccatcgacatgaatcaggaatttgttgcaagagtttctgaagaaacatgatggtgtgagatatccatcaatacttggtgtaagagaacacatcttcaccggaagcgtgtcttctcttgcatggttcatgtcaaaccaagaaacaagttttgtgaccattggacaacgtgtacttgccaatcctttgagagttcgatttcattatgggcatcctgatatctttgatcgacttttccacctcacacgtggaggtgtaagcaaagcttctaagattatcaatcttagtgaagacatatttgctggatttaattcaacactgcgtgaaggaaatgttacacatcatgaatacatgcaagttggcaagggcagagatgttggtctcaaccagatctcactatttgaagcaaaaatagcaaatggtaatggtgaacagacgctgagccgtgacgtgtaccgtcttggacatcgttttgactttttcagaatgttgtcctgctactatactactattggtttttacttcagcacaatgataacagtttggaccgtttatgtattcctctacgggcgcctgtatcttgtcctaagtggccttgatgaagcattagccactggaaagaggtttatacacaacgagcctctccaggttgctctagcttcacagtcttttgtgcagcttgggttcttgatggcgctgcctatgatgatggaaattggtctagagagaggattcagaactgcattgagtgactttgtacttatgcagctccagttagcatctgtgttcttcacattctctcttgggaccaaaactcactactacggaaccacactgctacatggaggagctgaatatagagctacagggcgtggatttgtggtgttccatgccaagtttgctgagaattatcgattgtattcgcgaagccattttgtgaagggcattgaactgatgattttgcttattgtgtatgaaatatttgggcagtcataccgaggagctattgcgtacattttcatcacattttccatgtggtttatggttgtcacctggctctttgccccattcctgtttaatccttctgggttcgagtggcagaaaattgtggatgactggactgactggaataagtggatcagtaaccgtggaggtattggggtgccgccagagaaaagttgggagtcatggtgggaaaaagagcaggagcctcttaggcattctggaaagcgtggcactgttcttgaaatagtgctttcgttgcgcttctttatttaccagtatggtcttgtttatcatttgaacatcaccactcacacgaagagcgttctggtttattgcatctcgtgggtcataatctttgtcattttgctcgtgatgaagactgtatcagttggcaggaggaaattcagtgcagagttccagcttgtgttccggctgatcaaggggctgatattcataacgtttatctctattatcataatcttgatagcaatcccacacatgacagttcaggacatctttgtttgcatccttgcgttcatgccaactggatggggtttgcttctgatagcacaaactatgaggtcagctatttcacatatggggctatggggatcggtcaaggcgcttgcccgaggctatgagatcatcatgggcttgctgttgttcaccccgatcgcattcctcgcttggttcccgtttgtttcggagttccagacaaggatgctgttcaaccaggccttcagtagaggtctgcagatttctcgtatcctaggcggacacaagaaagaccgggctgcacggaacaaggagtgagtagccgagcagcgtgagcctggtagtgctgacctacatacaattcaaccatgccccacgtggcattatacttgtactggttattatgccaggttgtatattgcaaggaaaggaattcatctctgctaacgtgccagattgtatgtgtggcagcaggtactcgatcggtgagcactcctatagcttttttattattatttatgggtaaagtcaaagaaactaa

SEQ ID NO: 218968 - DNA, 4102 bp, Zea Mays
agattcgtcactgcggctatactgaaactgggtcaaggtatacaatgttctgggtcttgcttttggccactaaattggttgtgagcttctatgtggagatcaaaccacttgtgcagccaacaaaagatataatgaaggagccaatacgaacatttaagtggcatgagtttttcccccatgcaaataacaacattggtgttgtcattgcgctttgggctcctattattcttgtctatttcatggatactcaaatttggtatgcaattttctcaacgctaattggtggtgtctatggggcttgtcgccgtcttggtgagataaggacattggggatgttgagatctcggttcgaatccctgcctaaggctttcaatcaatgcttgattccatctgacacaagcaaaaggagaggattccgggctgctttctccaaaccttctaagacatctgaggataccagagaacaagaaaaaatagccgcaagatttgctcagatttggaatttaattatcacaagcttccgtgaggaagatttgatagacgacagagagaaggacttgttacttgttccatactgcaaagatcgtgatatggatataatccaatggccaccattcctgcttgccagcaagattccaatagcattggatatggccgcagatagtggtggaaaagatcgtgatctaaagaagaggatgaaatcggatccatattttacttatgctatcaaggaatgctatgcttctttcaaaaacatcatatatgaactagtgatcgattcacgagagagaggttacatacaaaagatcttcgatgcggtggatgagcacatagcagaagagactttgataaaggagctgaacatgagtaaccttcctaccctaagcaagaagttcattgagctgcttgacttactggaaagtaacaacaaagaagatcatgatcagatcatcatattgttccaagacatgcttgaagtggttacaagggacataatggttgaccagctcagcgaactactggaattgatacatggtgcaaataataaaagatctgaaggaatgacatcacttgaccaacaagatcagttgttcacgaaagctattgattttcctgtaaagaaaacccaagcatggaatgaaaagataaaaaggcttcgacttttactcacggtgaaggaatcggctatggatgtccctacaaacctggatgctaggaggaggatatctttctttgctaattctctttttatgtcgatgccagatgctccaaaagtgcggcaaatgttgcccttctctgtcttgactccttattataaagaagatgttcttttctcttcacaagcactagcagaacagaatgaggacggagtttccatccttttttatttgcaaaaaatctacccagatgaatggaaaaattttcttgaaagggtgcattgtgagagtgaagatcaactccacgagactgagcattctgaagagcagcttcgcctttgggcatcataccggggacaaactttgacaagaactgtaagagggatgatgtactacagacaagctttagtccttcaggcttcccttgatatggccagagatgatgaccttatggagggttttagagcagctgacctgttatctgaatctgatgaatcaccactattgactcaatgcaaagctatagctgatatgaaattcacatatgttgtatcatgccagcaatacggtattcagaaacgttctggtgatccacatgcacaggatattctgagattgatgaccacttatccttcacttagggttgcgtacatcgatgaagtcgaagagcctagcaaagacaaaaataagaaaatagagaaggtttactactccgcattggtgaaggcagcagtaacgaagcctgatgatcctggccagaaacttgatcagggatatatataggataaagcttccaggaaatgcaatgctaggtgaaggaaaaccagagaaccagaaccatgccataattttcacacgaggtgaaggtctccaaaccatcgacatgaatcaggaacattatatggaggagactttgaaaatgaggaatttgttgcaagagtttctgaagaaacatgatggtgtgagatatccatcaatacttggtgtaagagaacacatcttcaccggaagcgtgtcttctcttgcatggttcatgtcaaaccaagaaacaagttttgtgaccattggacaacgtgtacttgccaatcctttgagagttcgatttcattatgggcatcctgatatctttgatcgacttttccacctcacacgtggaggtgtaagcaaagcttctaagattatcaatcttagtgaagacatatttgctggatttaattcaacactgcgtgaaggaaatgttacacatcatgaatacatgcaagttggcaagggcagagatgttggtctcaaccagatctcactatttgaagcaaaaatagcaaatggtaatggtgaacagacgctgagccgtgacgtgtaccgtcttggacatcgttttgactttttcagaatgttgtcctgctactatactactattggtttttacttcagcacaatgataacagtttggaccgtttatgtattcctctacgggcgcctgtatcttgtcctaagtggccttgatgaagcattagccactggaaagaggtttatacacaacgagcctctccaggttgctctagcttcacagtcttttgtgcagcttgggttcttgatggcgctgcctatgatgatggaaattggtctagagagaggattcagaactgcattgagtgactttgtacttatgcagctccagttagcatctgtgttcttcacattctctcttgggaccaaaactcactactacggaaccacactgctacatggaggagctgaatatagagctacagggcgtggatttgtggtgttccatgccaagtttgctgagaattatcgattgtattcgcgaagccattttgtgaagggcattgaactgatgattttgcttattgtgtatgaaatatttgggcagtcataccgaggagctattgcgtacattttcatcacattttccatgtggtttatggttgtcacctggctctttgccccattcctgtttaatccttctgggttcgagtggcagaaaattgtggatgactggactgactggaataagtggatcagtaaccgtggaggtattggggtgccgccagagaaaagttgggagtcatggtgggaaaaagagcaggagcctcttaggcattctggaaagcgtggcactgttcttgaaatagtgctttcgttgcgcttctttatttaccagtatggtcttgtttatcatttgaacatcaccactcacacgaagagcgttctggtttattgcatctcgtgggtcataatctttgtcattttgctcgtgatgaagactgtatcagttggcaggaggaaattcagtgcagagttccagcttgtgttccggctgatcaaggggctgatattcataacgtttatctctattatcataatcttgatagcaatcccacacatgacagttcaggacatctttgtttgcatccttgcgttcatgccaactggatggggtttgcttctgatagcacaaactatgaggtcagctatttcacatatggggctatggggatcggtcaaggcgcttgcccgaggctatgagatcatcatgggcttgctgttgttcaccccgatcgcattcctcgcttggttcccgtttgtttcggagttccagacaaggatgctgttcaaccaggccttcagtagaggtctgcagatttctcgtatcctaggcggacacaagaaagaccgggctgcacggaacaaggagtgagtagccgagcagcgtgagcctggtagtgctgacctacatacaattcaaccatgccccacgtggcattatacttgtactggttattatgccaggttgtatattgcaaggaaaggaattcatctctgctaacgtgccagattgtatgtgtggcagcaggtactcgatcggtgagcactcctatagcttttttattattatttatgggtaaagtcaaagaaactaa

SEQ ID NO: 218969 - DNA, 5225 bp, Zea Mays
agattcgtcactgcggctatactgaaactgggtcaagcatcgccaagaaggaaaaggagcctcattcctaaagatgaagtcattcctccacttccaaatgcaccataccaccagggccagaatttccatgaaaaaattgtggccaaaggcatccttggcgtcttgaattatcgagaagaagtcaagctcatgattccaatggaaacccacataacttcagcagtctgtactgaaaggacagcaaaacaacagatgaaaggcaacaggtgtgtctttgacaattctaggccatgtgttgaggaagtgctaaaagctgttaatgtggaaggggggctgtggtgtttggctggagcttccaaactccaggaacttgtttttgggtcggtgcctactggtgcttttttagccctgtaggttgtggtcgccttcttcattgatgtggcgcgacggttgtatttgagggatggcgtgtgtgtgttggtgtttgtgtttcgggtcactcttgacctttgtacttactttcttccttaaatgaaatgacgcgcagttctcctgcgctgttcgagaaaaaaagataagtcgtctcctcacactgcaggtcacacagagtgcagacaaagtactgtcaggtgccagaaaaccctttcttctgaggatgttctttgagttaattctatctctaaagaccaaccatacaaagatcttgaatttcttaccagccttagactgccaaatccagttaaaggcagcagggggctgaattgattgaaaacaatcttggatatcatcttgagctggaaagcaagaagaaacatgtctcttgttgttaagctacgatacatcttgaagttactatcagctgcttcttgggttgtgattttgcctgtaacttatgcatacacttggaagaatccaactggtcttgcaagagcaattaaaagttggcttggtgatggtcagaatcagccatcattatacattttggcagttgtgatttatttggcaccaaacttgctgtccgctacactatttcttttccctgtaattaggagagctcttgagagatcaaatcttaaagtcgtaacattcataatgtggtggtcgcagcctcgcttatttgttggaagaggaatgcatgagggcgcattctcccttttcaagtatacaatgttctgggtcttgcttttggccactaaattggttgtgagcttctatgtggagatcaaaccacttgtgcagccaacaaaagatataatgaaggagccaatacgaacatttaagtggcatgagtttttcccccatgcaaataacaacattggtgttgtcattgcgctttgggctcctattattcttgtctatttcatggatactcaaatttggtatgcaattttctcaacgctaattggtggtgtctatggggcttgtcgccgtcttggtgagataaggacattggggatgttgagatctcggttcgaatccctgcctaaggctttcaatcaatgcttgattccatctgacacaagcaaaaggagaggattccgggctgctttctccaaaccttctaagacatctgaggataccagagaacaagaaaaaatagccgcaagatttgctcagatttggaatttaattatcacaagcttccgtgaggaagatttgatagacgacagagagaaggacttgttacttgttccatactgcaaagatcgtgatatggatataatccaatggccaccattcctgcttgccagcaagattccaatagcattggatatggccgcagatagtggtggaaaagatcgtgatctaaagaagaggatgaaatcggatccatattttacttatgctatcaaggaatgctatgcttctttcaaaaacatcatatatgaactagtgatcgattcacgagagagaggttacatacaaaagatcttcgatgcggtggatgagcacatagcagaagagactttgataaaggagctgaacatgagtaaccttcctaccctaagcaagaagttcattgagctgcttgacttactggaaagtaacaacaaagaagatcatgatcagatcatcatattgttccaagacatgcttgaagtggttacaagggacataatggttgaccagctcagcgaactactggaattgatacatggtgcaaataataaaagatctgaaggaatgacatcacttgaccaacaagatcagttgttcacgaaagctattgattttcctgtaaagaaaacccaagcatggaatgaaaagataaaaaggcttcgacttttactcacggtgaaggaatcggctatggatgtccctacaaacctggatgctaggaggaggatatctttctttgctaattctctttttatgtcgatgccagatgctccaaaagtgcggcaaatgttgcccttctctgtcttgactccttattataaagaagatgttcttttctcttcacaagcactagcagaacagaatgaggacggagtttccatccttttttatttgcaaaaaatctacccagatgaatggaaaaattttcttgaaagggtgcattgtgagagtgaagatcaactccacgagactgagcattctgaagagcagcttcgcctttgggcatcataccggggacaaactttgacaagaactgtaagagggatgatgtactacagacaagctttagtccttcaggcttcccttgatatggccagagatgatgaccttatggagggttttagagcagctgacctgttatctgaatctgatgaatcaccactattgactcaatgcaaagctatagctgatatgaaattcacatatgttgtatcatgccagcaatacggtattcagaaacgttctggtgatccacatgcacaggatattctgagattgatgaccacttatccttcacttagggttgcgtacatcgatgaagtcgaagagcctagcaaagacaaaaataagaaaatagagaaggtttactactccgcattggtgaaggcagcagtaacgaagcctgatgatcctggccagaaacttgatcagggatatatataggataaagcttccaggaaatgcaatgctaggtgaaggaaaaccagagaaccagaaccatgccataattttcacacgaggtgaaggtctccaaaccatcgacatgaatcaggaacattatatggaggagactttgaaaatgaggaatttgttgcaagagtttctgaagaaacatgatggtgtgagatatccatcaatacttggtgtaagagaacacatcttcaccggaagcgtgtcttctcttgcatggttcatgtcaaaccaagaaacaagttttgtgaccattggacaacgtgtacttgccaatcctttgagagttcgatttcattatgggcatcctgatatctttgatcgacttttccacctcacacgtggaggtgtaagcaaagcttctaagattatcaatcttagtgaagacatatttgctggatttaattcaacactgcgtgaaggaaatgttacacatcatgaatacatgcaagttggcaagggcagagatgttggtctcaaccagatctcactatttgaagcaaaaatagcaaatggtaatggtgaacagacgctgagccgtgacgtgtaccgtcttggacatcgttttgactttttcagaatgttgtcctgctactatactactattggtttttacttcagcacaatgataacagtttggaccgtttatgtattcctctacgggcgcctgtatcttgtcctaagtggccttgatgaagcattagccactggaaagaggtttatacacaacgagcctctccaggttgctctagcttcacagtcttttgtgcagcttgggttcttgatggcgctgcctatgatgatggaaattggtctagagagaggattcagaactgcattgagtgactttgtacttatgcagctccagttagcatctgtgttcttcacattctctcttgggaccaaaactcactactacggaaccacactgctacatggaggagctgaatatagagctacagggcgtggatttgtggtgttccatgccaagtttgctgagaattatcgattgtattcgcgaagccattttgtgaagggcattgaactgatgattttgcttattgtgtatgaaatatttgggcagtcataccgaggagctattgcgtacattttcatcacattttccatgtggtttatggttgtcacctggctctttgccccattcctgtttaatccttctgggttcgagtggcagaaaattgtggatgactggactgactggaataagtggatcagtaaccgtggaggtattggggtgccgccagagaaaagttgggagtcatggtgggaaaaagagcaggagcctcttaggcattctggaaagcgtggcactgttcttgaaatagtgctttcgttgcgcttctttatttaccagtatggtcttgtttatcatttgaacatcaccactcacacgaagagcgttctggtttattgcatctcgtgggtcataatctttgtcattttgctcgtgatgaagactgtatcagttggcaggaggaaattcagtgcagagttccagcttgtgttccggctgatcaaggggctgatattcataacgtttatctctattatcataatcttgatagcaatcccacacatgacagttcaggacatctttgtttgcatccttgcgttcatgccaactggatggggtttgcttctgatagcacaaactatgaggtcagctatttcacatatggggctatggggatcggtcaaggcgcttgcccgaggctatgagatcatcatgggcttgctgttgttcaccccgatcgcattcctcgcttggttcccgtttgtttcggagttccagacaaggatgctgttcaaccaggccttcagtagaggtctgcagatttctcgtatcctaggcggacacaagaaagaccgggctgcacggaacaaggagtgagtagccgagcagcgtgagcctggtagtgctgacctacatacaattcaaccatgccccacgtggcattatacttgtactggttattatgccaggttgtatattgcaaggaaaggaattcatctctgctaacgtgccagattgtatgtgtggcagcaggtactcgatcggtgagcactcctatagcttttttattattatttatgggtaaagtcaaagaaactaa

SEQ ID NO: 218970 - DNA, 4364 bp, Zea Mays
agattcgtcactgcggctatactgaaactgggtcaagcaatcttggatatcatcttgagctggaaagcaagaagaaacatgtctcttgttgttaagctacgatacatcttgaagttactatcagctgcttcttgggttgtgattttgcctgtaacttatgcatacacttggaagaatccaactggtcttgcaagagcaattaaaagttggcttggtgatggtcagaatcagccatcattatacattttggcagttgtgatttatttggcaccaaacttgctgtccgctacactatttcttttccctgtaattaggagagctcttgagagatcaaatcttaaagtcgtaacattcataatgtggtggtcgcagcctcgcttatttgttggaagaggaatgcatgagggcgcattctcccttttcaagtatacaatgttctgggtcttgcttttggccactaaattggttgtgagcttctatgtggagatcaaaccacttgtgcagccaacaaaagatataatgaaggagccaatacgaacatttaagtggcatgagtttttcccccatgcaaataacaacattggtgttgtcattgcgctttgggctcctattattcttgtctatttcatggatactcaaatttggtatgcaattttctcaacgctaattggtggtgtctatggggcttgtcgccgtcttggtgagacatctgaggataccagagaacaagaaaaaatagccgcaagatttgctcagatttggaatttaattatcacaagcttccgtgaggaagatttgatagacgacagagagaaggacttgttacttgttccatactgcaaagatcgtgatatggatataatccaatggccaccattcctgcttgccagcaagattccaatagcattggatatggccgcagatagtggtggaaaagatcgtgatctaaagaagaggatgaaatcggatccatattttacttatgctatcaaggaatgctatgcttctttcaaaaacatcatatatgaactagtgatcgattcacgagagagaggttacatacaaaagatcttcgatgcggtggatgagcacatagcagaagagactttgataaaggagctgaacatgagtaaccttcctaccctaagcaagaagttcattgagctgcttgacttactggaaagtaacaacaaagaagatcatgatcagatcatcatattgttccaagacatgcttgaagtggttacaagggacataatggttgaccagctcagcgaactactggaattgatacatggtgcaaataataaaagatctgaaggaatgacatcacttgaccaacaagatcagttgttcacgaaagctattgattttcctgtaaagaaaacccaagcatggaatgaaaagataaaaaggcttcgacttttactcacggtgaaggaatcggctatggatgtccctacaaacctggatgctaggaggaggatatctttctttgctaattctctttttatgtcgatgccagatgctccaaaagtgcggcaaatgttgcccttctctgtcttgactccttattataaagaagatgttcttttctcttcacaagcactagcagaacagaatgaggacggagtttccatccttttttatttgcaaaaaatctacccagatgaatggaaaaattttcttgaaagggtgcattgtgagagtgaagatcaactccacgagactgagcattctgaagagcagcttcgcctttgggcatcataccggggacaaactttgacaagaactgtaagagggatgatgtactacagacaagctttagtccttcaggcttcccttgatatggccagagatgatgaccttatggagggttttagagcagctgacctgttatctgaatctgatgaatcaccactattgactcaatgcaaagctatagctgatatgaaattcacatatgttgtatcatgccagcaatacggtattcagaaacgttctggtgatccacatgcacaggatattctgagattgatgaccacttatccttcacttagggttgcgtacatcgatgaagtcgaagagcctagcaaagacaaaaataagaaaatagagaaggtttactactccgcattggtgaaggcagcagtaacgaagcctgatgatcctggccagaaacttgatcagggatatatataggataaagcttccaggaaatgcaatgctaggtgaaggaaaaccagagaaccagaaccatgccataattttcacacgaggtgaaggtctccaaaccatcgacatgaatcaggaacattatatggaggagactttgaaaatgaggaatttgttgcaagagtttctgaagaaacatgatggtgtgagatatccatcaatacttggtgtaagagaacacatcttcaccggaagcgtgtcttctcttgcatggttcatgtcaaaccaagaaacaagttttgtgaccattggacaacgtgtacttgccaatcctttgagagttcgatttcattatgggcatcctgatatctttgatcgacttttccacctcacacgtggaggtgtaagcaaagcttctaagattatcaatcttagtgaagacatatttgctggatttaattcaacactgcgtgaaggaaatgttacacatcatgaatacatgcaagttggcaagggcagagatgttggtctcaaccagatctcactatttgaagcaaaaatagcaaatggtaatggtgaacagacgctgagccgtgacgtgtaccgtcttggacatcgttttgactttttcagaatgttgtcctgctactatactactattggtttttacttcagcacaatgataacagtttggaccgtttatgtattcctctacgggcgcctgtatcttgtcctaagtggccttgatgaagcattagccactggaaagaggtttatacacaacgagcctctccaggttgctctagcttcacagtcttttgtgcagcttgggttcttgatggcgctgcctatgatgatggaaattggtctagagagaggattcagaactgcattgagtgactttgtacttatgcagctccagttagcatctgtgttcttcacattctctcttgggaccaaaactcactactacggaaccacactgctacatggaggagctgaatatagagctacagggcgtggatttgtggtgttccatgccaagtttgctgagaattatcgattgtattcgcgaagccattttgtgaagggcattgaactgatgattttgcttattgtgtatgaaatatttgggcagtcataccgaggagctattgcgtacattttcatcacattttccatgtggtttatggttgtcacctggctctttgccccattcctgtttaatccttctgggttcgagtggcagaaaattgtggatgactggactgactggaataagtggatcagtaaccgtggaggtattggggtgccgccagagaaaagttgggagtcatggtgggaaaaagagcaggagcctcttaggcattctggaaagcgtggcactgttcttgaaatagtgctttcgttgcgcttctttatttaccagtatggtcttgtttatcatttgaacatcaccactcacacgaagagcgttctggtttattgcatctcgtgggtcataatctttgtcattttgctcgtgatgaagactgtatcagttggcaggaggaaattcagtgcagagttccagcttgtgttccggctgatcaaggggctgatattcataacgtttatctctattatcataatcttgatagcaatcccacacatgacagttcaggacatctttgtttgcatccttgcgttcatgccaactggatggggtttgcttctgatagcacaaactatgaggtcagctatttcacatatggggctatggggatcggtcaaggcgcttgcccgaggctatgagatcatcatgggcttgctgttgttcaccccgatcgcattcctcgcttggttcccgtttgtttcggagttccagacaaggatgctgttcaaccaggccttcagtagaggtctgcagatttctcgtatcctaggcggacacaagaaagaccgggctgcacggaacaaggagtgagtagccgagcagcgtgagcctggtagtgctgacctacatacaattcaaccatgccccacgtggcattatacttgtactggttattatgccaggttgtatattgcaaggaaaggaattcatctctgctaacgtgccagattgtatgtgtggcagcaggtactcgatcggtgagcactcctatagcttttttattattatttatgggtaaagtcaaagaaactaa

SEQ ID NO: 218971 - DNA, 4520 bp, Zea Mays
agattcgtcactgcggctatactgaaactgggtcaagcaatcttggatatcatcttgagctggaaagcaagaagaaacatgtctcttgttgttaagctacgatacatcttgaagttactatcagctgcttcttgggttgtgattttgcctgtaacttatgcatacacttggaagaatccaactggtcttgcaagagcaattaaaagttggcttggtgatggtcagaatcagccatcattatacattttggcagttgtgatttatttggcaccaaacttgctgtccgctacactatttcttttccctgtaattaggagagctcttgagagatcaaatcttaaagtcgtaacattcataatgtggtggtcgcaggtagtattgattaatctaaaacttatacagcctcgcttatttgttggaagaggaatgcatgagggcgcattctcccttttcaagtatacaatgttctgggtcttgcttttggccactaaattggttgtgagcttctatgtggagatcaaaccacttgtgcagccaacaaaagatataatgaaggagccaatacgaacatttaagtggcatgagtttttcccccatgcaaataacaacattggtgttgtcattgcgctttgggctcctattattcttgtctatttcatggatactcaaatttggtatgcaattttctcaacgctaattggtggtgtctatggggcttgtcgccgtcttggtgagataaggacattggggatgttgagatctcggttcgaatccctgcctaaggctttcaatcaatgcttgattccatctgacacaagcaaaaggagaggattccgggctgctttctccaaaccttctaagacatctgaggataccagagaacaagaaaaaatagccgcaagatttgctcagatttggaatttaattatcacaagcttccgtgaggaagatttgatagacgacagagagaaggacttgttacttgttccatactgcaaagatcgtgatatggatataatccaatggccaccattcctgcttgccagcaagattccaatagcattggatatggccgcagatagtggtggaaaagatcgtgatctaaagaagaggatgaaatcggatccatattttacttatgctatcaaggaatgctatgcttctttcaaaaacatcatatatgaactagtgatcgattcacgagagagaggttacatacaaaagatcttcgatgcggtggatgagcacatagcagaagagactttgataaaggagctgaacatgagtaaccttcctaccctaagcaagaagttcattgagctgcttgacttactggaaagtaacaacaaagaagatcatgatcagatcatcatattgttccaagacatgcttgaagtggttacaagggacataatggttgaccagctcagcgaactactggaattgatacatggtgcaaataataaaagatctgaaggaatgacatcacttgaccaacaagatcagttgttcacgaaagctattgattttcctgtaaagaaaacccaagcatggaatgaaaagataaaaaggcttcgacttttactcacggtgaaggaatcggctatggatgtccctacaaacctggatgctaggaggaggatatctttctttgctaattctctttttatgtcgatgccagatgctccaaaagtgcggcaaatgttgcccttctctgtcttgactccttattataaagaagatgttcttttctcttcacaagcactagcagaacagaatgaggacggagtttccatccttttttatttgcaaaaaatctacccagatgaatggaaaaattttcttgaaagggtgcattgtgagagtgaagatcaactccacgagactgagcattctgaagagcagcttcgcctttgggcatcataccggggacaaactttgacaagaactgtaagagggatgatgtactacagacaagctttagtccttcaggcttcccttgatatggccagagatgatgaccttatggagggttttagagcagctgacctgttatctgaatctgatgaatcaccactattgactcaatgcaaagctatagctgatatgaaattcacatatgttgtatcatgccagcaatacggtattcagaaacgttctggtgatccacatgcacaggatattctgagattgatgaccacttatccttcacttagggttgcgtacatcgatgaagtcgaagagcctagcaaagacaaaaataagaaaatagagaaggtttactactccgcattggtgaaggcagcagtaacgaagcctgatgatcctggccagaaacttgatcagggatatatataggataaagcttccaggaaatgcaatgctaggtgaaggaaaaccagagaaccagaaccatgccataattttcacacgaggtgaaggtctccaaaccatcgacatgaatcaggaacattatatggaggagactttgaaaatgaggaatttgttgcaagagtttctgaagaaacatgatggtgtgagatatccatcaatacttggtgtaagagaacacatcttcaccggaagcgtgtcttctcttgcatggttcatgtcaaaccaagaaacaagttttgtgaccattggacaacgtgtacttgccaatcctttgagagttcgatttcattatgggcatcctgatatctttgatcgacttttccacctcacacgtggaggtgtaagcaaagcttctaagattatcaatcttagtgaagacatatttgctggatttaattcaacactgcgtgaaggaaatgttacacatcatgaatacatgcaagttggcaagggcagagatgttggtctcaaccagatctcactatttgaagcaaaaatagcaaatggtaatggtgaacagacgctgagccgtgacgtgtaccgtcttggacatcgttttgactttttcagaatgttgtcctgctactatactactattggtttttacttcagcacaatgataacagtttggaccgtttatgtattcctctacgggcgcctgtatcttgtcctaagtggccttgatgaagcattagccactggaaagaggtttatacacaacgagcctctccaggttgctctagcttcacagtcttttgtgcagcttgggttcttgatggcgctgcctatgatgatggaaattggtctagagagaggattcagaactgcattgagtgactttgtacttatgcagctccagttagcatctgtgttcttcacattctctcttgggaccaaaactcactactacggaaccacactgctacatggaggagctgaatatagagctacagggcgtggatttgtggtgttccatgccaagtttgctgagaattatcgattgtattcgcgaagccattttgtgaagggcattgaactgatgattttgcttattgtgtatgaaatatttgggcagtcataccgaggagctattgcgtacattttcatcacattttccatgtggtttatggttgtcacctggctctttgccccattcctgtttaatccttctgggttcgagtggcagaaaattgtggatgactggactgactggaataagtggatcagtaaccgtggaggtattggggtgccgccagagaaaagttgggagtcatggtgggaaaaagagcaggagcctcttaggcattctggaaagcgtggcactgttcttgaaatagtgctttcgttgcgcttctttatttaccagtatggtcttgtttatcatttgaacatcaccactcacacgaagagcgttctggtttattgcatctcgtgggtcataatctttgtcattttgctcgtgatgaagactgtatcagttggcaggaggaaattcagtgcagagttccagcttgtgttccggctgatcaaggggctgatattcataacgtttatctctattatcataatcttgatagcaatcccacacatgacagttcaggacatctttgtttgcatccttgcgttcatgccaactggatggggtttgcttctgatagcacaaactatgaggtcagctatttcacatatggggctatggggatcggtcaaggcgcttgcccgaggctatgagatcatcatgggcttgctgttgttcaccccgatcgcattcctcgcttggttcccgtttgtttcggagttccagacaaggatgctgttcaaccaggccttcagtagaggtctgcagatttctcgtatcctaggcggacacaagaaagaccgggctgcacggaacaaggagtgagtagccgagcagcgtgagcctggtagtgctgacctacatacaattcaaccatgccccacgtggcattatacttgtactggttattatgccaggttgtatattgcaaggaaaggaattcatctctgctaacgtgccagattgtatgtgtggcagcaggtactcgatcggtgagcactcctatagcttttttattattatttatgggtaaagtcaaagaaactaa

SEQ ID NO: 218972 - DNA, 5330 bp, Zea Mays
agattcgtcactgcggctatactgaaactgggtcaagcaatcttggatatcatcttgagctggaaagcaagaagaaacatgtctcttgttgttaagctacgatacatcttgaagttactatcagctgcttcttgggttgtgattttgcctgtaacttatgcatacacttggaagaatccaactggtcttgcaagagcaattaaaagttggcttggtgatggtcagaatcagccatcattatacattttggcagttgtgatttatttggcaccaaacttgctgtccgctacactatttcttttccctgtaattaggagagctcttgagagatcaaatcttaaagtcgtaacattcataatgtggtggtcgcagcctcgcttatttgttggaagaggaatgcatgagggcgcattctcccttttcaagtatacaatgttctgggtcttgcttttggccactaaattggttgtgagcttctatgtggagatcaaaccacttgtgcagccaacaaaagatataatgaaggagccaatacgaacatttaagtggcatgagtttttcccccatgcaaataacaacattggtgttgtcattgcgctttgggctcctattattcttgtctatttcatggatactcaaatttggtatgcaattttctcaacgctaattggtggtgtctatggggcttgtcgccgtcttggtgagataaggacattggggatgttgagatctcggttcgaatccctgcctaaggctttcaatcaatgcttgattccatctgacacaagcaaaaggagaggattccgggctgctttctccaaaccttctaagacatctgaggataccagagaacaagaaaaaatagccgcaagatttgctcagatttggaatttaattatcacaagcttccgtgaggaagatttgatagacgacagagagaaggacttgttacttgttccatactgcaaagatcgtgatatggatataatccaatggccaccattcctgcttgccagcaagattccaatagcattggatatggccgcagatagtggtggaaaagatcgtgatctaaagaagaggatgaaatcggatccatattttacttatgctatcaaggaatgctatgcttctttcaaaaacatcatatatgaactagtgatcgattcacgagagagaggttacatacaaaagatcttcgatgcggtggatgagcacatagcagaagagactttgataaaggagctgaacatgagtaaccttcctaccctaagcaagaagttcattgagctgcttgacttactggaaagtaacaacaaagaagatcatgatcagatcatcatattgttccaagacatgcttgaagtggttacaagggacataatggttgaccagctcagcgaactactggaattgatacatggtgcaaataataaaagatctgaaggaatgacatcacttgaccaacaagatcagttgttcacgaaagctattgattttcctgtaaagaaaacccaagcatggaatgaaaagataaaaaggcttcgacttttactcacggtgaaggaatcggctatggatgtccctacaaacctggatgctaggaggaggatatctttctttgctaattctctttttatgtcgatgccagatgctccaaaagtgcggcaaatgttgcccttctctgtcttgactccttattataaagaagatgttcttttctcttcacaagcactagcagaacagaatgaggacggagtttccatccttttttatttgcaaaaaatctacccagatgaatggaaaaattttcttgaaagggtgcattgtgagagtgaagatcaactccacgagactgagcattctgaagagcagcttcgcctttgggcatcataccggggacaaactttgacaagaactgtaagagggatgatgtactacagacaagctttagtccttcaggcttcccttgatatggccagagatgatgaccttatggagggttttagagcagctgacctgttatctgaatctgatgaatcaccactattgactcaatgcaaagctatagctgatatgaaattcacatatgttgtatcatgccagcaatacggtattcagaaacgttctggtgatccacatgcacaggatattctgagattgatgaccacttatccttcacttagggttgcgtacatcgatgaagtcgaagagcctagcaaagacaaaaataagaaaatagagaaggtttactactccgcattggtgaaggcagcagtaacgaagcctgatgatcctggccagaaacttgatcagggatatatataggataaagcttccaggaaatgcaatgctaggtgaaggaaaaccagagaaccagaaccatgccataattttcacacgaggtgaaggtctccaaaccatcgacatgaatcaggaacattatatggaggagactttgaaaatgaggaatttgttgcaagagtttctgaagaaacatgatggtgtgagatatccatcaatacttggtgtaagagaacacatcttcaccggaagcgtgtcttctcttgcatggttcatgtcaaaccaagaaacaagttttgtgaccattggacaacgtgtacttgccaatcctttgagagttcgatttcattatgggcatcctgatatctttgatcgacttttccacctcacacgtggaggtgtaagcaaagcttctaagattatcaatcttagtgaagacatatttgctggatttaattcaacactgcgtgaaggaaatgttacacatcatgaatacatgcaagttggcaagggcagagatgttggtctcaaccagatctcactatttgaagcaaaaatagcaaatggtaatggtgaacagacgctgagccgtgacgtgtaccgtcttggacatcgttttgactttttcagaatgttgtcctgctactatactactattggtttttacttcagcacaatgataacagtttggaccgtttatgtattcctctacgggcgcctgtatcttgtcctaagtggccttgatgaagcattagccactggaaagaggtttatacacaacgagcctctccaggttgctctagcttcacagtcttttgtgcagcttgggttcttgatggcgctgcctatgatgatggaaattggtctagagagaggattcagaactgcattgagtgactttgtacttatgcagctccagttagcatctgtgttcttcacattctctcttgggaccaaaactcactactacggaaccacactgctacatggaggagctgaatatagagctacagggcgtggatttgtggtgttccatgccaagtttgctgagaattatcgattgtattcgcgaagccattttgtgaagggcattgaactgatgattttgcttattgtgtatgaaatatttgggcagtcataccgaggagctattgcgtacattttcatcacattttccatgtggtttatggttgtcacctggctctttgccccattcctgtttaatccttctgggttcgagtggcagaaaattgtggatgactggactgactggaataagtggatcagtaaccgtggaggtattggggtgccgccagagaaaagttgggagtcatggtgggaaaaagagcaggagcctcttaggcattctggaaagcgtggcactgttcttgaaatagtgctttcgttgcgcttctttatttaccagtatggtcttgtttatcatttgaacatcaccactcacacgaagagcgttctggtttattgcatctcgtgggtcataatctttgtcattttgctcgtgatgaagactgtatcagttggcaggaggaaattcagtgcagagttccagcttgtgttccggctgatcaaggggctgatattcataacgtttatctctattatcataatcttgatagcaatcccacacatgacagttcaggacatctttgtttgcatccttgcgttcatgccaactggatggggtttgcttctgatagcacaaactatgaggtcagctatttcacatatggggctatggggatcggtcaaggcgcttgcccgaggctatgagatcatcatgggcttgctgttgttcaccccgatcgcattcctcgcttggttcccgtttgtttcggagttccagacaaggatgctgttcaaccaggccttcagtagaggtctgcagatttctcgtatcctaggcggacacaagaaagaccgggctgcacggaacaaggagtgagtagccgagcagcgtgagcctggtagtgctgacctacatacaattcaaccatgccccacgtggcattatacttgtactggttattatgccaggttgtatattgcaaggaaaggaattcatctctgctaacgtgccagattgtatgtgtggcagcaggtactcgatcggaggcactcgcgttggcgtcgctaatcgatgacgagaagaagcttggcgactgtcagttcgacctctagaagcagtcctacgtggtcgcatgcgtcgctgtgtacgacaagctcccacgaagccactgtttggacgcggtccagagcagctgcaccgcgctgtccatcgttaagaggggggcctcatggttgtctccaatgtcgacgactgttgggttgttctggacatcgcatccgacgacgacgccatcacgcgatccagctcatcgtccacctaaagcccaacctgctacgtaagtcgctactgaccggacatgaattcttgtgcattgggacgatgctgacgttgtgtgagtgtcctcgaacatgatgtatgtagtggagtagcgcatccggtgatgcaacggccaagtgtactacctcactgatgagcccggggtgcacttcgtttggcagcccaaccaagagtcatcggtactcgtcatgtcgtgcgcgtttgacgactactatatcgagaattgtggcgtcatcttggcgctggaggtgacgcagaggaggatcgacaacagtgaccagttcgtcatcctcgccaccgtcagggtagcttttgtgtcggtctgactttaattttcttcgcaaacacacacacttacttttttgtttaagcaagagcgtatggtggtgcgtgtctgatgactaacgatgtacgagagaatttcttccggcatgtgtggaacgtgctctccaatgataagaccatacaaatcgtggcatatatcgaagtctgcatgatactgatggttgcaatgtattggtgaaacaactagattaaaataacaaaatttatgtatggctaggatcacaaattgattatgaaacatttttctcataacaat

SEQ ID NO: 218973 - DNA, 2166 bp, Zea Mays
gatatcatcttgagctggaaagcaagaagaaacatgtctcttgttgttaagctacgatacatcttgaagttactatcagctgcttcttgggttgtgattttgcctgtaacttatgcatacacttggaagaatccaactggtcttgcaagagcaattaaaagttggcttggtgatggtcagaatcagccatcattatacattttggcagttgtgatttatttggcaccaaacttgctgtccgctacactatttcttttccctgtaattaggagagctcttgagagatcaaatcttaaagtcgtaacattcataatgtggtggtcgcagcctcgcttatttgttggaagaggaatgcatgagggcgcattctcccttttcaagtatacaatgttctgggtcttgcttttggccactaaattggttgtgagcttctatgtggagatcaaaccacttgtgcagccaacaaaagatataatgaaggagccaatacgaacatttaagtggcatgagtttttcccccatgcaaataacaacattggtgttgtcattgcgctttgggctcctattattcttgtctatttcatggatactcaaatttggtatgcaattttctcaacgctaattggtggtgtctatggggcttgtcgccgtcttggtgagacatctgaggataccagagaacaagaaaaaatagccgcaagatttgctcagatttggaatttaattatcacaagcttccgtgaggaagatttgatagacgacagagagaaggacttgttacttgttccatactgcaaagatcgtgatatggatataatccaatggccaccattcctgcttgccagcaagattccaatagcattggatatggccgcagatagtggtggaaaagatcgtgatctaaagaagaggatgaaatcggatccatattttacttatgctatcaaggaatgctatgcttctttcaaaaacatcatatatgaactagtgatcgattcacgagagagaggttacatacaaaagatcttcgatgcggtggatgagcacatagcagaagagactttgataaaggagctgaacatgagtaaccttcctaccctaagcaagaagttcattgagctgcttgacttactggaaagtaacaacaaagaagatcatgatcagatcatcatattgttccaagacatgcttgaagtggttacaagggacataatggttgaccagctcagcgaactactggaattgatacatggtgcaaataataaaagatctgaaggaatgacatcacttgaccaacaagatcagttgttcacgaaagctattgattttcctgtaaagaaaacccaagcatggaatgaaaagataaaaaggcttcgacttttactcacggtgaaggaatcggctatggatgtccctacaaacctggatgctaggaggaggatatctttctttgctaattctctttttatgtcgatgccagatgctccaaaagtgcggcaaatgttgcccttctctgtcttgactccttattataaagaagatgttcttttctcttcacaagcactagcagaacagaatgaggacggagtttccatccttttttatttgcaaaaaatctacccagatgaatggaaaaattttcttgaaagggtgcattgtgagagtgaagatcaactccacgagactgagcattctgaagagcagcttcgcctttgggcatcataccggggacaaactttgacaagaactgtaagagggatgatgtactacagacaagctttagtccttcaggcttcccttgatatggccagagatgatgaccttatggagggttttagagcagctgacctgttatctgaatctgatgaatcaccactattgactcaatgcaaagctatagctgatatgaaattcacatatgttgtatcatgccagcaatacggtattcagaaacgttctggtgatccacatgcacaggatattctgagattgatgaccacttatccttcacttagggttgcgtacatcgatgaagtcgaagagcctagcaaagacaaaaataagaaaatagagaaggtttactactccgcattggtgaaggcagcagtaacgaagcctgatgatcctggccagaaacttgatcagaaggttaagagctttgtgctc

SEQ ID NO: 218974 - DNA, 4392 bp, Zea Mays
atgtctcttgttgttaagctacgatacatcttgaagttactatcagctgcttcttgggttgtgattttgcctgtaacttatgcatacacttggaagaatccaactggtcttgcaagagcaattaaaagttggcttggtgatggtcagaatcagccatcattatacattttggcagttgtgatttatttggcaccaaacttgctgtccgctacactatttcttttccctgtaattaggagagctcttgagagatcaaatcttaaagtcgtaacattcataatgtggtggtcgcaggtagtattgattaatctaaaacttatacagcctcgcttatttgttggaagaggaatgcatgagggcgcattctcccttttcaagtatacaatgttctgggtcttgcttttggccactaaattggttgtgagcttctatgtggagatcaaaccacttgtgcagccaacaaaagatataatgaaggagccaatacgaacatttaagtggcatgagtttttcccccatgcaaataacaacattggtgttgtcattgcgctttgggctcctattattcttgtctatttcatggatactcaaatttggtatgcaattttctcaacgctaattggtggtgtctatggggcttgtcgccgtcttggtgagataaggacattggggatgttgagatctcggttcgaatccctgcctaaggctttcaatcaatgcttgattccatctgacacaagcaaaaggagaggattccgggctgctttctccaaaccttctaagacatctgaggataccagagaacaagaaaaaatagccgcaagatttgctcagatttggaatttaattatcacaagcttccgtgaggaagatttgatagacgacagagagaaggacttgttacttgttccatactgcaaagatcgtgatatggatataatccaatggccaccattcctgcttgccagcaagattccaatagcattggatatggccgcagatagtggtggaaaagatcgtgatctaaagaagaggatgaaatcggatccatattttacttatgctatcaaggaatgctatgcttctttcaaaaacatcatatatgaactagtgatcgattcacgagagagaggttacatacaaaagatcttcgatgcggtggatgagcacatagcagaagagactttgataaaggagctgaacatgagaaagtaacaacaaagaagatcatgatcagatcatcatattgttccaagacatgcttgaagtggttacaagggacataatggttgaccagctcagcgaactactggaattgatacatggtgcaaataataaaagatctgaaggaatgacatcacttgaccaacaagatcagttgttcacgaaagctattgattttcctgtaaagaaaacccaagcatggaatgaaaagataaaaaggcttcgacttttactcacggtgaaggaatcggctatggatgtccctacaaacctggatgctaggaggaggatatctttctttgctaattctctttttatgtcgatgccagatgctccaaaagtgcggcaaatgttgcccttctctgtcttgactccttattataaagaagatgttcttttctcttcacaagcactagcagaacagaatgaggacggagtttccatccttttttatttgcaaaaaatctacccagatgaatggaaaaattttcttgaaagggtgcattgtgagagtgaagatcaactccacgagactgagcattctgaagagcagcttcgcctttgggcatcataccggggacaaactttgacaagaactgtaagagggatgatgtactacagacaagctttagtccttcaggcttcccttgatatggccagagatgatgaccttatggagggttttagagcagctgacctgttatctgaatctgatgaatcaccactattgactcaatgcaaagctatagctgatatgaaattcacatatgttgtatcatgccagcaatacggtattcagaaacgttctggtgatccacatgcacaggatattctgagattgatgaccacttatccttcacttagggttgcgtacatcgatgaagtcgaagagcctagcaaagacaaaaataagaaaatagagaaggtttactactccgcattggtgaaggcagcagtaacgaagcctgatgatcctggccagaaacttgatcagggatatatataggataaagcttccaggaaatgcaatgctaggtgaaggaaaaccagagaaccagaaccatgccataattttcacacgaggtgaaggtctccaaaccatcgacatgaatcaggaacattatatggaggagactttgaaaatgaggaatttgttgcaagagtttctgaagaaacatgatggtgtgagatatccatcaatacttggtgtaagagaacacatcttcaccggaagcgtgtcttctcttgcatggttcatgtcaaaccaagaaacaagttttgtgaccattggacaacgtgtacttgccaatcctttgagagttcgatttcattatgggcatcctgatatctttgatcgacttttccacctcacacgtggaggtgtaagcaaagcttctaagattatcaatcttagtgaagacatatttgctggatttaattcaacactgcgtgaaggaaatgttacacatcatgaatacatgcaagttggcaagggcagagatgttggtctcaaccagatctcactatttgaagcaaaaatagcaaatggtaatggtgaacagacgctgagccgtgacgtgtaccgtcttggacatcgttttgactttttcagaatgttgtcctgctactatactactattggtttttacttcagcacaatgataacagtttggaccgtttatgtattcctctacgggcgcctgtatcttgtcctaagtggccttgatgaagcattagccactggaaagaggtttatacacaacgagcctctccaggttgctctagcttcacagtcttttgtgcagcttgggttcttgatggcgctgcctatgatgatggaaattggtctagagagaggattcagaactgcattgagtgactttgtacttatgcagctccagttagcatctgtgttcttcacattctctcttgggaccaaaactcactactacggaaccacactgctacatggaggagctgaatatagagctacagggcgtggatttgtggtgttccatgccaagtttgctgagaattatcgattgtattcgcgaagccattttgtgaagggcattgaactgatgattttgcttattgtgtatgaaatatttgggcagtcataccgaggagctattgcgtacattttcatcacattttccatgtggtttatggttgtcacctggctctttgccccattcctgtttaatccttctgggttcgagtggcagaaaattgtggatgactggactgactggaataagtggatcagtaaccgtggaggtattggggtgccgccagagaaaagttgggagtcatggtgggaaaaagagcaggagcctcttaggcattctggaaagcgtggcactgttcttgaaatagtgctttcgttgcgcttctttatttaccagtatggtcttgtttatcatttgaacatcaccactcacacgaagagcgttctggtttattgcatctcgtgggtcataatctttgtcattttgctcgtgatgaagactgtatcagttggcaggaggaaattcagtgcagagttccagcttgtgttccggctgatcaaggggctgatattcataacgtttatctctattatcataatcttgatagcaatcccacacatgacagttcaggacatctttgtttgcatccttgcgttcatgccaactggatggggtttgcttctgatagcacaaactatgaggtcagctatttcacatatggggctatggggatcggtcaaggcgcttgcccgaggctatgagatcatcatgggcttgctgttgttcaccccgatcgcattcctcgcttggttcccgtttgtttcggagttccagacaaggatgctgttcaaccaggccttcagtagaggtctgcagatttctcgtatcctaggcggacacaagaaagaccgggctgcacggaacaaggagtgagtagccgagcagcgtgagcctggtagtgctgacctacatacaattcaaccatgccccacgtggcattatacttgtactggttattatgccaggttgtatattgcaaggaaaggaattcatctctgctaacgtgccagattgtatgtgtggcagcaggtactcgatcggtgagcactcctatagcttttttattattatttatgggtaaagtcaaagaaactaa

SEQ ID NO: 218975 - DNA, 5986 bp, Zea Mays
ataaccgaacaagcccttaggggcgcgcggaaattaccggagttactaaggccttgggagttcggtcccgggagctcctccccatcgaaaataagcggaagcgcgtcccgcagcttctccgtgctagctgtaacggacgcgcgctgcctgtctgtgcatgggcgccgccctccccgctggatctgcagccacccccactccccgtcgcgccgattccatgagaggttgacaactgggcactgacgaagtggatactctgctctgctctgctctgctcgacgagttttaacatctgagtatggctgcggcgttggcgtggcggttcaatggcaccaatggtggcgcccatggcagcgcagatctggaaagacacacggacaaagttcaagactcagagccacaaactcctatgtcaatcgtgaaaatgggcaagaaccgagttaatgtggaggacgaggagacactttcaagcgttgctcaatgtattgagcaactacgacagagttcttcatcctcacaggagaaagagagctctttgaagcagttattagatcttgttcaaactcgtgatactgcattcggagctgttgggtcacattcacaggctgttccgatacttgtatctctccttaggtctggaccatctggagttaagatgctggctgccactgttcttgggtctctttgcaaggaagaggagttaagggtgaaagtcttacttggtggttgcatacctccattgcttgctcttctcagatcgaagtcagctgaaagccaaactgcagctgccaaaaccatatatgcagtttcacagggtgggataagggatcatgttggatcaaagattttctctacggaaaatgttgttcctgtactgtgggagcaacttaaaattagtctcaagaatgagagtttggtggatggccttctaactggagcactgaagaatttatcaaagaatacagaggggttttggtcagcaactgtgcaatgtggtggagttgatatacttataaagctggttagttctggacaaacaaatactcttgcaaacacttgctatcttcttgggtctttgatgatggaagactcttctgtttgttctaaagttttatctggagaaacaacaaagcagctcttaaagttacttggtcctggcaatgagacttctattagagctgaggctgctggggctctcaagttcctttctgcacagagtaaagaggccagacgtcagatagctaattctaacggtattccttctcttataaatgctactattgctccatcaaaagagttcatgcaaggtgaatctgctcaagcattgcaagagaatgcaatgtgtgcattagcaaatatatctggtggtctttcctacgtaatctcaagccttggtgagagtctcgagtcatgttcttcacctgcacagattgcagatactcttggtgcattggcctcagccttgatgatatatgacacaaatgcggaatctatcagtgcttctaatcctgttgacattgagaagacacttttgaagcagtttaagcctaaggttccttttcttgtgcaggagcgcataattgaagctttggctagcttgtatggtaacccggttctctgcaagacactagcagattctgatgcaaaacgcttacttgttggtttaataaccatggcagctactgaggtacaagatgacctcacgaaatcactttttgctctctgcaagaaggattgtgatctatggcaagctctgcaaggccgtgaaggtgtccagctattgatttctttacttggtctttcatcagaacagcagcaggagtgtgctgttgctctacttgcgcttctttcaaaggagaatgatgagagcaaatgggctatcactgctgctggtggcatacctccacttgtgcaaattttggaaactggatcttccaaagctaaagaagattcagcaaccatccttggcaatttatgcaatcacagtgaagacataagagcatgtgttcaaagtgctgatgctgttcctgctttactatggcttctgaaaaatggaagtgataatggcaaggagatagcttctaaaacactgaatcatctcatccacaaatcagatactggaactatcagtcagttatctgctcttttaactagtgatcagcctgagtcaaaagtttatgttctggatgctttgaaaagcttgctttctgttgcaccacttaatgatattctacatgagggaagtgcagcgaatgatgcggttgagacaatgattaaaattctaagctcacccaaggaagagactcaggctacatcagcaactgctcttgctggtctatttcattgccgcaaggacctgcgagaaactcatattgcagtgaagacactttggtcagtcatgaagctgcttgatatgcagtctaacaaaatactaacgggggcctcatgttgccttgctgccgtttttctttcgatcaaggaaaataaagaggttgctgcaattggccgggatgccttaaacccacttgtctcacttgcaaattcttcagttatagaagtggcagaacaagcgactagagctttggcaaatcttttccttgatcaggaattgtccctccaggtgccttttgaagaaattctcttccgtgtaacacgtgtactaagagagggaactattgatggaagaactcatgcagccgcagcaatagctcgtcttttacagtgccgaactattaatcagccactttcagatactgttaaccgctctgggtctgtccttgctctagctgggctcttggaagctgcaaatggtgaagctgctgcaacatcagaagttcttgatgcactggtgctgttgtcgcgatcaaaggcgtcaagtgggcacaccaaggctccctgggcaattcttgcagaaaacccccacacaatacttccccttgtttcatgtattgctgatgctgctgcctccttacaagataaagctatagaagttgtgtcaaggctctgttccgacctacatgatgttgtcggtggtctggtttctgaaactccaggttgcatgtcatccatcacacggcgcatcattggctccaacattcttaaagttaaagttggtggttgtgctcttctcgtctgtgctgcaaaagagtattgtcagaagcaaatagaggttctgaatgatgcaagtctgtatattcaactaattcattctttaattggtatgatccatatggcaaacacgcaagctgaaaatgtcagcagtgaaagcatatcagatattagaatttccagacactccaaagaaaacaacagtgatggtgaaactctgtgctgtactgctgtcatctcaggcaacatgattccactatggctacttgctatcttttctcgtcatgacagcaaaacaagagcagaactcctggaaatgggagcagttgaaatgctcatcgagaagatttcacaaaatgcattccaatatgtgaggtctttaataggtgataagatgatggtgtttgttgggttgggtcatggtttgatggtgaagaagataacacctcatgggtcagatgagccagcatacaggtactttgcggcacaagctttgtcaagtctggtctgcaatggtagcagaggaactcttctggctgttgcgaattctggggcagccattggacttatatctttgcttggatgtgctgatgttgatatagctgatcttttggaattatcagaggaattcatgttggtgcctaaccctgatcaaattgcattagagaggctattcagagttgatgatatcagggttggtgcaacttctagaaaatctattcctcttcttgttgatctacttaaacccattcctgaaagacctggtgctcctttcttggccttgggtcttctgacccagttagccgttgattgccccccaaacatgctgctaatggctgaagctggaatcctagaagcacttaccaaatacttatctcttagtccacaagatgcaacagaagaagctacaactgaattgctgggcattcttttcagtagtccagaaataaggcaccatgaatcagcacttggtgttgttaaccaacttgtggcagtccttcgtctaggaggaaggaattcacgttatagtgccgcgaaggcattagagagtttattttgtgctgaccatgtgaggaacagtgagtcaactaggcaggctatccaaccgcttgtggagattctgagtactggcatggagagggagcagcatgcagctatatcagcccttgttaggcttctttctgacaatccttcaagagcacttgcggttgcggatgttgagatgaatgctgtggatgttatgtgccggattctttcttctgattgttcagtggagttgaaaggaaatgctgcggaactatgctgtgttctatttaccaacacaaggatccgttccacaatggcagcagctcgttgtgtggaacccctggttggtttactggttagtgaagctaaccctgcccagctttctgtggttcgtgcattggataggcttctagatgatgagcaactagcagaattagtggcagcaaatggagctgtcattcctcttgtggggcttttgtatggcaaaaactacatgcttcatgaggcagttgctagagctttggtgaaacttggaaaggacagaccagcttgcaaattggaaatggtcaaggctggtgtaattgagagcattcttgatattctccatgacgctccagattttctttgcattgcattggcagaaatgcttcggattttgacaaacaatgctaccatagcaaaaggtccatcctcagccaaagtagtacaacctcttttctctttgctttccaaggcggacatgggtcctgaagggcagtatagcacattgcaggttcttgtgaatattttggagcatcctgaatgccgtgctgattataacttgacacctcgccaaactattgagccagtgataaccttactgaattcatctccaccagctgtacagcaattagctgcagaactcctatcacatcttcttctagaagaccacctccaaaaggacacagtaacagagcaggcgattactcctcttattcaagttctttcttcaggtttgccaaatttacagcagagagctataaaagctctagctaaccttgcaatagcttggccaaatacgattgccaaggagggtggtgtttttgagttgtctaaagtgttgttgcaatctgacccgcctttgccgcatgttgtgtgggaatctgcagcatctgtattgtctagcattctacagtacagtactgagtttttccttgaggtacctgttgcagtactagtgcaattgctcaggtcaggaactgaaagcactgttgtcggtgctttgaatgcccttcttgtattggagagtgatgactcaacaagtgcagaagcaatggctgaaagtggtgctgtggaagcattgcttgatctcctgaggagtcatcagtgtgaggaaactgctgccagactaattgaggcattgctgaacaatgtaagaataagggaggcaaaggctgctaaaaatgctattgcaccattgtccatgtaccttctggatccacagacacaatctcaacagggaagattgcttgctgctcttgctcttggtgatcttttccaaaacgaaggtcttgctcgttctactgatgctgttgcagcatgccgcgctctagtcaatcttcttgaagatcaaccaactgaagagatgaaagtggtagcaatatgtgccttgcagaatctagtcatgtacagccgagcaaataagagagcagttgcagaatccggtggtgtccaggtcctgctggatcttatcagttcaagcaatcctgacacttctgttcaggcagcaatgtttgtcaaacttctattcaataatcacactatccaggaatatgcgaccagtgaaacagtcagagttataactgcttctcta

SEQ ID NO: 218976 - DNA, 5799 bp, Zea Mays
gtccgattcacttgatcgtagcggtggctgtagcatatgtgtttgtctagatctggggttgacaactgggcactgacgaagtggatactctgctctgctctgctctgctcgacgagttttaacatctgagtatggctgcggcgttggcgtggcggttcaatggcaccaatggtggcgcccatggcagcgcagatctggaaagacacacggacaaagttcaagactcagagccacaaactcctatgtcaatcgtgaaaatgggcaagaaccgagttaatgtggaggacgaggagacactttcaagcgttgctcaatgtattgagcaactacgacagagttcttcatcctcacaggagaaagagagctctttgaagcagttattagatcttgttcaaactcgtgatactgcattcggagctgttgggtcacattcacaggctgttccgatacttgtatctctccttaggtctggaccatctggagttaagatgctggctgccactgttcttgggtctctttgcaaggaagaggagttaagggtgaaagtcttacttggtggttgcatacctccattgcttgctcttctcagatcgaagtcagctgaaagccaaactgcagctgccaaaaccatatatgcagtttcacagggtgggataagggatcatgttggatcaaagattttctctacggaaaatgttgttcctgtactgtgggagcaacttaaaattagtctcaagaatgagagtttggtggatggccttctaactggagcactgaagaatttatcaaagaatacagaggggttttggtcagcaactgtgcaatgtggtggagttgatatacttataaagctggttagttctggacaaacaaatactcttgcaaacacttgctatcttcttgggtctttgatgatggaagactcttctgtttgttctaaagttttatctggagaaacaacaaagcagctcttaaagttacttggtcctggcaatgagacttctattagagctgaggctgctggggctctcaagttcctttctgcacagagtaaagaggccagacgtcagatagctaattctaacggtattccttctcttataaatgctactattgctccatcaaaagagttcatgcaaggtgaatctgctcaagcattgcaagagaatgcaatgtgtgcattagcaaatatatctggtggtctttcctacgtaatctcaagccttggtgagagtctcgagtcatgttcttcacctgcacagattgcagatactcttggtgcattggcctcagccttgatgatatatgacacaaatgcggaatctatcagtgcttctaatcctgttgacattgagaagacacttttgaagcagtttaagcctaaggttccttttcttgtgcaggagcgcataattgaagctttggctagcttgtatggtaacccggttctctgcaagacactagcagattctgatgcaaaacgcttacttgttggtttaataaccatggcagctactgaggtacaagatgacctcacgaaatcactttttgctctctgcaagaaggattgtgatctatggcaagctctgcaaggccgtgaaggtgtccagctattgatttctttacttggtctttcatcagaacagcagcaggagtgtgctgttgctctacttgcgcttctttcaaaggagaatgatgagagcaaatgggctatcactgctgctggtggcatacctccacttgtgcaaattttggaaactggatcttccaaagctaaagaagattcagcaaccatccttggcaatttatgcaatcacagtgaagacataagagcatgtgttcaaagtgctgatgctgttcctgctttactatggcttctgaaaaatggaagtgataatggcaaggagatagcttctaaaacactgaatcatctcatccacaaatcagatactggaactatcagtcagttatctgctcttttaactagtgatcagcctgagtcaaaagtttatgttctggatgctttgaaaagcttgctttctgttgcaccacttaatgatattctacatgagggaagtgcagcgaatgatgcggttgagacaatgattaaaattctaagctcacccaaggaagagactcaggctacatcagcaactgctcttgctggtctatttcattgccgcaaggacctgcgagaaactcatattgcagtgaagacactttggtcagtcatgaagctgcttgatatgcagtctaacaaaatactaacgggggcctcatgttgccttgctgccgtttttctttcgatcaaggaaaataaagaggttgctgcaattggccgggatgccttaaacccacttgtctcacttgcaaattcttcagttatagaagtggcagaacaagcgactagagctttggcaaatcttttccttgatcaggaattgtccctccaggtgccttttgaagaaattctcttccgtgtaacacgtgtactaagagagggaactattgatggaagaactcatgcagccgcagcaatagctcgtcttttacagtgccgaactattaatcagccactttcagatactgttaaccgctctgggtctgtccttgctctagctgggctcttggaagctgcaaatggtgaagctgctgcaacatcagaagttcttgatgcactggtgctgttgtcgcgatcaaaggcgtcaagtgggcacaccaaggctccctgggcaattcttgcagaaaacccccacacaatacttccccttgtttcatgtattgctgatgctgctgcctccttacaagataaagctatagaagttgtgtcaaggctctgttccgacctacatgatgttgtcggtggtctggtttctgaaactccaggttgcatgtcatccatcacacggcgcatcattggctccaacattcttaaagttaaagttggtggttgtgctcttctcgtctgtgctgcaaaagagtattgtcagaagcaaatagaggttctgaatgatgcaagtctgtatattcaactaattcattctttaattggtatgatccatatggcaaacacgcaagctgaaaatgtcagcagtgaaagcatatcagatattagaatttccagacactccaaagaaaacaacagtgatggtgaaactctgtgctgtactgctgtcatctcaggcaacatgattccactatggctacttgctatcttttctcgtcatgacagcaaaacaagagcagaactcctggaaatgggagcagttgaaatgctcatcgagaagatttcacaaaatgcattccaatatgtgggtgaagaagataacacctcatgggtcagatgagccagcatacaggtactttgcggcacaagctttgtcaagtctggtctgcaatggtagcagaggaactcttctggctgttgcgaattctggggcagccattggacttatatctttgcttggatgtgctgatgttgatatagctgatcttttggaattatcagaggaattcatgttggtgcctaaccctgatcaaattgcattagagaggctattcagagttgatgatatcagggttggtgcaacttctagaaaatctattcctcttcttgttgatctacttaaacccattcctgaaagacctggtgctcctttcttggccttgggtcttctgacccagttagccgttgattgccccccaaacatgctgctaatggctgaagctggaatcctagaagcacttaccaaatacttatctcttagtccacaagatgcaacagaagaagctacaactgaattgctgggcattcttttcagtagtccagaaataaggcaccatgaatcagcacttggtgttgttaaccaacttgtggcagtccttcgtctaggaggaaggaattcacgttatagtgccgcgaaggcattagagagtttattttgtgctgaccatgtgaggaacagtgagtcaactaggcaggctatccaaccgcttgtggagattctgagtactggcatggagagggagcagcatgcagctatatcagcccttgttaggcttctttctgacaatccttcaagagcacttgcggttgcggatgttgagatgaatgctgtggatgttatgtgccggattctttcttctgattgttcagtggagttgaaaggaaatgctgcggaactatgctgtgttctatttaccaacacaaggatccgttccacaatggcagcagctcgttgtgtggaacccctggttggtttactggttagtgaagctaaccctgcccagctttctgtggttcgtgcattggataggcttctagatgatgagcaactagcagaattagtggcagcaaatggagctgtcattcctcttgtggggcttttgtatggcaaaaactacatgcttcatgaggcagttgctagagctttggtgaaacttggaaaggacagaccagcttgcaaattggaaatggtcaaggctggtgtaattgagagcattcttgatattctccatgacgctccagattttctttgcattgcattggcagaaatgcttcggattttgacaaacaatgctaccatagcaaaaggtccatcctcagccaaagtagtacaacctcttttctctttgctttccaaggcggacatgggtcctgaagggcagtatagcacattgcaggttcttgtgaatattttggagcatcctgaatgccgtgctgattataacttgacacctcgccaaactattgagccagtgataaccttactgaattcatctccaccagctgtacagcaattagctgcagaactcctatcacatcttcttctagaagaccacctccaaaaggacacagtaacagagcaggcgattactcctcttattcaagttctttcttcaggtttgccaaatttacagcagagagctataaaagctctagctaaccttgcaatagcttggccaaatacgattgccaaggagggtggtgtttttgagttgtctaaagtgttgttgcaatctgacccgcctttgccgcatgttgtgtgggaatctgcagcatctgtattgtctagcattctacagtacagtactgagtttttccttgaggtacctgttgcagtactagtgcaattgctcaggtcaggaactgaaagcactgttgtcggtgctttgaatgcccttcttgtattggagagtgatgactcaacaagtgcagaagcaatggctgaaagtggtgctgtggaagcattgcttgatctcctgaggagtcatcagtgtgaggaaactgctgccagactaattgaggcattgctgaacaatgtaagaataagggaggcaaaggctgctaaaaatgctattgcaccattgtccatgtaccttctggatccacagacacaatctcaacagggaagattgcttgctgctcttgctcttggtgatcttttccaaaacgaaggtcttgctcgttctactgatgctgttgcagcatgccgcgctctagtcaatcttcttgaagatcaaccaactgaagagatgaaagtggtagcaatatgtgccttgcagaatctagtcatgtacagccgagcaaataagagagcagttgcagaatccggtggtgtccaggtcctgctggatcttatcagttcaagcaatcctgacacttctgttcaggcagcaatgtttgtcaaacttctattcaataatcacactatccaggaatatgcgaccagtgaaacagtcagagttataactggtaaacaatatccctttcttgttctgtcatattcatttgcatag

SEQ ID NO: 218977 - DNA, 5773 bp, Zea Mays
ggtagcgccggctcgtgatctggcttgcccggttgacaactgggcactgacgaagtggatactctgctctgctctgctctgctcgacgagttttaacatctgagtatggctgcggcgttggcgtggcggttcaatggcaccaatggtggcgcccatggcagcgcagatctggaaagacacacggacaaagttcaagactcagagccacaaactcctatgtcaatcgtgaaaatgggcaagaaccgagttaatgtggaggacgaggagacactttcaagcgttgctcaatgtattgagcaactacgacagagttcttcatcctcacaggagaaagagagctctttgaagcagttattagatcttgttcaaactcgtgatactgcattcggagctgttgggtcacattcacaggctgttccgatacttgtatctctccttaggtctggaccatctggagttaagatgctggctgccactgttcttgggtctctttgcaaggaagaggagttaagggtgaaagtcttacttggtggttgcatacctccattgcttgctcttctcagatcgaagtcagctgaaagccaaactgcagctgccaaaaccatatatgcagtttcacagggtgggataagggatcatgttggatcaaagattttctctacggaaaatgttgttcctgtactgtgggagcaacttaaaattagtctcaagaatgagagtttggtggatggccttctaactggagcactgaagaatttatcaaagaatacagaggggttttggtcagcaactgtgcaatgtggtggagttgatatacttataaagctggttagttctggacaaacaaatactcttgcaaacacttgctatcttcttgggtctttgatgatggaagactcttctgtttgttctaaagttttatctggagaaacaacaaagcagctcttaaagttacttggtcctggcaatgagacttctattagagctgaggctgctggggctctcaagttcctttctgcacagagtaaagaggccagacgtcagatagctaattctaacggtattccttctcttataaatgctactattgctccatcaaaagagttcatgcaaggtgaatctgctcaagcattgcaagagaatgcaatgtgtgcattagcaaatatatctggtggtctttcctacgtaatctcaagccttggtgagagtctcgagtcatgttcttcacctgcacagattgcagatactcttggtgcattggcctcagccttgatgatatatgacacaaatgcggaatctatcagtgcttctaatcctgttgacattgagaagacacttttgaagcagtttaagcctaaggttccttttcttgtgcaggagcgcataattgaagctttggctagcttgtatggtaacccggttctctgcaagacactagcagattctgatgcaaaacgcttacttgttggtttaataaccatggcagctactgaggtacaagatgacctcacgaaatcactttttgctctctgcaagaaggattgtgatctatggcaagctctgcaaggccgtgaaggtgtccagctattgatttctttacttggtctttcatcagaacagcagcaggagtgtgctgttgctctacttgcgcttctttcaaaggagaatgatgagagcaaatgggctatcactgctgctggtggcatacctccacttgtgcaaattttggaaactggatcttccaaagctaaagaagattcagcaaccatccttggcaatttatgcaatcacagtgaagacataagagcatgtgttcaaagtgctgatgctgttcctgctttactatggcttctgaaaaatggaagtgataatggcaaggagatagcttctaaaacactgaatcatctcatccacaaatcagatactggaactatcagtcagttatctgctcttttaactagtgatcagcctgagtcaaaagtttatgttctggatgctttgaaaagcttgctttctgttgcaccacttaatgatattctacatgagggaagtgcagcgaatgatgcggttgagacaatgattaaaattctaagctcacccaaggaagagactcaggctacatcagcaactgctcttgctggtctatttcattgccgcaaggacctgcgagaaactcatattgcagtgaagacactttggtcagtcatgaagctgcttgatatgcagtctaacaaaatactaacgggggcctcatgttgccttgctgccgtttttctttcgatcaaggaaaataaagaggttgctgcaattggccgggatgccttaaacccacttgtctcacttgcaaattcttcagttatagaagtggcagaacaagcgactagagctttggcaaatcttttccttgatcaggaattgtccctccaggtgccttttgaagaaattctcttccgtgtaacacgtgtactaagagagggaactattgatggaagaactcatgcagccgcagcaatagctcgtcttttacagtgccgaactattaatcagccactttcagatactgttaaccgctctgggtctgtccttgctctagctgggctcttggaagctgcaaatggtgaagctgctgcaacatcagaagttcttgatgcactggtgctgttgtcgcgatcaaaggcgtcaagtgggcacaccaaggctccctgggcaattcttgcagaaaacccccacacaatacttccccttgtttcatgtattgctgatgctgctgcctccttacaagataaagctatagaagttgtgtcaaggctctgttccgacctacatgatgttgtcggtggtctggtttctgaaactccaggttgcatgtcatccatcacacggcgcatcattggctccaacattcttaaagttaaagttggtggttgtgctcttctcgtctgtgctgcaaaagagtattgtcagaagcaaatagaggttctgaatgatgcaagtctgtatattcaactaattcattctttaattggtatgatccatatggcaaacacgcaagctgaaaatgtcagcagtgaaagcatatcagatattagaatttccagacactccaaagaaaacaacagtgatggtgaaactctgtgctgtactgctgtcatctcaggcaacatgattccactatggctacttgctatcttttctcgtcatgacagcaaaacaagagcagaactcctggaaatgggagcagttgaaatgctcatcgagaagatttcacaaaatgcattccaatatgtgggtgaagaagataacacctcatgggtcagatgagccagcatacaggtactttgcggcacaagctttgtcaagtctggtctgcaatggtagcagaggaactcttctggctgttgcgaattctggggcagccattggacttatatctttgcttggatgtgctgatgttgatatagctgatcttttggaattatcagaggaattcatgttggtgcctaaccctgatcaaattgcattagagaggctattcagagttgatgatatcagggttggtgcaacttctagaaaatctattcctcttcttgttgatctacttaaacccattcctgaaagacctggtgctcctttcttggccttgggtcttctgacccagttagccgttgattgccccccaaacatgctgctaatggctgaagctggaatcctagaagcacttaccaaatacttatctcttagtccacaagatgcaacagaagaagctacaactgaattgctgggcattcttttcagtagtccagaaataaggcaccatgaatcagcacttggtgttgttaaccaacttgtggcagtccttcgtctaggaggaaggaattcacgttatagtgccgcgaaggcattagagagtttattttgtgctgaccatgtgaggaacagtgagtcaactaggcaggctatccaaccgcttgtggagattctgagtactggcatggagagggagcagcatgcagctatatcagcccttgttaggcttctttctgacaatccttcaagagcacttgcggttgcggatgttgagatgaatgctgtggatgttatgtgccggattctttcttctgattgttcagtggagttgaaaggaaatgctgcggaactatgctgtgttctatttaccaacacaaggatccgttccacaatggcagcagctcgttgtgtggaacccctggttggtttactggttagtgaagctaaccctgcccagctttctgtggttcgtgcattggataggcttctagatgatgagcaactagcagaattagtggcagcaaatggagctgtcattcctcttgtggggcttttgtatggcaaaaactacatgcttcatgaggcagttgctagagctttggtgaaacttggaaaggacagaccagcttgcaaattggaaatggtcaaggctggtgtaattgagagcattcttgatattctccatgacgctccagattttctttgcattgcattggcagaaatgcttcggattttgacaaacaatgctaccatagcaaaaggtccatcctcagccaaagtagtacaacctcttttctctttgctttccaaggcggacatgggtcctgaagggcagtatagcacattgcaggttcttgtgaatattttggagcatcctgaatgccgtgctgattataacttgacacctcgccaaactattgagccagtgataaccttactgaattcatctccaccagctgtacagcaattagctgcagaactcctatcacatcttcttctagaagaccacctccaaaaggacacagtaacagagcaggcgattactcctcttattcaagttctttcttcaggtttgccaaatttacagcagagagctataaaagctctagctaaccttgcaatagcttggccaaatacgattgccaaggagggtggtgtttttgagttgtctaaagtgttgttgcaatctgacccgcctttgccgcatgttgtgtgggaatctgcagcatctgtattgtctagcattctacagtacagtactgagtttttccttgaggtacctgttgcagtactagtgcaattgctcaggtcaggaactgaaagcactgttgtcggtgctttgaatgcccttcttgtattggagagtgatgactcaacaagtgcagaagcaatggctgaaagtggtgctgtggaagcattgcttgatctcctgaggagtcatcagtgtgaggaaactgctgccagactaattgaggcattgctgaacaatgtaagaataagggaggcaaaggctgctaaaaatgctattgcaccattgtccatgtaccttctggatccacagacacaatctcaacagggaagattgcttgctgctcttgctcttggtgatcttttccaaaacgaaggtcttgctcgttctactgatgctgttgcagcatgccgcgctctagtcaatcttcttgaagatcaaccaactgaagagatgaaagtggtagcaatatgtgccttgcagaatctagtcatgtacagccgagcaaataagagagcagttgcagaatccggtggtgtccaggtcctgctggatcttatcagttcaagcaatcctgacacttctgttcaggcagcaatgtttgtcaaacttctattcaataatcacactatccaggaatatgcgaccagtgaaacagtcagagttataactggtaaacaatatccctttcttgttctgtcatattcatttgcatag

SEQ ID NO: 218978 - DNA, 6028 bp, Zea Mays
cccaaacaagtcaaaatcttttacaattttttccaatcccatccaatccacatgggataggaataaccgaacaagcccttaggggcgcgcggaaattaccggagttactaaggccttgggagttcggtcccgggagctcctccccatcgaaaataagcggaagcgcgtcccgcagcttctccgtgctagctgtaacggacgcgcgctgcctgtctgtgcatgggcgccgccctccccgctggatctgcagccacccccactccccgtcgcgccgattccatgagaggttgacaactgggcactgacgaagtggatactctgctctgctctgctctgctcgacgagttttaacatctgagtatggctgcggcgttggcgtggcggttcaatggcaccaatggtggcgcccatggcagcgcagatctggaaagacacacggacaaagttcaagactcagagccacaaactcctatgtcaatcgtgaaaatgggcaagaaccgagttaatgtggaggacgaggagacactttcaagcgttgctcaatgtattgagcaactacgacagagttcttcatcctcacaggagaaagagagctctttgaagcagttattagatcttgttcaaactcgtgatactgcattcggagctgttgggtcacattcacaggctgttccgatacttgtatctctccttaggtctggaccatctggagttaagatgctggctgccactgttcttgggtctctttgcaaggaagaggagttaagggtgaaagtcttacttggtggttgcatacctccattgcttgctcttctcagatcgaagtcagctgaaagccaaactgcagctgccaaaaccatatatgcagtttcacagggtgggataagggatcatgttggatcaaagattttctctacggaaaatgttgttcctgtactgtgggagcaacttaaaattagtctcaagaatgagagtttggtggatggccttctaactggagcactgaagaatttatcaaagaatacagaggggttttggtcagcaactgtgcaatgtggtggagttgatatacttataaagctggttagttctggacaaacaaatactcttgcaaacacttgctatcttcttgggtctttgatgatggaagactcttctgtttgttctaaagttttatctggagaaacaacaaagcagctcttaaagttacttggtcctggcaatgagacttctattagagctgaggctgctggggctctcaagttcctttctgcacagagtaaagaggccagacgtcagatagctaattctaacggtattccttctcttataaatgctactattgctccatcaaaagagttcatgcaaggtgaatctgctcaagcattgcaagagaatgcaatgtgtgcattagcaaatatatctggtggtctttcctacgtaatctcaagccttggtgagagtctcgagtcatgttcttcacctgcacagattgcagatactcttggtgcattggcctcagccttgatgatatatgacacaaatgcggaatctatcagtgcttctaatcctgttgacattgagaagacacttttgaagcagtttaagcctaaggttccttttcttgtgcaggagcgcataattgaagctttggctagcttgtatggtaacccggttctctgcaagacactagcagattctgatgcaaaacgcttacttgttggtttaataaccatggcagctactgaggtacaagatgacctcacgaaatcactttttgctctctgcaagaaggattgtgatctatggcaagctctgcaaggccgtgaaggtgtccagctattgatttctttacttggtctttcatcagaacagcagcaggagtgtgctgttgctctacttgcgcttctttcaaaggagaatgatgagagcaaatgggctatcactgctgctggtggcatacctccacttgtgcaaattttggaaactggatcttccaaagctaaagaagattcagcaaccatccttggcaatttatgcaatcacagtgaagacataagagcatgtgttcaaagtgctgatgctgttcctgctttactatggcttctgaaaaatggaagtgataatggcaaggagatagcttctaaaacactgaatcatctcatccacaaatcagatactggaactatcagtcagttatctgctcttttaactagtgatcagcctgagtcaaaagtttatgttctggatgctttgaaaagcttgctttctgttgcaccacttaatgatattctacatgagggaagtgcagcgaatgatgcggttgagacaatgattaaaattctaagctcacccaaggaagagactcaggctacatcagcaactgctcttgctggtctatttcattgccgcaaggacctgcgagaaactcatattgcagtgaagacactttggtcagtcatgaagctgcttgatatgcagtctaacaaaatactaacgggggcctcatgttgccttgctgccgtttttctttcgatcaaggaaaataaagaggttgctgcaattggccgggatgccttaaacccacttgtctcacttgcaaattcttcagttatagaagtggcagaacaagcgactagagctttggcaaatcttttccttgatcaggaattgtccctccaggtgccttttgaagaaattctcttccgtgtaacacgtgtactaagagagggaactattgatggaagaactcatgcagccgcagcaatagctcgtcttttacagtgccgaactattaatcagccactttcagatactgttaaccgctctgggtctgtccttgctctagctgggctcttggaagctgcaaatggtgaagctgctgcaacatcagaagttcttgatgcactggtgctgttgtcgcgatcaaaggcgtcaagtgggcacaccaaggctccctgggcaattcttgcagaaaacccccacacaatacttccccttgtttcatgtattgctgatgctgctgcctccttacaagataaagctatagaagttgtgtcaaggctctgttccgacctacatgatgttgtcggtggtctggtttctgaaactccaggttgcatgtcatccatcacacggcgcatcattggctccaacattcttaaagttaaagttggtggttgtgctcttctcgtctgtgctgcaaaagagtattgtcagaagcaaatagaggttctgaatgatgcaagtctgtatattcaactaattcattctttaattggtatgatccatatggcaaacacgcaagctgaaaatgtcagcagtgaaagcatatcagatattagaatttccagacactccaaagaaaacaacagtgatggtgaaactctgtgctgtactgctgtcatctcaggcaacatgattccactatggctacttgctatcttttctcgtcatgacagcaaaacaagagcagaactcctggaaatgggagcagttgaaatgctcatcgagaagatttcacaaaatgcattccaatatgtgggtgaagaagataacacctcatgggtcagatgagccagcatacaggtactttgcggcacaagctttgtcaagtctggtctgcaatggtagcagaggaactcttctggctgttgcgaattctggggcagccattggacttatatctttgcttggatgtgctgatgttgatatagctgatcttttggaattatcagaggaattcatgttggtgcctaaccctgatcaaattgcattagagaggctattcagagttgatgatatcagggttggtgcaacttctagaaaatctattcctcttcttgttgatctacttaaacccattcctgaaagacctggtgctcctttcttggccttgggtcttctgacccagttagccgttgattgccccccaaacatgctgctaatggctgaagctggaatcctagaagcacttaccaaatacttatctcttagtccacaagatgcaacagaagaagctacaactgaattgctgggcattcttttcagtagtccagaaataaggcaccatgaatcagcacttggtgttgttaaccaacttgtggcagtccttcgtctaggaggaaggaattcacgttatagtgccgcgaaggcattagagagtttattttgtgctgaccatgtgaggaacagtgagtcaactaggcaggctatccaaccgcttgtggagattctgagtactggcatggagagggagcagcatgcagctatatcagcccttgttaggcttctttctgacaatccttcaagagcacttgcggttgcggatgttgagatgaatgctgtggatgttatgtgccggattctttcttctgattgttcagtggagttgaaaggaaatgctgcggaactatgctgtgttctatttaccaacacaaggatccgttccacaatggcagcagctcgttgtgtggaacccctggttggtttactggttagtgaagctaaccctgcccagctttctgtggttcgtgcattggataggcttctagatgatgagcaactagcagaattagtggcagcaaatggagctgtcattcctcttgtggggcttttgtatggcaaaaactacatgcttcatgaggcagttgctagagctttggtgaaacttggaaaggacagaccagcttgcaaattggaaatggtcaaggctggtgtaattgagagcattcttgatattctccatgacgctccagattttctttgcattgcattggcagaaatgcttcggattttgacaaacaatgctaccatagcaaaaggtccatcctcagccaaagtagtacaacctcttttctctttgctttccaaggcggacatgggtcctgaagggcagtatagcacattgcaggttcttgtgaatattttggagcatcctgaatgccgtgctgattataacttgacacctcgccaaactattgagccagtgataaccttactgaattcatctccaccagctgtacagcaattagctgcagaactcctatcacatcttcttctagaagaccacctccaaaaggacacagtaacagagcaggcgattactcctcttattcaagttctttcttcaggtttgccaaatttacagcagagagctataaaagctctagctaaccttgcaatagcttggccaaatacgattgccaaggagggtggtgtttttgagttgtctaaagtgttgttgcaatctgacccgcctttgccgcatgttgtgtgggaatctgcagcatctgtattgtctagcattctacagtacagtactgagtttttccttgaggtacctgttgcagtactagtgcaattgctcaggtcaggaactgaaagcactgttgtcggtgctttgaatgcccttcttgtattggagagtgatgactcaacaagtgcagaagcaatggctgaaagtggtgctgtggaagcattgcttgatctcctgaggagtcatcagtgtgaggaaactgctgccagactaattgaggcattgctgaacaatgtaagaataagggaggcaaaggctgctaaaaatgctattgcaccattgtccatgtaccttctggatccacagacacaatctcaacagggaagattgcttgctgctcttgctcttggtgatcttttccaaaacgaaggtcttgctcgttctactgatgctgttgcagcatgccgcgctctagtcaatcttcttgaagatcaaccaactgaagagatgaaagtggtagcaatatgtgccttgcagaatctagtcatgtacagccgagcaaataagagagcagttgcagaatccggtggtgtccaggtcctgctggatcttatcagttcaagcaatcctgacacttctgttcaggcagcaatgtttgtcaaacttctattcaataatcacactatccaggaatatgcgaccagtgaaacagtcagagttataactggtaaacaatatccctttcttgttctgtcatattcatttgcatag

SEQ ID NO: 218979 - DNA, 3138 bp, Zea Mays
ccacggctgacgtctgcgccgcttccgcgtcggcggcggacagctcggagccgctaggtctccgctctctgccgcattccgtggcatatcctataacaatttccccaacgccacatggccaacgccgacgctggcgacggcgacgaggtcatcctcgacgctcccggcttcatacgagtgtacaggagcggccgcgtcgagcgctttctgccggtcgacttcgccccgccctccactgacgccgccaccggcgtctcttcaaaggacgtcgccatcctcccagacgcctgcctattggttcgcatttacctcccattgcccccctcttccggaagttacagcggcaaactccccgtcctggtgttcttccacggcggcgggttctgcctcggttcggcgtttgatgcggcggtgcactcccacgccaaccggttagccgcggctgccggcgcaatcatcgtgtcggactgtcggtggaataccgcctcgcgccagagcatccggtccccgctctctacggggacgcgtggacggcgctccagtgggtggccgcgcactccgtgggccgggggcaggaaccctggctgactgcccacgcggacctcgggcgcgtccacgtcggcggagagagcgcgggcgcgaacattgcccaccacgccgcgatgcgcgctggcagagaggagctgggccacggcgtgaagctcagctcgctcgtgatgatccatccctacttcctgggaggcgagagctccgagacagacgacatgggcgtagcgttgctccgcgagctcgtccggctgtggccggtggtgtgcccgggcacgagcgggtgcgatgacgacccgttgatcaatccgatggcagagggtgcccccaatctcgctagcttggggtgccgacgcgtactggtgtgcgtcgggggaaaggacccgatgagaggcagaggaaggctgtattgtgagaagctgaagagaagtgggtggcgcggggaggtggatgactgggaggcggacggccagggacacggtttccatctctcgtgccccatgagcgcagaggcggaggcgcaagtccgggtcatcgctgagtttctgacctacggatgacatatctgttttcccactccttcacgcggccatggtgcattgttctcgaatctgatatacattttttgtttcgagtttggattgaggacatgcatgtttatattttatatttttatctactatttcataagcttaataaatgtttggctatgggttccagattctcaattttcatcagaagaaggggttactgagctgtattagacttacctttgggttaatatctattggtgcaagacccagattggctatacctttgtaatcgaatttgctttgcctggctaaagtttatgacaaaatcgtcgcattgctcacattctctttaatacagtcctggtgaccttgtcgcataacatgagcagtcatttagtatacatgagtgatgagtcgtgaggcttctcataatagagcagtgttcctgcacaaatgggagaaagggctggtagtctcacatgcaaagagtccaggagcagccacctatgatggatcataacccaacagttgtaaaagaaatcaatatggggagaatttctcttggaccaacttatttgatgatatctcttgctttgatatccaccttcaggcatcctaggtgtgttttgtttgtcctacaaggcatgcattatgtcttggtcaatcttttacttccattgctgcatcatggggctttgagaaatactgcttccttgacttgtccttttgctttcattgaccaaacacactttcctttatcatcttgcaaaaggcatgctgtttgagcaagacataagttatacacataaattttatgatatgcgtggactgaaggctaaaaggctttttaaagctaccccaacttgcttgggataaaaggcttttgttgttgttgttgttgcatgaactgaaggatcttggtagaatttacagagaaatgctgtagcgatttgatctgttgcaatatcaatgattgagttagggttgaccatcttgcatatgttcgttggggatcagaagtacaacacaatggatgctctactatcagatatttgtatcagcacatctgctgctccaacctatcttcctgcatactctacttcaagacagaagatttccatgggaacaccaaggagttccatcctattgatggaggagtagctgccaataatctggtgcaatatttgtcagtaattatgcatcgcacttcaatcatgacgcaaggttgatacattatttgcacttctatgtgtaaaatcttgcaaagtgtcaacatggctttagttgccatttgagaagtaaccaagcagatattcaaggaaagcccagattcttcccaataaaacctatggatcatgactgatttttggtcatttcactaggcaggctcagcaaagtttgaagcaaactacaacgcacaaacaactaaatcatggagagtgttgagttggttgcttggcagtggatccactcccttagtatctattttcacacaggcaagtgcagatatggtggatattcatatctctgctagtttcaaagccttgcattctgagtaaaacgatctgagcattcaggatgatactctacaaggactgtgtcctcggttgatgttgcaaccgaggaaaaaatggagaaacttgccagagttagagatatgctactaaagaaacctgtctcacaggcgaatttggaaactggctatatggtgcgtgcctgtcataggacagagctgactaatgacgaagctctcaagagatttgcgaagctgctgtctgatgaaaggcaaattcgtaaggcaagatggccaaaatgaagaaagcccttgtggttgtttcaacacacagagaactctgcattacttcaattaagaattatggttgatattatttgttgatatgaattgtaacaataaaacaacttgtattggatcatgctgacactatgaattgatgatgttggcttctgccgggtgccggctgtcttttgtagcgtgtgaaggaatggaaaatattaatattctttttgataaatataagcattggattacttgtatagt

SEQ ID NO: 218980 - DNA, 2734 bp, Zea Mays
ctgacgtctgcgccgcttccgcgtcggcggcggacagctcggagccgctaggtctccgctctctgccgcattccgtggcatatcctataacaatttccccaacgccacatggccaacgccgacgctggcgacggcgacgaggtcatcctcgacgctcccggcttcatacgagtgtacaggagcggccgcgtcgagcgctttctgccggtcgacttcgccccgccctccactgacgccgccaccggcgtctcttcaaaggacgtcgccatcctcccagacgcctgcctattggttcgcatttacctcccattgcccccctcttccggaagttacagcggcaaactccccgtcctggtgttcttccacggcggcgggttctgcctcggttcggcgtttgatgcggcggtgcactcccacgccaaccggttagccgcggctgccggcgcaatcatcgtgtcggactgtcggtggaataccgcctcgcgccagagcatccggtccccgctctctacggggacgcgtggacggcgctccagtgggtggccgcgcactccgtgggccgggggcaggaaccctggctgactgcccacgcggacctcgggcgcgtccacgtcggcggagagagcgcgggcgcgaacattgcccaccacgccgcgatgcgcgctggcagagaggagctgggccacggcgtgaagctcagctcgctcgtgatgatccatccctacttcctgggaggcgagagctccgagacagacgacatgggcgtagcgttgctccgcgagctcgtccggctgtggccggtggtgtgcccgggcacgagcgggtgcgatgacgacccgttgatcaatccgatggcagagggtgcccccaatctcgctagcttggggtgccgacgcgtactggtgtgcgtcgggggaaaggacccgatgagaggcagaggaaggctgtattgtgagaagctgaagagaagtgggtggcgcggggaggtggatgactgggaggcggacggccagggacacggtttccatctctcgtgccccatgagcgcagaggcggaggcgcaagtccgggtcatcgctgagtttctgacctacggatgacatatctgttttcccactccttcacgcggccatggtgcattgttctcgaatctgatatacattttttgtttcgagtttggattgaggacatgcatgtttatattttatatttttatctactatttcataagcttaataaatgtttggctatgggttccagattctcaattttcatcagaagaaggggttactgagctgtattagacttacctttgggttaatatctattggtgcaagacccagattggctatacctttgtaatcgaatttgctttgcctggctaaagtttatgacaaaatcgtcgcattgctcacattctctttaatacagtcctggtgaccttgtcgcataacatgagcagtcatttagtatacatgagtgatgagtcgtgaggcttctcataatagagcagtgttcctgcacaaatgggagaaagggctggtagtctcacatgcaaagagtccaggagcagccacctatgatggatcataacccaacagttgtaaaagaaatcaatatggggagaatttctcttggaccaacttatttgatgatatctcttgctttgatatccaccttcaggcatcctagaagtacaacacaatggatgctctactatcagatatttgtatcagcacatctgctgctccaacctatcttcctgcatactctacttcaagacagaagatttccatgggaacaccaaggagttccatcctattgatggaggagtagctgccaataatctggtgcaatatttgtcagtaattatgcatcgcacttcaatcatgacgcaaggttgatacattatttgcacttctatgtgtaaaatcttgcaaagtgtcaacatggctttagttgccatttgagaagtaaccaagcagatattcaaggaaagcccagattcttcccaataaaacctatggatcatgactgatttttggtcatttcactaggcaggctcagcaaagtttgaagcaaactacaacgcacaaacaactaaatcatggagagtgttgagttggttgcttggcagtggatccactcccttagtatctattttcacacaggcaagtgcagatatggtggatattcatatctctgctagtttcaaagccttgcattctgagtaaaacgatctgagcattcaggatgatactctacaaggactgtgtcctcggttgatgttgcaaccgaggaaaaaatggagaaacttgccagagttagagatatgctactaaagaaacctgtctcacaggcgaatttggaaactggctatatggtgcgtgcctgtcataggacagagctgactaatgacgaagctctcaagagatttgcgaagctgctgtctgatgaaaggcaaattcgtaaggcaagatggccaaaatgaagaaagcccttgtggttgtttcaacacacagagaactctgcattacttcaattaagaattatggttgatattatttgttgatatgaattgtaacaataaaacaacttgtattggatcatgctgacactatgaattgatgatgttggcttctgccgggtgccggctgtcttttgtagcgtgtgaaggaatggaaaatattaatattctttttgataaatataagcattggattacttgtatagt

SEQ ID NO: 218981 - DNA, 2085 bp, Zea Mays
aaaggagttaaatcctgtggcccatcctgctaagatgaaaattgaaaaggcccatgatcctgggctctctcgtctttcctcgacgagattcccaaaccgctccgccgccgccgctcgtcagcctccgttccaaccgccgcgccggcgacatgccgcccaaagagctgccggggttctactacgacccagagaagaatcgctacttccccatcaggggccccatcccgggcgctgccgcccgccgcggcacgccagcgccacctccggccgtggacacaacgggatgcagcaggaaaagggctaggcggccggagctgctcaacgccagggagatgtacggcggcggagtcatgttctccaataaagccgccaggtccacgttcaagcagcagtgccactacgcgcaggcgtctcagcccatggtctggaagtaccaagccaccacctctgtggctgataaggcgctcgaacaattggacgccatggttcagacaccgcaagggttgaaagagtccaggctgctagtctccggcagcatgaacggttcgattcggttatacggattagggactgctctgagtaactttgagaatgaggcagagtttttgccccaacctgcttgtactcttgtgggaaagcacaagccaggaccactccccagcatttggtcacctggaacaggcttcatagctttctcatccagtatatcatgcataaagaagctcggacgtcatgtccctgatgcatcgaacaccaattcatcagttcagcgagcatggtggctactcttggatctggagaatctcgtgcctctttatatattatggatctttctgaagctgttgacttggcaatcggaccatggactacctacagagttcattcacttgatcgaacaatgtggacagctgattgtagttctgatggcacacatgcagctttcggttcggaccttggtgctggtctgatcgatttggaaacaaggggatcatcatggttatgtcgttctaaaagcgacattctttccctgaaatttgtgcactcgggaaaagttgtgctatgtggtctacggaatgggagtatagcccctgttgatgtacggcaaaaacagcataatcagcctactggagtagcttcatctagcaatgctaggaggacagttcccatgctgcccacaagacatggtgggaagcaaagaaaccaggctagcaaggataaattttcaagagttatttctatgtcgtcagcagtttgtagcttggtttcactctcatcagatgagaactacttcttaggaagctccatggatggatctatcaaactcttcgatcttcgcctcattcagaagggaggtatacagtcgtacgaggggcatgtgaactcacacacacttttaccacttgctgttgatccatctgagaccttacttatgtcaggtggggaggactgcactgttcgcatatggagcatcaaaacaggcgagctaatctttgcgcggagcatgggagacagtcccttcacgtcatcttgttggcccgaaagcagccatggcttgtgcagtccttggctgtttgatgtaaaccacagctggggagcttggttggggtcacgtgctgggttgttctatatgcatggtacaatctgtaatgttacacactgatgatgaattgatgatggctgatgagcaaacataccaggcagctctgtcgaagcctgttgctgatggttcaacatttcagcaacagcacatggcaaaaaagaaaagaaaaactctttctggattcctagcagacaaaatcgttgtccttgttgaacatggtcaggtctaactcctcccagttggttcgcagggtgatgaaaaagaggacgcagttctggcagaggaggccgcatatctgccccatccacagcccctggacgacacagacatgcattgttaatttggtacattaacattcattaattatttggtacatgaacattcgttcagaatagaacacatactgtaccttggtttggaagccgagcgtgaatccgaagaggatggcgagcggcaagccgatgacatagaaggccaccaggttg

SEQ ID NO: 218982 - DNA, 302 bp, Zea Mays
tcaacgacgatttcagtgagctaatctattgtcggcatggatgtagtcactccacttcagaaaagagtcagttgcatggctcctggcgaacattggacatgtttattttgttacctttgctgttacaaatttggcactcatttattttgagcgttgcgtggtcaaagaaagaaggttgtttatttgagtggcatgaataaaaaagtcttattaactgagtgtgagtgttttgatgatgaacataaaatgacctccgactgttttgattagggatgaaaacggtcggaaacggtatttattcg

SEQ ID NO: 218983 - DNA, 2615 bp, Zea Mays
aggcagaagacctcccttttttactttacccctccaggaagctttgatgcgttcagcgccaaaaaaaaaaaatccatggaagggtaatggcagctcgtcccgcctgttgctgaggaaagagttctgtgacgggagaaaggcaacgattacctagtctcgtcactgtaagttggaaggccatgtctaccttcatcggcgttcttgtctccgatccagggctgcagagccagttcacccaggtgcagctcaggacccttcaaacaaagtttgcatccgcaaagcgaccaaacgcagaacatgtgaccataaaggatttgcccccgatgatggaaaagctgaggggcatccacgaagtcctgtccgaagaagagatcagcgggtttttgagcgagacctatcctgacatgaaccagcctatagaattcgagccgttcctcaaggagtacttaaatatacaagccaaagggagcagcaaatcgggaggcaagaagaagctgaaggggtccgtgtcgtttctgaaggcttccaccaccactctccttcacgtcatcaacgagtccgagaagacttcctacgtgaaccacataaacaatttcctgaaggaggatcctttcctgaagaatttcttgccgctggatccggcatccaacgagctgttcaaccttgttcgggacggcgtgctactttgcaagttgatcaacgttgctgttccgggcacgatagatgagagagcgattaacacaaagaagcatcttaatccatgggagaggaacgagaaccataccctttgtctcaactctgccaaggccattggttgcactgttgttaacattggaacacaagatctgattgaagccaggcctcatctggttcttggactgttatgccagatcataaagatacaactactggctgatctgaatctaaagaagacgcctcagttggcagagttggtggctgatgataatggcaaggaagtagaggagctggtcaccttagcaccggataagatgttgcttaaatggatgaacttccatctcaagaaagcagggtataaaaaaactgtgacaaatttctctactgatgtgaaggatggtgaagcgtatgcttaccttctcagcacccttgctccagagcttagctcaaaaaccatgatagaaacttcagatccaaaggagagggcacagaaagtacttgaaaccgcagaaaagctcgattgtacaagatatgtaacgtctaaagatattgttgaaggttccgccaatcttaacttggcattcgttgctcaaatattccagaacagaaatggtttatcaaccaacactgtggctcccgttattgaagatactcctgatgacgtggaggcatccagggaagagagagcatttcgcctatggatcaacagccttggaattccaacttatgtcaacaatttgtttgaggatgttaggactggatgggttttgctagaggttcttgacaaaatttctccagggtcagttaactggaagcatgcatccaaaccaccaatcattatgccgtttagaaaggttgaaaactgcaaccaggttatcaaaatcggcaaggagctaaacttttctctggtaaatgtagcaggaaatgatattgtgcaaggaaacaagaaactgattctagctttcctgtggcaactcatgaggactagtatcctacaattgctgaggaacttgagatcccactctaaagagaaagagatgacagatgctgacattctcatttgggctaatagcaaggtcaaggaatcaggcaaaaattcacatattgaaagcttcaaggacaaaacgatagcagatggggtgttcttccttgagctcctaagtgctgtgcagagcagggttgttgactggaacatggtgaagaagggggaggatgaggaggagaagaagctgaatgcaacatacataatcagtgttgctaggaagctaggttgcactgtcttcttgctacctgaagacataatggaggtgaacccaaagatgatcctcaccctgacagcaagcatcatgtactggagcctgcagaatcaagggccatacaagagttcaggaccacaggatgctcttctagaggaagaggaaggcgaggaggaggaagaagaagaagaagaggaggaagaggaggaggaggatttcgaaggaggtgtcgaagatggtgtctctgaaacgaccacttgataagaattgtcacgcttgactagccattgccggtaaagtcactggtctattaggggcatatatatttctaaatgctgaggcctgaggcagagaagaaaatctaagggggtgcaaagaagaaatttttgggtgacatagttaattttattctttgaatgccaaagacaaaatagcagcagttaaaatttgcttagctggaaacagtgcgcacaattgcgccgccaaatctagtaatcttgtaagctaacactgtatgaaaacgtgagataataccaacatattttgctagactgatagatcaagatcaaacaaacatctatagcttacctttcatctttctgggccttggatttgggcctcttaagggcttgttcggttatttttaatccatatggattgaag

SEQ ID NO: 218984 - DNA, 2632 bp, Zea Mays
gaagaagagaaaaaaaattgtgttctcttcgaaggcagaagacctcccttttttactttacccctccaggaagcgccaaaaaaaaaaaatccatggaagggtaatggcagctcgtcccgcctgttgctgaggaaagagttctgtgacgggagaaaggcaacgattacctagtctcgtcactgtaagttggaaggccatgtctaccttcatcggcgttcttgtctccgatccagggctgcagagccagttcacccaggtgcagctcaggacccttcaaacaaagtttgcatccgcaaagcgaccaaacgcagaacatgtgaccataaaggatttgcccccgatgatggaaaagctgaggggcatccacgaagtcctgtccgaagaagagatcagcgggtttttgagcgagacctatcctgacatgaaccagcctatagaattcgagccgttcctcaaggagtacttaaatatacaagccaaagggagcagcaaatcgggaggcaagaagaagctgaaggggtccgtgtcgtttctgaaggcttccaccaccactctccttcacgtcatcaacgagtccgagaagacttcctacgtgaaccacataaacaatttcctgaaggaggatcctttcctgaagaatttcttgccgctggatccggcatccaacgagctgttcaaccttgttcgggacggcgtgctactttgcaagttgatcaacgttgctgttccgggcacgatagatgagagagcgattaacacaaagaagcatcttaatccatgggagaggaacgagaaccataccctttgtctcaactctgccaaggccattggttgcactgttgttaacattggaacacaagatctgattgaagccaggcctcatctggttcttggactgttatgccagatcataaagatacaactactggctgatctgaatctaaagaagacgcctcagttggcagagttggtggctgatgataatggcaaggaagtagaggagctggtcaccttagcaccggataagatgttgcttaaatggatgaacttccatctcaagaaagcagggtataaaaaaactgtgacaaatttctctactgatgtgaaggatggtgaagcgtatgcttaccttctcagcacccttgctccagagcttagctcaaaaaccatgatagaaacttcagatccaaaggagagggcacagaaagtacttgaaaccgcagaaaagctcgattgtacaagatatgtaacgtctaaagatattgttgaaggttccgccaatcttaacttggcattcgttgctcaaatattccagaacagaaatggtttatcaaccaacactgtggctcccgttattgaagatactcctgatgacgtggaggcatccagggaagagagagcatttcgcctatggatcaacagccttggaattccaacttatgtcaacaatttgtttgaggatgttaggactggatgggttttgctagaggttcttgacaaaatttctccagggtcagttaactggaagcatgcatccaaaccaccaatcattatgccgtttagaaaggttgaaaactgcaaccaggttatcaaaatcggcaaggagctaaacttttctctggtaaatgtagcaggaaatgatattgtgcaaggaaacaagaaactgattctagctttcctgtggcaactcatgaggactagtatcctacaattgctgaggaacttgagatcccactctaaagagaaagagatgacagatgctgacattctcatttgggctaatagcaaggtcaaggaatcaggcaaaaattcacatattgaaagcttcaaggacaaaacgatagcagatggggtgttcttccttgagctcctaagtgctgtgcagagcagggttgttgactggaacatggtgaagaagggggaggatgaggaggagaagaagctgaatgcaacatacataatcagtgttgctaggaagctaggttgcactgtcttcttgctacctgaagacataatggaggtgaacccaaagatgatcctcaccctgacagcaagcatcatgtactggagcctgcagaatcaagggccatacaagagttcaggaccacaggatgctcttctagaggaagaggaaggcgaggaggaggaagaagaagaagaagaggaggaagaggaggaggaggatttcgaaggaggtgtcgaagatggtgtctctgaaacgaccacttgataagaattgtcacgcttgactagccattgccggtaaagtcactggtctattaggggcatatatatttctaaatgctgaggcctgaggcagagaagaaaatctaagggggtgcaaagaagaaatttttgggtgacatagttaattttattctttgaatgccaaagacaaaatagcagcagttaaaatttgcttagctggaaacagtgcgcacaattgcgccgccaaatctagtaatcttgtaagctaacactgtatgaaaacgtgagataataccaacatattttgctagactgatagatcaagatcaaacaaacatctatagcttacctttcatctttctgggccttggatttgggcctcttaagggcttgttcggttatttttaatccatatggattgaag

SEQ ID NO: 218985 - DNA, 300 bp, Zea Mays
ctaccattgagacttaaaggatgcttagtgggtcaactgtagggatctttccttctacatacgacctgtgggactcgctttttggtaagtcaattatctgttaattcttctatttctgaatcctagagaaaaatggtccccaatagcttatggtttacttgaaaagttcatgaatactccggcaacagaattcaaggtgatattccagaacaatcatatctaatcgctctttcgcatgctctatatgtattcttttagggagggcaaccatctttagagtagcaattagctgaacctgcc

SEQ ID NO: 218986 - DNA, 420 bp, Zea Mays
cgccgagtagggatgccgaaaataagcggcttattatagcgacccaactcttctctctcattctatctcacgtcgcgcagcccaaagctgccatgccgccgtcgcattccgagccgcctctgttctgccttccaagccaccgctgcgccgccacttgaccattccagtcgtgccgccgccgtccgcccgccctcgaatccagtcccgcggcacccataaccaactggacggcgctgccgccctcccccagccctagcgccgtagcaggccctcccctagtcccagcgttgccatccatcgatgatccgccaccacccctccatcggacgacaccgttgctcagtagtctcaagcatggctgaatatcgtgaatggatgtacaatggttggagtaggaatgagcgtcattctgatgagtgg

SEQ ID NO: 218987 - DNA, 819 bp, Zea Mays
ctcttctctctcattctatctcacgtcgcgcagcccaaagctgccatgccgccgtcgcattccgagccgcctctgttctgccttccaagccaccgctgcgccgccacttgaccattccagtcgtgccgccgccgtccgcccgccctcgaatccagtcccgcggcacccataaccaactggacggcgctgccgccctcccccagccctagcgccgtagcaggccctcccctagtcccagcgttgccatccatcgatgatccgccaccacccctccatcggacgacaccgttgctcagtagcatgcgggagacaaaaaatgtatgaaatgcagacaatctagatttgtggaagttgttaatgatgagggtggcaaggtgatgacagatgttatacagaagcagcttcactacttgccactaactcttcgagtgaaacagttgtttctatcgaaaaacctccatgcacatgcgatggcataaagaaggtctccgtgagaacgatgagctaatggtgcacccttcatatggggatgcttgcaaggctctcgaaacgtttgatccagacattgctgctgaaccgaggagtgtttgaatcggcctcgcgaccgatggcttcacaccttttggtcaaatggcatcatcatactcatgttggcctgtctttgttattctatacaaccttccaccttctctttgtatgaagtatgaatttatatttctttgcttgatcatacctagcccagaagatctcggcaagaaactcaatgtaatgttaaaacccttgattgaagagttgaaggagctttggaaaggagtcgaa

SEQ ID NO: 218988 - DNA, 481 bp, Zea Mays
gcaatctgctatgcagagggcatgccaactaatgagctaatgaatgtagcatagaggttcctgtgttttaaatgttcaaaggcttcagcagttgcttctcaccttggctactctaataaaaaagggaactatgtgactcatctgttctggtgattggatatataatgaaaaatattctgtgaggaagacttcgcaaggagatgtggttctgtcacttatgtgactgttgccgtgtatggagacgaggacaagccagcgcttataatgtttacagagatgtggttctgtgactgttgtcgtgtactcaggctttatttcaacaggatttaaatatgagatgtagagtgattgatgtacatcacttcactaatcatgaaatctgtagaaggcgaaactactagccatatatgatatgcataatctgtgtggtaaacattatcaatatcacacaaattatttttaatgggttttgcattatcat

SEQ ID NO: 218989 - DNA, 616 bp, Zea Mays
atcatgccatcttcaaagaatggcatcatgttaacaaaaatgaatgagaaatcagtcatttctaatggaaagaatggagccgaacaagtttatgtttttatgcgacttcaagagttgacaaaggtttaagttctgagctccagaatcagaattggagagttctttctgtagctaatgaatgtagcatagaggttcctgtgttttaaatgttcaaaggcttcagcagttgcttctcaccttggctactctaataaaaaagggaactatgtgactcatctgttctggtgattggatatataatgaaaaatattctgtgaggaagacttcgcaaggagatgtggttctgtcacttatgtgactgttgccgtgtatggagacgaggacaagccagcgcttataatgtttacagagatgtggttctgtgactgttgtcgtgtactcaggctttatttcaacaggatttaaatatgagatgtagagtgattgatgtacatcacttcactaatcatgaaatctgtagaaggcgaaactactagccatatatgatatgcataatctgtgtggtaaacattatcaatatcacacaaattatttttaatgggttttgcattatcat

SEQ ID NO: 218990 - DNA, 1131 bp, Zea Mays
ctcaatcgtcatgcccccgcgcgcgtccatgccgcagcagcagccgcctccgcccccacacccgcatctgcacagcatcgggggcgtaaaaaaggaaagttgaaaatttcctccttccgtctgctaccttcttcttctccttttgagattctattataacttttgatcgtaggatctagagtagccttattaacacatgttctctgatttttgtttcggccattcaaattcttgtgctggcttaacaatatatatagagacaagttaggcgaattaattaatcaattattgttgctttcatatgatttgaaatctgactcaattttttgctttgctacattgacagtccatgtccatcagcagcaatttacagccggcaaagcccggactagctagctagaagcatttgcagcaactagcacaggcctaagggatacacgtcctggtgccccccaccacctcccattcattatccttggtcttcacctccacctacacctacatctccatctaccgaacatcagacccctccaactaccttgccgacacatgaacgagaagatgggttaggctttatcgaaaccctcttcgctagtggaggtatcgaccatcactcgtcactgtaacccgatggtgatcggcgaccgtgagcttccatgttattgtgttctaatacttgagacttttattatgactatgtatgagatattgtctcctattagtactagatgatgagatgtgtcttattatgactatggatgagacttctgtgatgtaatagttgatgagactatggatttaaatattgttatgtgattgtgtgtgagatgttttatatgaaaatatgttgtgatatatagctgttgatatatttgttatgttgtggaatgtggtgtaaaataaaaataaacaacatttgtaatgctggtcaaattaacttcctagaagcttattgggttgtaggaagttagctagctaacttccgaggggctacagtcagccgcaggaagttagccagataacttcctaggggctacagtcagccgtaggaagttatccagctaacttcctagggctacagtcagccgtaggaagttagtcagctgacggcgctgacggcgtgaagctact

SEQ ID NO: 218991 - DNA, 1012 bp, Zea Mays
aagatggcttccgactcgggaggaaactccgcctcgcccgagtttggtctcggtcaactgccctggcagtagggcataccaccaactccacgtgaatcgcgcagaagaccactccgatatgccaaggacttgaatatgacttcacagcaaagaattgagattacaaagcctgaactacttgggagcaatgaagaggccaatgtagatgctttccgagtagatggagcttttgatgttaactccaagaatgatatatctattcatgattatcttccagcaatgaaagccatatgtgataaacttgaagaagcaagtggaaaggctcttgttgtgtcagatataaaagttgatctcgactacaggatggcatatgggcacagagcatggagaaatgtattgcatagattaatagatgcacgacttgtggagatatttgatgccgaagatgatgataaggttgtccgttgtttgcgtctactgaaaaattttgatccaaatgagtttcagccaaaaagtatagcttcaaattttaaatttgttaaaaaaggtcaggcaactgatcaaattttggaacttccattagagaactgtatatatgatatgatcagtagccaagggacaaaaggtattacacttgttgagattggcaaacatcttggactcaacaattcaaaaaaacttcataaacgagtatcatccatgctaaaaaaattcaacctaacatgggaagcagaagttccagacaagacatcgcagtaccgaatttggacttcaaaaaacttctcactctacaaagctgggcaaattactcttgcttgaagaagagaaccatgacaaaccaattggacatcatatccagaacaaccgtgatgcttctgctgcagtttcccagttagttgaagaagataaacttgcttcgaatcagaggaggcgtcggtgccgtccattatcttctgatgatcaacgccatagaaggattctacacatgttaaaggttgcttcccaagtactt

SEQ ID NO: 218992 - DNA, 739 bp, Zea Mays
caccaatcgccctcgtctcctcacgccaatccaaaccctagccgtcgccaatatgcagctccatcctggtgctcgcccagatgagtcgccccgcaaggagagaacgtgactaggtctagcaggagacagagcttcctgttccatctccaccgcaatcgatcgtgccaattaacaggctcccaaggaggagatccaatcttgctagcgggcgtccccattgcccatccatcgatctgaatctgcagttaccaatcaaccactggctgaatcagctctcggcctgcccggccttatctccaccggtacaggctagtgaccaccgccgctaggagcacctcgccaggaacgtgcgtacctccctccagtgttgcttgggagtctccaaatttgtgaacgaccccaagaagtttgtatcacccactctttgagcaaatttgagaagagactgccttgaccttggtggtcggcttgtggaggattagggttggaaaagacccggccctttgtgggctcctcaacgaggagtaggatacctttgtggtgattgccgaacctcgggttaaatcgtgtgttcttgtgtgttcttgataagcactttaattggttggttagttcatattcggttatattgtgtgcaaatcgtgtgaaaacaattcacatcgatttgtcatctatttgagtggattttctctaggacaagactttagcatattctctaactacttcgtcacatttgttt

SEQ ID NO: 218993 - DNA, 1088 bp, Zea Mays
atggccgtcatctctccaaactcaactcccatgttcgaacttcgatcaaaggcagccgaccaaaaagaagaatcggagcctcccgccacgccgccgcacgcgtccgcggcggcgtccaccccggcgccggcctcgcgcaccgtctacagcgaccgcttcatccccagccgcaccggatccaacctcgcgctcttcgaccttgccccctcgccctcctccgctgcctcgtcctcgcacgacggcggccccgtggcctcgtccggatctgcgcagcccgccgcgtcgccctactgcacgctcctccgcgccgcgctcttcggccccgacacgcccgaccgcgtcgcgtcctcggccgctgcgtgctcctcgtcctcctcctcctccccggggccctcgcctgtcggcacccccgccaccgggaacatcttcagattcaagacagaggtgcgccgaaacgccaagagggcgcttttttcgggagaccaagaggaggacgcgctgttccccggcattttcaccaccaggggcgcgggaccaaggaaggtgccaaggtcgccgtacaaggtgctggatgcgcccgctttgcaggacgacttctacctcaaccttgtcgattggtcttcacataacgtccttgctgtcggtcacaagctgccagtcaaatacaaggtgcacatcacaagctgttctaatttcagccatcacatgctagatcgtttcacagacaatacaagctgccagtcaagcttggcgccaacttttgatctcgtcttggagggtgttacaccatgcatacaatcattgcaattacaagctggcgatacagtgacctttagtcgtatagatcctggagggaaacttgttatgggctttcggaaggccacaaatactgactcacagatttcagctattgcggatggttcccttctcagtgagacactcttttctactgcaaatgaaagcataggagtattgacggggatgtcagttagaataaggcaggaggcagagaagcatctttcagacatggtgaactcaaaatctctgactgcgaagatcgacaatgttgttgtctcgatagggcgccc

SEQ ID NO: 218994 - DNA, 1315 bp, Zea Mays
attagggacagacggttggtcgctaaaagttatgtaccgacagttggtcgctaaatgcatttgtagcgacgggccatcggtcgctaaaagtctagaaatttaactactcaaggttggtcgctatagagacaggtggacatccggcggttggttgctattgattgacatgtgactgttggtggctaaaaaaatttggcccgaacaggcccaactcagcaactcgtccaaatcaaaatcacttctattgaaaaaagcaaaccctaccccctcttctccccttctctcgacggcgccaccatgccgcctccgccctcaaccctagccgccagggcaacaacagtagcaccgcagggcgtaggtggcagagcagggacgcggattccgactgacacttcgtcgtcaagctctcgccatttgtaactccttgctccgccgacctcgacgcaaactacaacttctcgctcgcgcctatccaggatccgctctcgccatggttgcagggacggacccaaataggggaccaagcattcccttagagtttgcacgcttgctgatgcagtgcaagcctgcaacatgcagaggtgcgctagtgccaggtgcggcgagtcagcagatcaaggaaaccgcccgcggccgccccaggggtccaggtctcctcacggcgacgggagagcgcgagccaatgtggagcgaatgttgcatttgacaaatgactactctcaggcctgcaaactgcacattacaacgtgaagttggttattgaaagggcgcccatagctgcaaacatagctgtgaccacatgatgatgacgatttactacagcaggcacttgcaatgtcaatggagggtggtgcttcaggatctgcagctgtgactgactctgctatggcagaagctagtgcagttgaccctgacttagcgttggcttcctggtgttgatcccaatgatccatctgttaaagatttgttggcatcattgcacaaccagggagagcaagagaagaaggaagacaagtaagacaaaacagaagacgagaagaactgcttcaagctggagtgatgtcgctgtggtgcttttgtgactgatcatctctggagcttttgtgaatgatctagctagctatttgtaaatgatctagttgtgaatgatattataattgtgatacttttgtgaatatataattgtggtgcttttgtgtttatgtgatggatttatgactgtggtatactgattaactgtgtatgtctttatgatttgtgtataaaaatctgtgatttgtggtgcttaattaaatgtatattttttattaataac

SEQ ID NO: 218995 - DNA, 1288 bp, Zea Mays
caaatcaaaatcacttctattgaaaaaagcaaaccctaccccctcttctccccttctctcgacggcgccaccatgccgcctccgccctcaaccctagccgccagggcaacaacagtagcaccgcagggcgtaggtggcagagcagggacgcggattccgactgacacttcgtcgtcaagctctcgccatttgtaactccttgctccgccgacctcgacgcaaactacaacttctcgctcgcgcctatccaggatccgctctcgccatggtaccgccctttttctcggtctgtgaatccacccccatctccctgctccctcctgcatttgttgtggttcttggaagcaggttgcagggacggacccaaataggggaccaagcattcccttagagtttgcacgcttgctgatgcagtgcaagcctgcaacatgcagaggtgcgctagtgccaggtgcggcgagtcagcagatcaaggaaaccgcccgcggccgccccaggggtccaggtctcctcacggcgacgggagagcgcgagccaatgtggagcggttagttggtcgctgctgccaattgttctgcgcttataaaatttcaaggttgttacatttgaattgttattggaaatttcaaggtcagtagcagtgctcgattgatttcaagtacatgaatgttgcatttgacaaatgactactctcaggcctgcaaactgcacattacaacgtgaagttggttattgaaagggcgcccatagctgcaaacatagctgtgaccacatgatgatgacgatttactacagcaggcacttgcaatgtcaatggagggtggtgcttcaggatctgcagctgtgactgactctgctatggcagaagctagtgcagttgaccctgacttagcgttggcttcctggtgttgatcccaatgatccatctgttaaagatttgttggcatcattgcacaaccagggagagcaagagaagaaggaagacaagtaagacaaaacagaagacgagaagaactgcttcaagctggagtgatgtcgctgtggtgcttttgtgactgatcatctctggagcttttgtgaatgatctagctagctatttgtaaatgatctagttgtgaatgatattataattgtgatacttttgtgaatatataattgtggtgcttttgtgtttatgtgatggatttatgactgtggtatactgattaactgtgtatgtctttatgatttgtgtataaaaatctgtgatttgtggtgcttaattaaatgtatattttttattaataac

SEQ ID NO: 218996 - DNA, 1018 bp, Zea Mays
atcaaaatcacttctattgaaaaaagcaaaccctaccccctcttctccccttctctcgacggcgccaccatgccgcctccgccctcaaccctagccgccagggcaacaacagtagcaccgcagggcgtaggtggcagagcagggacgcggattccgactgacacttcgtcgtcaagctctcgccatttgtaactccttgctccgccgacctcgacgcaaactacaacttctcgctcgcgcctatccaggatccgctctcgccatggttgcagggacggacccaaataggggaccaagcattcccttagagtttgcacgcttgctgatgcagtgcaagcctgcaacatgcagaggtgcgctagtgccaggtgcggcgagtcagcagatcaaggaaaccgcccgcggccgccccaggggtccaggtctcctcacggcgacgggagagcgcgagccaatgtggagcgaatgttgcatttgacaaatgactactctcaggcctgcaaactgcacattacaacgtgaagttggttattgaaagggcgcccatagctgcaaacatagctgtgaccacatgatgatgacgatttactacagcaggcacttgcaatgtcaatggagggtggtgcttcaggatctgcagctgtgactgactctgctatggcagaagctagtgcagttgaccctgacttagcgttggcaagagaagaaggaagacaagtaagacaaaacagaagacgagaagaactgcttcaagctggagtgatgtcgctgtggtgcttttgtgactgatcatctctggagcttttgtgaatgatctagctagctatttgtaaatgatctagttgtgaatgatattataattgtgatacttttgtgaatatataattgtggtgcttttgtgtttatgtgatggatttatgactgtggtatactgattaactgtgtatgtctttatgatttgtgtataaaaatctgtgatttgtggtgcttaattaaatgtatattttttattaataac

SEQ ID NO: 218997 - DNA, 1228 bp, Zea Mays
atcaaaatcacttctattgaaaaaagcaaaccctaccccctcttctccccttctctcgacggcgccaccatgccgcctccgccctcaaccctagccgccagggcaacaacagtagcaccgcagggcgtaggtggcagagcagggacgcggattccgactgacacttcgtcgtcaagctctcgccatttgtaactccttgctccgccgacctcgacgcaaactacaacttctcgctcgcgcctatccaggatccgctctcgccatggttgcagggacggacccaaataggggaccaagcattcccttagagtttgcacgcttgctgatgcagtgcaagcctgcaacatgcagaggtgcgctagtgccaggtgcggcgagtcagcagatcaaggaaaccgcccgcggccgccccaggggtccaggtctcctcacggcgacgggagagcgcgagccaatgtggagcggtcagtagcagtgctcgattgatttcaagtacatggtatttcccctccgtcctaaggcatgtaattagccccaattgaaacttcttggtttatttcagtgctccagtatatttattgccagagataaaagcatatgccttgaatgttgcatttgacaaatgactactctcaggcctgcaaactgcacattacaacgtgaagttggttattgaaagggcgcccatagctgcaaacatagctgtgaccacatgatgatgacgatttactacagcaggcacttgcaatgtcaatggagggtggtgcttcaggatctgcagctgtgactgactctgctatggcagaagctagtgcagttgaccctgacttagcgttggcttcctggtgttgatcccaatgatccatctgttaaagatttgttggcatcattgcacaaccagggagagcaagagaagaaggaagacaagtaagacaaaacagaagacgagaagaactgcttcaagctggagtgatgtcgctgtggtgcttttgtgactgatcatctctggagcttttgtgaatgatctagctagctatttgtaaatgatctagttgtgaatgatattataattgtgatacttttgtgaatatataattgtggtgcttttgtgtttatgtgatggatttatgactgtggtatactgattaactgtgtatgtctttatgatttgtgtataaaaatctgtgatttgtggtgcttaattaaatgtatattttttattaataac

SEQ ID NO: 218998 - DNA, 1226 bp, Zea Mays
atcaaaatcacttctattgaaaaaagcaaaccctaccccctcttctccccttctctcgacggcgccaccatgccgcctccgccctcaaccctagccgccagggcaacaacagtagcaccgcagggcgtaggtggcagagcagggacgcggattccgactgacacttcgtcgtcaagctctcgccatttgtaactccttgctccgccgacctcgacgcaaactacaacttctcgctcgcgcctatccaggatccgctctcgccatggttgcagggacggacccaaataggggaccaagcattcccttagagtttgcacgcttgctgatgcagtgcaagcctgcaacatgcagaggtgcgctagtgccaggtgcggcgagtcagcagatcaaggaaaccgcccgcggccgccccaggggtccaggtctcctcacggcgacgggagagcgcgagccaatgtggagcggttagttggtcgctgctgccaattgttctgcgcttataaaatttcaaggttgttacatttgaattgttattggaaatttcaaggtcagtagcagtgctcgattgatttcaagtacatggtatttcccctccgtcctaagaatgttgcatttgacaaatgactactctcaggcctgcaaactgcacattacaacgtgaagttggttattgaaagggcgcccatagctgcaaacatagctgtgaccacatgatgatgacgatttactacagcaggcacttgcaatgtcaatggagggtggtgcttcaggatctgcagctgtgactgactctgctatggcagaagctagtgcagttgaccctgacttagcgttggcttcctggtgttgatcccaatgatccatctgttaaagatttgttggcatcattgcacaaccagggagagcaagagaagaaggaagacaagtaagacaaaacagaagacgagaagaactgcttcaagctggagtgatgtcgctgtggtgcttttgtgactgatcatctctggagcttttgtgaatgatctagctagctatttgtaaatgatctagttgtgaatgatattataattgtgatacttttgtgaatatataattgtggtgcttttgtgtttatgtgatggatttatgactgtggtatactgattaactgtgtatgtctttatgatttgtgtataaaaatctgtgatttgtggtgcttaattaaatgtatattttttattaataac

SEQ ID NO: 218999 - DNA, 1295 bp, Zea Mays
atcaaaatcacttctattgaaaaaagcaaaccctaccccctcttctccccttctctcgacggcgccaccatgccgcctccgccctcaaccctagccgccagggcaacaacagtagcaccgcagggcgtaggtggcagagcagggacgcggattccgactgacacttcgtcgtcaagctctcgccatttgtaactccttgctccgccgacctcgacgcaaactacaacttctcgctcgcgcctatccaggatccgctctcgccatggttgcagggacggacccaaataggggaccaagcattcccttagagtttgcacgcttgctgatgcagtgcaagcctgcaacatgcagaggtgcgctagtgccaggtgcggcgagtcagcagatcaaggaaaccgcccgcggccgccccaggggtccaggtctcctcacggcgacgggagagcgcgagccaatgtggagcggtaactttggtcttgccaatgtattgacatcagatgatcttgtgtcttctataagtatacttgaaaaatttttagtcttgcatttatttgctggtgtttcttgttaccgtattttctccaacaaaggtggtagtaacaccgagttatatgtgcctagaacttcttgctgatataccatatggtactaaatccaatatttggtctctagaatgttgcatttgacaaatgactactctcaggcctgcaaactgcacattacaacgtgaagttggttattgaaagggcgcccatagctgcaaacatagctgtgaccacatgatgatgacgatttactacagcaggcacttgcaatgtcaatggagggtggtgcttcaggatctgcagctgtgactgactctgctatggcagaagctagtgcagttgaccctgacttagcgttggcttcctggtgttgatcccaatgatccatctgttaaagatttgttggcatcattgcacaaccagggagagcaagagaagaaggaagacaagtaagacaaaacagaagacgagaagaactgcttcaagctggagtgatgtcgctgtggtgcttttgtgactgatcatctctggagcttttgtgaatgatctagctagctatttgtaaatgatctagttgtgaatgatattataattgtgatacttttgtgaatatataattgtggtgcttttgtgtttatgtgatggatttatgactgtggtatactgattaactgtgtatgtctttatgatttgtgtataaaaatctgtgatttgtggtgcttaattaaatgtatattttttattaataac

SEQ ID NO: 219000 - DNA, 1332 bp, Zea Mays
atcaaaatcacttctattgaaaaaagcaaaccctaccccctcttctccccttctctcgacggcgccaccatgccgcctccgccctcaaccctagccgccagggcaacaacagtagcaccgcagggcgtaggtggcagagcagggacgcggattccgactgacacttcgtcgtcaagctctcgccatttgtaactccttgctccgccgacctcgacgcaaactacaacttctcgctcgcgcctatccaggatccgctctcgccatggttgcagggacggacccaaataggggaccaagcattcccttagagtttgcacgcttgctgatgcagtgcaagcctgcaacatgcagaggtgcgctagtgccaggtgcggcgagtcagcagatcaaggaaaccgcccgcggccgccccaggggtccaggtctcctcacggcgacgggagagcgcgagccaatgtggagcggttagttggtcgctgctgccaattgttctgcgcttataaaatttcaaggttgttacatttgaattgttattggaaatttcaaggtcagtagcagtgctcgattgatttcaagtacatggtatttcccctccgtcctaaggcatgtaattagccccaattgaaacttcttggtttatttcagtgctccagtatatttattgccagagataaaagcatatgccttggtcagtgacttaagcttagaaaaagtacaatactttatgtatgaattcagaaatcccaatgatattcattctgaatatgtgcaaatgcagaatgttgcatttgacaaatgactactctcaggcctgcaaactgcacattacaacgtgaagttggttattgaaagggcgcccatagctgcaaacatagctgtgaccacatgatgatgacgatttactacagcaggcacttgcaatgtcaatggagggtggtgcttcaggatctgcagctgtgactgactctgctatggcagaagctagtgcagttgaccctgacttagcgttggcaagagaagaaggaagacaagtaagacaaaacagaagacgagaagaactgcttcaagctggagtgatgtcgctgtggtgcttttgtgactgatcatctctggagcttttgtgaatgatctagctagctatttgtaaatgatctagttgtgaatgatattataattgtgatacttttgtgaatatataattgtggtgcttttgtgtttatgtgatggatttatgactgtggtatactgattaactgtgtatgtctttatgatttgtgtataaaaatctgtgatttgtggtgcttaattaaatgtatattttttattaataac

SEQ ID NO: 219001 - DNA, 704 bp, Zea Mays
aatctaacctaacaacctaacaaggcatcagctatcaatccagtattccagatttccagcgccgcttccttttctccatcgtgctctcctccgcctccggtcaccattaacctagccgccactctcctcggtgcggcggagcccgcctgcccggatcccggacaccggggcgacctcaagtgttccacatgcatcatgggacacgacgctcaccgctcgctatcgctggcggactacggacgactggagctggatttctgtggagaagtggattgctgactgctgtggagaatttcggactttgaagcctgaagtgtgaagtctgaaccatctgtgaagtccgaactgtatttttcttgtggatttgtgatgcaatgcaatggcacttggcggctgtcactggcaggcagcagcagcaccgcagcaggcttaatgccttgcagctttgcacttttgtatcttgtcgtcgtcgagtactcagtacattagtgtagtagtaggtagtacctgtcggctgtattggttcttgaattctcgctcctctgcataagcatgtttggagcaaagatgggggcagagttagcaaatatgcttgttatgtatgaagtagcataaatcaggctatagacactagagaagaggctggtattttattttatttccttatatcttgtatatcaaattcctattcttttgtgtttgta

SEQ ID NO: 219002 - DNA, 809 bp, Zea Mays
agcagaggcacacgaatcgccgttgcctccgccgtccgcctccttctccaagcaaacggaactgaaaagaaaaggtcccgccccggcggcggcacccgactctccatccaccgctcgcctccccttgcccctcctctcgtctactcgtcaccctacgctcggctccatcctccccgcctccccacgtgtcctcccgctacatgggagcgcgggctccctagggtgcctcgaccaccgccgccgccatgttcgagggggtggtaagccaggtgctctatggcctcctccgccgctacgtcaagggcatccagaaggagcagcttaagatcggcatctggaaggaagaaatactgcttgaaaatgtagagctgattctggaagcctttgactacctgcagctgccattcgcgctgaaaaatggacgaattgggaagctaagcatccggattccttggaaaaagctaggatgggaccctatcattattgtcatagaagatgtctatgtttgcgcatgcccaagggaggactctgagtggagctcagattctctggacaagagggaactagctggaaagttggctaaacttaatgccattgagcttgctaaattttctagaagagttacagataatcaaacgggacaatcatttttgtcctacatatcagcaaagatactggatagtatccaagtttctatgcgaaatgttcatattgtatacatggatacccacaacggtcaagttaccatgaaggtggtcaaaagtttttcaagctcatttttcattgatgtcacaatgactggaatttaa

SEQ ID NO: 219003 - DNA, 801 bp, Zea Mays
cgagcattggattatcggatatgctgctctgctcgacgatgaacaacctcggtgggggcaggtggactgtgtcggtgtcacgaaaacaatgctgcgactgcgaccgaacctgagatgagatgctttgaattcgtaaataaaccgagacgaactataatttggaacggaccacgtgagctaggaaaaggatgaacgggaaactttttgttttttacgctccaggccggacacggacagccgaccggccgtgaaccttgacgatcggctcggcggcgaggggagctcgatccgacccgagcgcacgcgctggacgtacgacgacgagcaccgtacgctcggctcagttgtggttccacgacgggccggacggcggggtgtgagcgcggccgccgaccgtcgtactcgctgcccggtggcggtgaccgccgtcctgcgcccgcgcaacagtagcggcgccaccgttactcgccccctcgcgcaccggcctgatggcgccgccgcacggcgcgcggaggagcacgagcacgaggagcgcggcgacgagtgccacggcccgctgcggcgggacgcgcagcggcgacgacgacggcgaagaggcttccgccatggcgtacgagcgagcgacgaacggtgtgatgggccggcccggcgggtagtcgagcgaaagtaaagggtcgggaccggagctgggcggctggccgggcgccgctgccagcggtgagtgggtggagatggtcgagaggtggatggagtatggaccggttctcgggtgccctgttggttggcagagttagagtgtgc

SEQ ID NO: 219004 - DNA, 2865 bp, Zea Mays
cgcggtttcgttagcacaaaaatgtggggctgggttgcatgttgggcacccccttggatacacggcaactgacattctgtcaagattcaagcgcatgaaaggcttcaacgttttgcatccaatgggatgggatgcatttggtcttcctgctgagcagtatgctattcagacgggaacccaccctaagattaccactgaaagaaacattgagcgctttcgcacacagcttaaatcgttgggtttttcatatgattgggatcgtgaaatctccacgacagagccgggttattataaatggacacaatggattttccttcaactgttaaagagaggacttgcttatcaggctggcattgatatcttacaatcaggctgaggtacctgtcaattggtgccctgctcttggaactgtcctggcgaatgaagaagtagtagatggtgtgagcgaacgtggtggctatcctgttatacgaaagccaatgcgccagtggatgctaaggataacatcttatgctgatcgtcttcttgaagatttgaatgatcttgattggcccgagagtatcaaggaaatgcaaagaaactggatagggagatcaaaaggtgctgagcttattttttctgcagttgaccaggaaggacatgacctgggtgccactttattggtttacacaacgaggcctgacacgatttttggtgcaacatatcttgttgtggcacctgagcatgttttactgtcatctctaacatctgaggaacaacgagcacatgtagaggaatacagagaactttcagcaagaaagagtgaactagaaaggactgaacttcagaaggaaaaaactggggttttcagtggttcttatgctaagaacccagcaaccggggaaatcattccaatatgggtggcagattatgttctaggaagctatggcactggggctatcatggcagtgcctgcacatgattctcgcgaccatgaatttgctgtgaaatatgaacttccaatcattaaggttgtaagtccaccgaatggtaattgtgatccagtggaggcatatgaagatgatggcatcatgattaattcatctagttcttcatctggactgaatattaacggaatgctttcccaagatgctgctaagaaagttactgagtggatagagaataatggttttggaaagaaaaaggtaaactacaagcttcgagattggctttttgccagacagcgctattggggtgaacctttccctgtgagctaccttgatgataccaatgaaatggttcctcttacagaagatgacttgcccttgacccttcctgaattggatgatttcactccaactggtactggggagccacctttgaccaaagcaacaaattgggttagaaccattgacccttcatctgggaagcctgcgagaagagaaacaagcaccatgccacaatgggctggatcttgctggtactatttgaggttcatggatcccaaaaactgcagtatattggttgataaggctaaagaaaggtattggggtccagttgacatctacgttggtggtgctgaacattctgtcttgcacttgctttatgcaagattttggcacaaggttctttatgacatgggtgtagtctccactaaagagcccttcaagtgcctgataaatcaaggattgatactaggagaaattgagtatactgcatatagagacaatgaaggcagatgggtttctgcagactcagactcaagtttgattgattgctaccaagaaaaagtagctccagacaaggttacaaaagttggagatcattatgttctgaaggataatccaaacattcgtctgaatgctcgtgcctacaagatgagtaaaagtcgagggaatgtcatcaaccctgatgatgttgtttcagaatatggcgctgattctcttcgcttgtacgaaatgttcatggggccattgagagattcaaagacatggagcactgggggaatcgaaggtgtgcaccgcttccttggacgaacgtggagactcatagttggtccacaattatctgatggatcatataatgatggaaccatgactaccgaagatgaaccaaccttggatcagcttcgagttcttcacagatgtattgcaagggtcacggaggaaattcaggaaacaagatttaacactgcaatatctgcaatgatggagtttgtgaatgctgcatacaagtgggaaacccagccaaaatctgttattgaatcctttgttctgctgctttcacccttcgcgccacacttggctgaggagctttggtttcgcctcggacatccacaatcattggcctatgaacagtttccagaggcaaaaagtgagtacctggaggaatcaaagcttgtactccctgtccaaatcaatggaaagaccaggggtacaatccttgttgacaaagcgtgctctgaggatgatgtttttcaaattgcagcctcggatgagaaactctccaaatatcttgatgggaaaggcatcaggaagaaaatttatgtgcctggaaggatcttgaatgttatcttagatcaacaaaagtcaaggacctgataattgctcttgtttgtccatttatctcgttatgagtcaggaatagagatcaataagacatgacagatctgtaaatttgttttttagcacttgcagtttactgtcaatttgccaacaacaacaacgtcgaacactcgttaggttaatgttaaaatccaacagaaaccgtcagtcaaggttaagcatatggatagttatttttatgcactctttggggtatttgaaactgctctaggttccagcttcagtgtggagctgtagtttacaatacagatttaaatagttt

SEQ ID NO: 219005 - DNA, 3517 bp, Zea Mays
cgacgatggccttggcgctgcaatggcccctccaattcccactccagctccaggcgcggcctcccgccgttaccgcgggccatcaccgtcgccgccaccgagtcctcgccgtctgccgctccccgccgctcccagctcgctgttgtgccagcgccgccgctgcggccgacacggggaaggcgcagacagcggcgaggagggcttacccattcgatgagatcgagccgaggtggcagcggcactgggaggagcaccgcacgttccgcaccctggacatcggcgaggggctcgacacctccaagcccaagtgctacatcctcgacatgttcccctaccccagtggggctgggttgcatgttgggcacccccttggatacacggcaactgacattctgtcaagattcaagcgcatgaaaggcttcaacgttttgcatccaatgggatgggatgcatttggtcttcctgctgagcagtatgctattcagacgggaacccaccctaagattaccactgaaagaaacattgagcgctttcgcacacagcttaaatcgttgggtttttcatatgattgggatcgtgaaatctccacgacagagccgggttattataaatggacacaatggattttccttcaactgttaaagagaggacttgcttatcaggctggcattgatatcttacaatcaggctgaggtacctgtcaattggtgccctgctcttggaactgtcctggcgaatgaagaagtagtagatggtgtgagcgaacgtggtggctatcctgttatacgaaagccaatgcgccagtggatgctaaggataacatcttatgctgatcgtcttcttgaagatttgaatgatcttgattggcccgagagtatcaaggaaatgcaaagaaactggatagggagatcaaaaggtgctgagcttattttttctgcagttgaccaggaaggacatgacctgggtgccactttattggtttacacaacgaggcctgacacgatttttggtgcaacatatcttgttgtggcacctgagcatgttttactgtcatctctaacatctgaggaacaacgagcacatgtatgttccttttccttaatatcataaaaaatgaagtatactatggactaatcagaagtggcaggtagaggaatacagagaactttcagcaagaaagagtgaactagaaaggactgaacttcagaaggaaaaaactggggttttcagtggttcttatgctaagaacccagcaaccggggaaatcattccaatatgggtggcagattatgttctaggaagctatggcactggggctatcatggcagtgcctgcacatgattctcgcgaccatgaatttgctgtgaaatatgaacttccaatcattaaggttgtaagtccaccgaatggtaattgtgatccagtggaggcatatgaagatgatggcatcatgattaattcatctagttcttcatctggactgaatattaacggaatgctttcccaagatgctgctaagaaagttactgagtggatagagaataatggttttggaaagaaaaaggtaaactacaagcttcgagattggctttttgccagacagcgctattggggtgaacctttccctgtgagctaccttgatgataccaatgaaatggttcctcttacagaagatgacttgcccttgacccttcctgaattggatgatttcactccaactggtactggggagccacctttgaccaaagcaacaaattgggttagaaccattgacccttcatctgggaagcctgcgagaagagaaacaagcaccatgccacaatgggctggatcttgctggtactatttgaggttcatggatcccaaaaactgcagtatattggttgataaggctaaagaaaggtattggggtccagttgacatctacgttggtggtgctgaacattctgtcttgcacttgctttatgcaagattttggcacaaggttctttatgacatgggtgtagtctccactaaagagcccttcaagtgcctgataaatcaaggattgatactaggagaaattgagtatactgcatatagagacaatgaaggcagatgggtttctgcagactcagactcaagtttgattgattgctaccaagaaaaagtagctccagacaaggttacaaaagttggagatcattatgttctgaaggataatccaaacattcgtctgaatgctcgtgcctacaagatgagtaaaagtcgagggaatgtcatcaaccctgatgatgttgtttcagaatatggcgctgattctcttcgcttgtacgaaatgttcatggggccattgagagattcaaagacatggagcactgggggaatcgaaggtgtgcaccgcttccttggacgaacgtggagactcatagttggtccacaattatctgatggatcatataatgatggaaccatgactaccgaagatgaaccaaccttggatcagcttcgagttcttcacagatgtattgcaagggtcacggaggaaattcaggaaacaagatttaacactgcaatatctgcaatgatggagtttgtgaatgctgcatacaaggtgaaaccaaacttatcttaatttctctagcaatattagaatttataaatattggatttgacaagtgtaagtaaaattaatatcctcatcatcaagtacttccattatgctctattcctttttacacaagggaattactagtcaacattggctctattggatcttgccatgtccaaaatgacatgcatttatacatagagggagctaactagctaaggtcgtatattccatggtttacgcaagaacaggatgtgactcttattttctttcagtgggaaacccagccaaaatctgttattgaatcctttgttctgctgctttcacccttcgcgccacacttggctgaggagctttggtttcgcctcggacatccacaatcattggcctatgaacagtttccagaggcaaaaagtgagtacctggaggaatcaaagcttgtactccctgtccaaatcaatggaaagaccaggggtacaatccttgttgacaaagcgtgctctgaggatgatgtttttcaaattgcagcctcggatgagaaactctccaaatatcttgatgggaaaggcatcaggaagaaaatttatgtgcctggaaggatcttgaatgttatcttagatcaacaaaagtcaaggacctgataattgctcttgtttgtccatttatctcgttatgagtcaggaatagagatcaataagacatgacagatctgtaaatttgttttttagcacttgcagtttactgtcaatttgccaacaacaacaacgtcgaacactcgttaggttaatgttaaaatccaacagaaaccgtcagtcaaggttaagcatatggatagttatttttatgcactctttggggtatttgaaactgctctaggttccagcttcagtgtggagctgtagtttacaatacagatttaaatagttt

SEQ ID NO: 219006 - DNA, 3201 bp, Zea Mays
catttggccagcaggctgggacgctcagctcccgctcccggacgacgacgatggccttggcgctgcaatggcccctccaattcccactccagctccaggcgcggcctcccgccgttaccgcgggccatcaccgtcgccgccaccgagtcctcgccgtctgccgctccccgccgctcccagctcgctgttgtgccagcgccgccgctgcggccgacacggggaaggcgcagacagcggcgaggagggcttacccattcgatgagatcgagccgaggtggcagcggcactgggaggagcaccgcacgttccgcaccctggacatcggcgaggggctcgacacctccaagcccaagtgctacatcctcgacatgttcccctaccccagtggggctgggttgcatgttgggcacccccttggatacacggcaactgacattctgtcaagattcaagcgcatgaaaggcttcaacgttttgcatccaatgggatgggatgcatttggtcttcctgctgagcagtatgctattcagacgggaacccaccctaagattaccactgaaagaaacattgagcgctttcgcacacagcttaaatcgttgggtttttcatatgattgggatcgtgaaatctccacgacagagccgggttattataaatggacacaatggattttccttcaactgttaaagagaggacttgcttatcaggctgaggtacctgtcaattggtgccctgctcttggaactgtcctggcgaatgaagaagtagtagatggtgtgagcgaacgtggtggctatcctgttatacgaaagccaatgcgccagtggatgctaaggataacatcttatgctgatcgtcttcttgaagatttgaatgatcttgattggcccgagagtatcaaggaaatgcaaagaaactggatagggagatcaaaaggtgctgagcttattttttctgcagttgaccaggaaggacatgacctgggtgccactttattggtttacacaacgaggcctgacacgatttttggtgcaacatatcttgttgtggcacctgagcatgttttactgtcatctctaacatctgaggaacaacgagcacatgtagaggaatacagagaactttcagcaagaaagagtgaactagaaaggactgaacttcagaaggaaaaaactggggttttcagtggttcttatgctaagaacccagcaaccggggaaatcattccaatatgggtggcagattatgttctaggaagctatggcactggggctatcatggcagtgcctgcacatgattctcgcgaccatgaatttgctgtgaaatatgaacttccaatcattaaggttgtaagtccaccgaatggtaattgtgatccagtggaggcatatgaagatgatggcatcatgattaattcatctagttcttcatctggactgaatattaacggaatgctttcccaagatgctgctaagaaagttactgagtggatagagaataatggttttggaaagaaaaaggtaaactacaagcttcgagattggctttttgccagacagcgctattggggtgaacctttccctgtgagctaccttgatgataccaatgaaatggttcctcttacagaagatgacttgcccttgacccttcctgaattggatgatttcactccaactggtactggggagccacctttgaccaaagcaacaaattgggttagaaccattgacccttcatctgggaagcctgcgagaagagaaacaagcaccatgccacaatgggctggatcttgctggtactatttgaggttcatggatcccaaaaactgcagtatattggttgataaggctaaagaaaggtattggggtccagttgacatctacgttggtggtgctgaacattctgtcttgcacttgctttatgcaagattttggcacaaggttctttatgacatgggtgtagtctccactaaagagcccttcaagtgcctgataaatcaaggattgatactaggagaaattgagtatactgcatatagagacaatgaaggcagatgggtttctgcagactcagactcaagtttgattgattgctaccaagaaaaagtagctccagacaaggttacaaaagttggagatcattatgttctgaaggataatccaaacattcgtctgaatgctcgtgcctacaagatgagtaaaagtcgagggaatgtcatcaaccctgatgatgttgtttcagaatatggcgctgattctcttcgcttgtacgaaatgttcatggggccattgagagattcaaagacatggagcactgggggaatcgaaggtgtgcaccgcttccttggacgaacgtggagactcatagttggtccacaattatctgatggatcatataatgatggaaccatgactaccgaagatgaaccaaccttggatcagcttcgagttcttcacagatgtattgcaagggtcacggaggaaattcaggaaacaagatttaacactgcaatatctgcaatgatggagtttgtgaatgctgcatacaagtgggaaacccagccaaaatctgttattgaatcctttgttctgctgctttcacccttcgcgccacacttggctgaggagctttggtttcgcctcggacatccacaatcattggcctatgaacagtttccagaggcaaaaagtgagtacctggaggaatcaaagcttgtactccctgtccaaatcaatggaaagaccaggggtacaatccttgttgacaaagcgtgctctgaggatgatgtttttcaaattgcagcctcggatgagaaactctccaaatatcttgatgggaaaggcatcaggaagaaaatttatgtgcctggaaggatcttgaatgttatcttagatcaacaaaagtcaaggacctgataattgctcttgtttgtccatttatctcgttatgagtcaggaatagagatcaataagacatgacagatctgtaaatttgttttttagcacttgcagtttactgtcaatttgccaacaacaacaacgtcgaacactcgttaggttaatgttaaaatccaacagaaaccgtcagtcaaggttaagcatatggatagttatttttatgcactctttggggtatttgaaactgctctaggttccagcttcagtgtggagctgtagtttacaatacagatttaaatagttt

SEQ ID NO: 219007 - DNA, 3236 bp, Zea Mays
cagggctatacatttggccagcaggctgggacgctcagctcccgctcccggacgacgacgatggccttggcgctgcaatggcccctccaattcccactccagctccaggcgcggcctcccgccgttaccgcgggccatcaccgtcgccgccaccgagtcctcgccgtctgccgctccccgccgctcccagctcgctgttgtgccagcgccgccgctgcggccgacacggggaaggcgcagacagcggcgaggagggcttacccattcgatgagatcgagccgaggtggcagcggcactgggaggagcaccgcacgttccgcaccctggacatcggcgaggggctcgacacctccaagcccaagtgctacatcctcgacatgttcccctaccccagtggggctgggttgcatgttgggcacccccttggatacacggcaactgacattctgtcaagattcaagcgcatgaaaggcttcaacgttttgcatccaatgggatgggatgcatttggtcttcctgctgagcagtatgctattcagacgggaacccaccctaagattaccactgaaagaaacattgagcgctttcgcacacagcttaaatcgttgggtttttcatatgattgggatcgtgaaatctccacgacagagccgggttattataaatggacacaatggattttccttcaactgttaaagagaggacttgcttatcaggctggcattgatatcttacaatcaggctgaggtacctgtcaattggtgccctgctcttggaactgtcctggcgaatgaagaagtagtagatggtgtgagcgaacgtggtggctatcctgttatacgaaagccaatgcgccagtggatgctaaggataacatcttatgctgatcgtcttcttgaagatttgaatgatcttgattggcccgagagtatcaaggaaatgcaaagaaactggatagggagatcaaaaggtgctgagcttattttttctgcagttgaccaggaaggacatgacctgggtgccactttattggtttacacaacgaggcctgacacgatttttggtgcaacatatcttgttgtggcacctgagcatgttttactgtcatctctaacatctgaggaacaacgagcacatgtagaggaatacagagaactttcagcaagaaagagtgaactagaaaggactgaacttcagaaggaaaaaactggggttttcagtggttcttatgctaagaacccagcaaccggggaaatcattccaatatgggtggcagattatgttctaggaagctatggcactggggctatcatggcagtgcctgcacatgattctcgcgaccatgaatttgctgtgaaatatgaacttccaatcattaaggttgtaagtccaccgaatggtaattgtgatccagtggaggcatatgaagatgatggcatcatgattaattcatctagttcttcatctggactgaatattaacggaatgctttcccaagatgctgctaagaaagttactgagtggatagagaataatggttttggaaagaaaaaggtaaactacaagcttcgagattggctttttgccagacagcgctattggggtgaacctttccctgtgagctaccttgatgataccaatgaaatggttcctcttacagaagatgacttgcccttgacccttcctgaattggatgatttcactccaactggtactggggagccacctttgaccaaagcaacaaattgggttagaaccattgacccttcatctgggaagcctgcgagaagagaaacaagcaccatgccacaatgggctggatcttgctggtactatttgaggttcatggatcccaaaaactgcagtatattggttgataaggctaaagaaaggtattggggtccagttgacatctacgttggtggtgctgaacattctgtcttgcacttgctttatgcaagattttggcacaaggttctttatgacatgggtgtagtctccactaaagagcccttcaagtgcctgataaatcaaggattgatactaggagaaattgagtatactgcatatagagacaatgaaggcagatgggtttctgcagactcagactcaagtttgattgattgctaccaagaaaaagtagctccagacaaggttacaaaagttggagatcattatgttctgaaggataatccaaacattcgtctgaatgctcgtgcctacaagatgagtaaaagtcgagggaatgtcatcaaccctgatgatgttgtttcagaatatggcgctgattctcttcgcttgtacgaaatgttcatggggccattgagagattcaaagacatggagcactgggggaatcgaaggtgtgcaccgcttccttggacgaacgtggagactcatagttggtccacaattatctgatggatcatataatgatggaaccatgactaccgaagatgaaccaaccttggatcagcttcgagttcttcacagatgtattgcaagggtcacggaggaaattcaggaaacaagatttaacactgcaatatctgcaatgatggagtttgtgaatgctgcatacaagtgggaaacccagccaaaatctgttattgaatcctttgttctgctgctttcacccttcgcgccacacttggctgaggagctttggtttcgcctcggacatccacaatcattggcctatgaacagtttccagaggcaaaaagtgagtacctggaggaatcaaagcttgtactccctgtccaaatcaatggaaagaccaggggtacaatccttgttgacaaagcgtgctctgaggatgatgtttttcaaattgcagcctcggatgagaaactctccaaatatcttgatgggaaaggcatcaggaagaaaatttatgtgcctggaaggatcttgaatgttatcttagatcaacaaaagtcaaggacctgataattgctcttgtttgtccatttatctcgttatgagtcaggaatagagatcaataagacatgacagatctgtaaatttgttttttagcacttgcagtttactgtcaatttgccaacaacaacaacgtcgaacactcgttaggttaatgttaaaatccaacagaaaccgtcagtcaaggttaagcatatggatagttatttttatgcactctttggggtatttgaaactgctctaggttccagcttcagtgtggagctgtagtttacaatacagatttaaatagttt

SEQ ID NO: 219008 - DNA, 296 bp, Zea Mays
cccaaccataccagccataatcgcggctaggggatcgggcgcaccattgtcataaagcaagggtgaggggcgcgtccgtggaagcgcacatccgtcgacatagtggtccagcgaggtgtcagacggaagcgggggaccaagccggagatcttcatcgcccaattgtgccgctggggtgactggagcatggtgaatcgctcgccggtgacgcttcgccgccacgatgcgtgggcagagacttccgcggcataacccacctttgctatgcttgcagagaaggaagtgcagggacgata

SEQ ID NO: 219009 - DNA, 599 bp, Zea Mays
gcttagactaccagagcctacccattatcgcgaggaaggagggagcagggggtgatcgggcggccaccgtggagagtcaccgccaccgtcgtcacgctccctgcgaattgccttgagtgttagtcatggtctgtggcacctgggcaaaggatcttcaagcgataggaaccctgataccccgggtaatttttcatcggagggcaccagcaccttgagccccgtgctgcgccgtaattcgcgcgtccgtcgccccaactccggtgaagagcaggtagcccaagaggaggtctactatgaggagtacgagcttgtctaggtggcgtctcctagtcagctttatggcaccaaggaataattattagttcgctttattgttatcatttatttttgtaaaacacttctgcaatgtaataatgtttgtgatatttatctctatacacttagtcattatatgtgttgttcttatttggcgcacatatgagacgcacccggctttaccccttaaatccgggcgtgacaacaatgtcaaatacaacttgctctgttctggtgttgtccacatagccgaaggtaattagcattgttatctttccaagtgc

SEQ ID NO: 219010 - DNA, 2460 bp, Zea Mays
gtccggtgatggttatcaccatggccatcgtggtggctcactgggcctataaattcaccacgctctcttcccccttcatccaaatcaatcgagcacagctcttcgtcccttcgttgcgaagccaacgaatcactagtcactctattctgtccaccaccctcagtgatcatcggagttcccttgaatcgatttcttccgccgccgtgaagaacccctccgtggccagcactcctcgggacttggagaacgccgtggcgccgtcggtgaacaccgtctggaatgacctcaccatggcggacctagtctggagctggttgcgagcacgctcatgggttgttccgcttcgtggtgagccactgatgctacccagttgctgattggaactctactgcgtcgtgttccgtgttgttgttgccggagtttggcgttgcagccagcgcgcagagggagcgcgaagctggagcctaaagccaactgaattgtgaagagggagcttgttccagtgttgttgattcagtggtgaactccatctaactacttatcataatagaagatctcagatctcctcctgtaataaggcaagccccggtgcatttgccccttccttgcgttttaaatgctttatcacctgatatgatgcattaggtgataggagttgtgtgataaacaattgatgcattatcattccttgaaaattcctaaatccctgttttataaaaagaattattactgcttagtgctgcttagaaactcaaaaatcatttgtttttcaaaagaatgatgtgtaacattggttatgggcttttgattcaaaagtgaaagcaaacttatgatgatgagtccatcagggctccggatgggttcatcatccgaaaagagtacccctaccgggtaccaaaaatggggaaatggtttgaataaatcgagaccagacgctgagctgacatggtcgcccgtttgtgttgattaaggaccgtaccgttgactggcctgttgtggttgagactttgcaactagccacatacactggtatgggacagggtaagcttgaacctggctattccatacgtgaagagacaatcgcgcactgggagtggagagatggcgggagtagcatgtaccctcctggcatagtagcacgcctggtagggtaatgtgctctcgggtggcgcagacctattcatgtagtggaggactccgtgggaatggttgacatatgcaagggttaaatgctacatatgtcgtgtgattagagatccccagctgggtataatcagttcgaatcgtcgttgctcctcggttatggagactcatcctggtgaccatcatcgtagttagtaagtgaaatatgagaatgaataaaatgcgactattataggccaagtgcttgaactagaccagacaaatatagattcaagtaataacctaactagtgaaataaaatttggcttaaggatcaactggaaccaagcttttctgcaaaaaagagtctttgatcattgataaaatttaccttgattcccaatcagctagcatacccttgagagtcttttctttagtcgggtaagtcttgctgagtaattgcgtactcagggttttatcccctgttgtttttgcaggagaagttttattcccttatcttttggttagttacttcatgtggaggccttgaagcttagaatgtttatgtgtatctcttatggaaaggcttcacccttccaattattataataagttatgcactttgggtactatcaggacttgtaataattacaattcttcttatgttgtaaaacttgagctttggaaatgtaaaatatgttttgtaaagtcttccgctctatctccgaagtgtttgtatcgagtgtgattactgtaatatgcatgaatgtgggagatccttgggataatgagttcgagttgttgaactcgtgatagccttgttaagttacccagtacacgtgcatagacatctgaggccgttaatgacaagggttggtgcatgtgggcctgataacttgggagggttgtcacagcgtggtatcggagcgatcccccattagcatggatattaaagtaatcatttgataaacttcaaaacgattttgagtctaaatgatttttacaaacttaagaatctataatcaaggcctgatagtagaagtgtaaatagtatgtggttaaaactaaggactattaggtggcttagtttaagatgataaccactaacccacaacctgggaagggtaatgtatacatgtgtaatgttatttttagtgccattcaattttgaatggatcgacactcaggtaaggtgagatgtgagagcatgaccgaacaaacatcggtctaggggagtgcttaaatgtggcactggactatatacatgttacacatatgtatatatgaaggttgcgatgtggagtaattactttactgggattcagtaccccgtgaatg

SEQ ID NO: 219011 - DNA, 2252 bp, Zea Mays
gccgatgtcatcattggtcgccagcaaggtccggtgatggttatcaccatggccatcgtggtggctcactgggcctataaattcaccacgctctcttcccccttcatccaaatcaatcgagcacagctcttcgtcccttcgttgcgaagccaacgaatcactagtcactctattctgtccaccaccctcagtgatcatcggagttcccttgaatcgatttcttccgccgccgtgaagaacccctccgtggccagcactcctcggaactgaattgtgaagagggagcttgttccagtgttgttgattcagtggtgaactccatctaactacttatcataatagaagatctcagatctcctcctgtaataaggcaagccccggtgcatttgccccttccttgcgttttaaatgctttatcacctgatatgatgcattaggtgataggagttgtgtgataaacaattgatgcattatcattccttgaaaattcctaaatccctgttttataaaaagaattattactgcttagtgctgcttagaaactcaaaaatcatttgtttttcaaaagaatgatgtgtaacattggttatgggcttttgattcaaaagtgaaagcaaacttatgatgatgagtccatcagggctccggatgggttcatcatccgaaaagagtacccctaccgggtaccaaaaatggggaaatggtttgaataaatcgagaccagacgctgagctgacatggtcgcccgtttgtgttgattaaggaccgtaccgttgactggcctgttgtggttgagactttgcaactagccacatacactggtatgggacagggtaagcttgaacctggctattccatacgtgaagagacaatcgcgcactgggagtggagagatggcgggagtagcatgtaccctcctggcatagtagcacgcctggtagggtaatgtgctctcgggtggcgcagacctattcatgtagtggaggactccgtgggaatggttgacatatgcaagggttaaatgctacatatgtcgtgtgattagagatccccagctgggtataatcagttcgaatcgtcgttgctcctcggttatggagactcatcctggtgaccatcatcgtagttagtaagtgaaatatgagaatgaataaaatgcgactattataggccaagtgcttgaactagaccagacaaatatagattcaagtaataacctaactagtgaaataaaatttggcttaaggatcaactggaaccaagcttttctgcaaaaaagagtctttgatcattgataaaatttaccttgattcccaatcagctagcatacccttgagagtcttttctttagtcgggtaagtcttgctgagtaattgcgtactcagggttttatcccctgttgtttttgcaggagaagttttattcccttatcttttggttagttacttcatgtggaggccttgaagcttagaatgtttatgtgtatctcttatggaaaggcttcacccttccaattattataataagttatgcactttgggtactatcaggacttgtaataattacaattcttcttatgttgtaaaacttgagctttggaaatgtaaaatatgttttgtaaagtcttccgctctatctccgaagtgtttgtatcgagtgtgattactgtaatatgcatgaatgtgggagatccttgggataatgagttcgagttgttgaactcgtgatagccttgttaagttacccagtacacgtgcatagacatctgaggccgttaatgacaagggttggtgcatgtgggcctgataacttgggagggttgtcacagcgtggtatcggagcgatcccccattagcatggatattaaagtaatcatttgataaacttcaaaacgattttgagtctaaatgatttttacaaacttaagaatctataatcaaggcctgatagtagaagtgtaaatagtatgtggttaaaactaaggactattaggtggcttagtttaagatgataaccactaacccacaacctgggaagggtaatgtatacatgtgtaatgttatttttagtgccattcaattttgaatggatcgacactcaggtaaggtgagatgtgagagcatgaccgaacaaacatcggtctaggggagtgcttaaatgtggcactggactatatacatgttacacatatgtatatatgaaggttgcgatgtggagtaattactttactgggattcagtaccccgtgaatg

SEQ ID NO: 219012 - DNA, 4060 bp, Zea Mays
cccatctccagtcgagtgctctctccagtccccacgcccgatctcgcccccatcccatggacgccgatgagatggacctcgactccccatcctcggcctcccccgcgcccgcctccggctccctccccaccgtcctctctgagctcgccgccctccaccgccgcgcgtcttcctcctccgtcacctccccgcccttgtccctgccctccatcacattcctctcctccagccccgcagccgtcgcgtccatcttccctcgcctcgccgaggccggcgtccccgcatcctccttgctgcccccgctcgaggcctcgctctccgcgcacccgctccccgcagccgtcgcctacctccgcctcctcctcgccccggcctccccgcttctcaccctcttctccccgcttccattcctctccctcctcctcgtcatccgcaaggccgcctcctccttctccggagccggcagcgccgcctccaaccctagctccgtttccggcggcgccgccaacccccgcaagcgcaagaaccagcgccaaaagccagcagcggctccgccggcggcgccgtcgctgctcccgaaggcgctctccctgctggcggacgccgcggggaggctgccgctcggggcccacccggacgcgcggcggtcgctcgtcgataccgccgcggagctcacggcgtttgacgtcctcaccgctgtccttggatccgactaccacgccggggcggtgcaggacgtgatacgagcgctggcccctgtggtgctctcggccgcgaaatccgcagcacgggtggctgcggtgcagttcattgtgaggaacttggtgcctttgggcgccgaggaaggagaggaagcagttaggaaggcagtggggtaccttcctaggtacttggccgtaaaggcaccggacaaggcggaggccagggcactggcggtggaagcgatagtcgaggtggtgcgggcattggaggcagatggaagggagggatttgcagggtatgttgtggccatggcaaggggcaaggcaaagggacgactgcttgctgtggatttggtccttgccttgctgccagtgctgttaccatttgaaggggatgcctgtgatatggaggagggctcttgggggctgaagtgtctgcgggtgttggtggagaagtgctcagatagtgtgggaggggttcgagctcgggcattaataaatgcagcccaggcgcttgatattttgtctgagagaggtgtggaggttgaccggttgcaggaggtgatgaggattggggacatgaagcttggggaattgctgagacgacgctgcaccgatgataaggctgctgtgaggaaggctgcgcttgtgctcatcacaaaggcgattggtttgattgggagacccatagatgactctcttctttgtgcaatgggtgctgcatgctctgatccattagtcagcatccgcaaggctgctcttgctgccatctcagaggtgtttaggaaatttcctgatgagaaagtgatgaaagagtggcttcaatctgtgcctccactggtgattgatagtgagacaagcatccaggaggaatgtgaaaacttgtttcttgaactggtgcttaacaggatctgccaagctgccaatgtgagcttagatgatgatttcatcaccttggaggaagttttccctgaagggacactagatttgctgaaaagcatctgtgatggagaggttgctccatgcataaagaagatatgtgcaagccttggcaagaagaggaagctgaaaccactacttgctagttctctgcagaacatcataacactatctgaatccttgtggttgagacgttgtaagccaatcgaaaattggactgcacctattgggtcctggtggcttctttccgaggtctcatcattcgcgccaaaatcagttaactggaagttcctctcccaccactggaaactccttgacaatgttggcaaagacgaaagaggtaaagcttgttctcaggtggaaccaaactctgcgctctgggcagttaatcgtgtatcactcttgcaaaccatttcaaatgtctccatggagctgccagtggaacctgctgcagaattggcacacagcttgctcacaaggatcgaggattttgatatgaaccttagtgaggttgatgcacatgtaaaatcactgaaaactttgtgtaaaaggaaagcaaaaacagctaaggaaggtgatgcactgatcctgaagtgggcgcagcaacttatccgtagtgcttttgacatccttgaccagtacataaaagaggcatcagaatcagccaggggtcacagtttcattactcctatgactggtaaatgcaagggaatgaaacagacatctgcatcgaagtcaacatcacaagcagttgttgctgtgttcactgttggatcactgatcctagcttgccctattgccaatgtgaaggacatcacccctttgctacacacaatcgtaacttctggaaattctgagccaaggccaaaaaaccttgttggcgggaccatttctttcaaagagttagctccatcattatatatacaatcctgggatacattagcaaaaatatgccttgtagatgaaaaagtggccaaacggtatattccaatttttgttcaggagcttgagaggagtgatatggctacccttcgtaataatatcatgattgcgatggcagacttctatgtccgttatactgcattggttgactgagggactatgtaaagtggagaggggttctcttccttcgatttctgccatctttagttgatgagtctgagaagattaggcatttggcggactacctcttcgggaacatcttaaaagctaaagcgccacttcttgcatacaatagtttcattgaagctatatatgttctaaacgattgcactggacatggtgtatatagcgactctcagtctcagggaagtttagacagaagacctgccctttttgcaattcgtggcactgatgaaagcacgaggtcaaagagaatgcacatttatgtctctttgctgaaacaaatggcaccagagcatcttttagccacgtcggccaagttatgtgctgagatcttggcagctgtttgcgatggcttgctcagtgttgatgatgctggtggaagggctgtacttcaggatgctctgcagatactggcttgcaaggagatgcgcatccaccccaacatcttatcagagaattccgagatggacgaggaaggcggtgagggcggaggaacagccagcgcgctcctggcggccaaagggagggcggtgacccaggtcgctaagaagaacctgatccagatcgccgtcccgatcttcatcgagctgaagcggctgctggagagcaagaacagcccgctgatcgggtgcctgatggagtgcctgcgcgcgctgctcaaggactacaagaacgagatggaggagatcctggtggcggacaagcagctccagcgtgagctcctctacgacatgcacaagtacgaggcaggcaaggggaagggcaaggctgcggcgcaggccgaggccgaggccggggccggggccggtcttagcggcatcggcaggtccccggctgtcaggtcggtgctgaaggaggtgaaccggaagacgacgccgacgcaaccgctgcactcgatgagtgtgcccaaggtgaagtccattctggggagcgccgggccgggctctggtcgccccgatgtcctccagtcggtcaggcggcttcagccgtttgaatcggacgatgagagttagcctgcccccacttcgatggcagtttatttcggctgttgcacttgggcacgtctgctctagaggtctggtctggtccggtaagctcattctctcaatgaggttttcgccgatttgcagtgtatataattacatattctgtaaacgaacaacgagaagaactactcttctatgtcctcagatataatgggtccagagtttcagatttgtaccaaggtacaatatattctagatccttactcttctctcttgtgtttttaacaaaaatactctcttgactttttt

SEQ ID NO: 219013 - DNA, 4126 bp, Zea Mays
cccatctccagtcgagtgctctctccagtccccacgcccgatctcgcccccatcccatggacgccgatgagatggacctcgactccccatcctcggcctcccccgcgcccgcctccggctccctccccaccgtcctctctgagctcgccgccctccaccgccgcgcgtcttcctcctccgtcacctccccgcccttgtccctgccctccatcacattcctctcctccagccccgcagccgtcgcgtccatcttccctcgcctcgccgaggccggcgtccccgcatcctccttgctgcccccgctcgaggcctcgctctccgcgcacccgctccccgcagccgtcgcctacctccgcctcctcctcgccccggcctccccgcttctcaccctcttctccccgcttccattcctctccctcctcctcgtcatccgcaaggccgcctcctccttctccggagccggcagcgccgcctccaaccctagctccgtttccggcggcgccgccaacccccgcaagcgcaagaaccagcgccaaaagccagcagcggctccgccggcggcgccgtcgctgctcccgaaggcgctctccctgctggcggacgccgcggggaggctgccgctcggggcccacccggacgcgcggcggtcgctcgtcgataccgccgcggagctcacggcgtttgacgtcctcaccgctgtccttggatccgactaccacgccggggcggtgcaggacgtgatacgagcgctggcccctgtggtgctctcggccgcgaaatccgcagcacgggtggctgcggtgcagttcattgtgaggaacttggtgcctttgggcgccgaggaaggagaggaagcagttaggaaggcagtggggtaccttcctaggtacttggccgtaaaggcaccggacaaggcggaggccagggcactggcggtggaagcgatagtcgaggtggtgcgggcattggaggcagatggaagggagggatttgcagggtatgttgtggccatggcaaggggcaaggcaaagggacgactgcttgctgtggatttggtccttgccttgctgccagtgctgttaccatttgaaggggatgcctgtgatatggaggagggctcttgggggctgaagtgtctgcgggtgttggtggagaagtgctcagatagtgtgggaggggttcgagctcgggcattaataaatgcagcccaggcgcttgatattttgtctgagagaggtgtggaggttgaccggttgcaggaggtgatgaggattggggacatgaagcttggggaattgctgagacgacgctgcaccgatgataaggctgctgtgaggaaggctgcgcttgtgctcatcacaaaggcgattggtttgattgggagacccatagatgactctcttctttgtgcaatgggtgctgcatgctctgatccattagtcagcatccgcaaggctgctcttgctgccatctcagaggtgtttaggaaatttcctgatgagaaagtgatgaaagagtggcttcaatctgtgcctccactggtgattgatagtgagacaagcatccaggaggaatgtgaaaacttgtttcttgaactggtgcttaacaggatctgccaagctgccaatgtgagcttagatgatgatttcatcaccttggaggaagttttccctgaagggacactagatttgctgaaaagcatctgtgatggagaggttgctccatgcataaagaagatatgtgcaagccttggcaagaagaggaagctgaaaccactacttgctagttctctgcagaacatcataacactatctgaatccttgtggttgagacgttgtaagccaatcgaaaattggactgcacctattgggtcctggtggcttctttccgaggtctcatcattcgcgccaaaatcagttaactggaagttcctctcccaccactggaaactccttgacaatgttggcaaagacgaaagaggtaaagcttgttctcaggtggaaccaaactctgcgctctgggcagttaatcgtgtatcactcttgcaaaccatttcaaatgtctccatggagctgccagtggaacctgctgcagaattggcacacagcttgctcacaaggatcgaggattttgatatgaaccttagtgaggttgatgcacatgtaaaatcactgaaaactttgtgtaaaaggaaagcaaaaacagctaaggaaggtgatgcactgatcctgaagtgggcgcagcaacttatccgtagtgcttttgacatccttgaccagtacataaaagaggcatcagaatcagccaggggtcacagtttcattactcctatgactggtaaatgcaagggaatgaaacagacatctgcatcgaagtcaacatcacaagcagttgttgctgtgttcactgttggatcactgatcctagcttgccctattgccaatgtgaaggacatcacccctttgctacacacaatcgtaacttctggaaattctgagccaaggccaaaaaaccttgttggcgggaccatttctttcaaagagttagctccatcattatatatacaatcctgggatacattagcaaaaatatgccttgtagatgaaaaagtggccaaacggagcttgagaggagtgatatggctacccttcgtaataatatcatgattgcgatggcagacttctatgtccgttatactgcattggttgactgttatatgccaaaaataacaaaatcactacgtgatccctgtgaagtagtacggagacaaacatttatcctactctctaagttattgcagagggactatgtaaagtggagaggggttctcttccttcgatttctgccatctttagttgatgagtctgagaagattaggcatttggcggactacctcttcgggaacatcttaaaagctaaagcgccacttcttgcatacaatagtttcattgaagctatatatgttctaaacgattgcactggacatggtgtatatagcgactctcagtctcagggaagtttagacagaagacctgccctttttgcaattcgtggcactgatgaaagcacgaggtcaaagagaatgcacatttatgtctctttgctgaaacaaatggcaccagagcatcttttagccacgtcggccaagttatgtgctgagatcttggcagctgtttgcgatggcttgctcagtgttgatgatgctggtggaagggctgtacttcaggatgctctgcagatactggcttgcaaggagatgcgcatccaccccaacatcttatcagagaattccgagatggacgaggaaggcggtgagggcggaggaacagccagcgcgctcctggcggccaaagggagggcggtgacccaggtcgctaagaagaacctgatccagatcgccgtcccgatcttcatcgagctgaagcggctgctggagagcaagaacagcccgctgatcgggtgcctgatggagtgcctgcgcgcgctgctcaaggactacaagaacgagatggaggagatcctggtggcggacaagcagctccagcgtgagctcctctacgacatgcacaagtacgaggcaggcaaggggaagggcaaggctgcggcgcaggccgaggccgaggccggggccggggccggtcttagcggcatcggcaggtccccggctgtcaggtcggtgctgaaggaggtgaaccggaagacgacgccgacgcaaccgctgcactcgatgagtgtgcccaaggtgaagtccattctggggagcgccgggccgggctctggtcgccccgatgtcctccagtcggtcaggcggcttcagccgtttgaatcggacgatgagagttagcctgcccccacttcgatggcagtttatttcggctgttgcacttgggcacgtctgctctagaggtctggtctggtccggtaagctcattctctcaatgaggttttcgccgatttgcagtgtatataattacatattctgtaaacgaacaacgagaagaactactcttctatgtcctcagatataatgggtccagagtttcagatttgtaccaaggtacaatatattctagatccttactcttctctcttgtgtttttaacaaaaatactctcttgactttttt

SEQ ID NO: 219014 - DNA, 4133 bp, Zea Mays
cccatctccagtcgagtgctctctccagtccccacgcccgatctcgcccccatcccatggacgccgatgagatggacctcgactccccatcctcggcctcccccgcgcccgcctccggctccctccccaccgtcctctctgagctcgccgccctccaccgccgcgcgtcttcctcctccgtcacctccccgcccttgtccctgccctccatcacattcctctcctccagccccgcagccgtcgcgtccatcttccctcgcctcgccgaggccggcgtccccgcatcctccttgctgcccccgctcgaggcctcgctctccgcgcacccgctccccgcagccgtcgcctacctccgcctcctcctcgccccggcctccccgcttctcaccctcttctccccgcttccattcctctccctcctcctcgtcatccgcaaggccgcctcctccttctccggagccggcagcgccgcctccaaccctagctccgtttccggcggcgccgccaacccccgcaagcgcaagaaccagcgccaaaagccagcagcggctccgccggcggcgccgtcgctgctcccgaaggcgctctccctgctggcggacgccgcggggaggctgccgctcggggcccacccggacgcgcggcggtcgctcgtcgataccgccgcggagctcacggcgtttgacgtcctcaccgctgtccttggatccgactaccacgccggggcggtgcaggacgtgatacgagcgctggcccctgtggtgctctcggccgcgaaatccgcagcacgggtggctgcggtgcagttcattgtgaggaacttggtgcctttgggcgccgaggaaggagaggaagcagttaggaaggcagtggggtaccttcctaggtacttggccgtaaaggcaccggacaaggcggaggccagggcactggcggtggaagcgatagtcgaggtggtgcgggcattggaggcagatggaagggagggatttgcagggtatgttgtggccatggcaaggggcaaggcaaagggacgactgcttgctgtggatttggtccttgccttgctgccagtgctgttaccatttgaaggggatgcctgtgatatggaggagggctcttgggggctgaagtgtctgcgggtgttggtggagaagtgctcagatagtgtgggaggggttcgagctcgggcattaataaatgcagcccaggcgcttgatattttgtctgagagaggtgtggaggttgaccggttgcaggaggtgatgaggattggggacatgaagcttggggaattgctgagacgacgctgcaccgatgataaggctgctgtgaggaaggctgcgcttgtgctcatcacaaaggcgattggtttgattgggagacccatagatgactctcttctttgtgcaatgggtgctgcatgctctgatccattagtcagcatccgcaaggctgctcttgctgccatctcagaggtgtttaggaaatttcctgatgagaaagtgatgaaagagtggcttcaatctgtgcctccactggtgattgatagtgagacaagcatccaggaggaatgtgaaaacttgtttcttgaactggtgcttaacaggatctgccaagctgccaatgtgagcttagatgatgatttcatcaccttggaggaagttttccctgaagggacactagatttgctgaaaagcatctgtgatggagaggttgctccatgcataaagaagatatgtgcaagccttggcaagaagaggaagctgaaaccactacttgctagttctctgcagaacatcataacactatctgaatccttgtggttgagacgttgtaagccaatcgaaaattggactgcacctattgggtcctggtggcttctttccgaggtctcatcattcgcgccaaaatcagttaactggaagttcctctcccaccactggaaactccttgacaatgttggcaaagacgaaagaggtaaagcttgttctcaggtggaaccaaactctgcgctctgggcagttaatcgtgtatcactcttgcaaaccatttcaaatgtctccatggagctgccagtggaacctgctgcagaattggcacacagcttgctcacaaggatcgaggattttgatatgaaccttagtgaggttgatgcacatgtaaaatcactgaaaactttgtgtaaaaggaaagcaaaaacagctaaggaaggtgatgcactgatcctgaagtgggcgcagcaacttatccgtagtgcttttgacatccttgaccagtacataaaagaggcatcagaatcagccaggggtcacagtttcattactcctatgactggtaaatgcaagggaatgaaacagacatctgcatcgaagtcaacatcacaagcagttgttgctgtgttcactgttggatcactgatcctagcttgccctattgccaatgtgaaggacatcacccctttgctacacacaatcgtaacttctggaaattctgagccaaggccaaaaaaccttgttggcgggaccatttctttcaaagagttagctccatcattatatatacaatcctgggatacattagcaaaaatatgccttgtagatgaaaaagtggccaaacggtatattccaatttttgttcaggagcttgagaggagtgatatggctacccttcgtaataatatcatgattgcgatggcagacttctatgtccgttatactgcattggttgactgttatatgccaaaaataacaaaatcactacgtgatccctgtgaagtagtacggagacaaacatttatcctactctctaagttattgcagtggagaggggttctcttccttcgatttctgccatctttagttgatgagtctgagaagattaggcatttggcggactacctcttcgggaacatcttaaaagctaaagcgccacttcttgcatacaatagtttcattgaagctatatatgttctaaacgattgcactggacatggtgtatatagcgactctcagtctcagggaagtttagacagaagacctgccctttttgcaattcgtggcactgatgaaagcacgaggtcaaagagaatgcacatttatgtctctttgctgaaacaaatggcaccagagcatcttttagccacgtcggccaagttatgtgctgagatcttggcagctgtttgcgatggcttgctcagtgttgatgatgctggtggaagggctgtacttcaggatgctctgcagatactggcttgcaaggagatgcgcatccaccccaacatcttatcagagaattccgagatggacgaggaaggcggtgagggcggaggaacagccagcgcgctcctggcggccaaagggagggcggtgacccaggtcgctaagaagaacctgatccagatcgccgtcccgatcttcatcgagctgaagcggctgctggagagcaagaacagcccgctgatcgggtgcctgatggagtgcctgcgcgcgctgctcaaggactacaagaacgagatggaggagatcctggtggcggacaagcagctccagcgtgagctcctctacgacatgcacaagtacgaggcaggcaaggggaagggcaaggctgcggcgcaggccgaggccgaggccggggccggggccggtcttagcggcatcggcaggtccccggctgtcaggtcggtgctgaaggaggtgaaccggaagacgacgccgacgcaaccgctgcactcgatgagtgtgcccaaggtgaagtccattctggggagcgccgggccgggctctggtcgccccgatgtcctccagtcggtcaggcggcttcagccgtttgaatcggacgatgagagttagcctgcccccacttcgatggcagtttatttcggctgttgcacttgggcacgtctgctctagaggtctggtctggtccggtaagctcattctctcaatgaggttttcgccgatttgcagtgtatataattacatattctgtaaacgaacaacgagaagaactactcttctatgtcctcagatataatgggtccagagtttcagatttgtaccaaggtacaatatattctagatccttactcttctctcttgtgtttttaacaaaaatactctcttgactttttt

SEQ ID NO: 219015 - DNA, 4233 bp, Zea Mays
ctccaccgcaaatttccgtccgaatcctaataaattccgattccacaccgcaaaattcaaaattcccacactcctagtccttccccccatctccagtcgagtgctctctccagtccccacgcccgatctcgcccccatcccatggacgccgatgagatggacctcgactccccatcctcggcctcccccgcgcccgcctccggctccctccccaccgtcctctctgagctcgccgccctccaccgccgcgcgtcttcctcctccgtcacctccccgcccttgtccctgccctccatcacattcctctcctccagccccgcagccgtcgcgtccatcttccctcgcctcgccgaggccggcgtccccgcatcctccttgctgcccccgctcgaggcctcgctctccgcgcacccgctccccgcagccgtcgcctacctccgcctcctcctcgccccggcctccccgcttctcaccctcttctccccgcttccattcctctccctcctcctcgtcatccgcaaggccgcctcctccttctccggagccggcagcgccgcctccaaccctagctccgtttccggcggcgccgccaacccccgcaagcgcaagaaccagcgccaaaagccagcagcggctccgccggcggcgccgtcgctgctcccgaaggcgctctccctgctggcggacgccgcggggaggctgccgctcggggcccacccggacgcgcggcggtcgctcgtcgataccgccgcggagctcacggcgtttgacgtcctcaccgctgtccttggatccgactaccacgccggggcggtgcaggacgtgatacgagcgctggcccctgtggtgctctcggccgcgaaatccgcagcacgggtggctgcggtgcagttcattgtgaggaacttggtgcctttgggcgccgaggaaggagaggaagcagttaggaaggcagtggggtaccttcctaggtacttggccgtaaaggcaccggacaaggcggaggccagggcactggcggtggaagcgatagtcgaggtggtgcgggcattggaggcagatggaagggagggatttgcagggtatgttgtggccatggcaaggggcaaggcaaagggacgactgcttgctgtggatttggtccttgccttgctgccagtgctgttaccatttgaaggggatgcctgtgatatggaggagggctcttgggggctgaagtgtctgcgggtgttggtggagaagtgctcagatagtgtgggaggggttcgagctcgggcattaataaatgcagcccaggcgcttgatattttgtctgagagaggtgtggaggttgaccggttgcaggaggtgatgaggattggggacatgaagcttggggaattgctgagacgacgctgcaccgatgataaggctgctgtgaggaaggctgcgcttgtgctcatcacaaaggcgattggtttgattgggagacccatagatgactctcttctttgtgcaatgggtgctgcatgctctgatccattagtcagcatccgcaaggctgctcttgctgccatctcagaggtgtttaggaaatttcctgatgagaaagtgatgaaagagtggcttcaatctgtgcctccactggtgattgatagtgagacaagcatccaggaggaatgtgaaaacttgtttcttgaactggtgcttaacaggatctgccaagctgccaatgtgagcttagatgatgatttcatcaccttggaggaagttttccctgaagggacactagatttgctgaaaagcatctgtgatggagaggttgctccatgcataaagaagatatgtgcaagccttggcaagaagaggaagctgaaaccactacttgctagttctctgcagaacatcataacactatctgaatccttgtggttgagacgttgtaagccaatcgaaaattggactgcacctattgggtcctggtggcttctttccgaggtctcatcattcgcgccaaaatcagttaactggaagttcctctcccaccactggaaactccttgacaatgttggcaaagacgaaagaggtaaagcttgttctcaggtggaaccaaactctgcgctctgggcagttaatcgtgtatcactcttgcaaaccatttcaaatgtctccatggagctgccagtggaacctgctgcagaattggcacacagcttgctcacaaggatcgaggattttgatatgaaccttagtgaggttgatgcacatgtaaaatcactgaaaactttgtgtaaaaggaaagcaaaaacagctaaggaaggtgatgcactgatcctgaagtgggcgcagcaacttatccgtagtgcttttgacatccttgaccagtacataaaagaggcatcagaatcagccaggggtcacagtttcattactcctatgactggtaaatgcaagggaatgaaacagacatctgcatcgaagtcaacatcacaagcagttgttgctgtgttcactgttggatcactgatcctagcttgccctattgccaatgtgaaggacatcacccctttgctacacacaatcgtaacttctggaaattctgagccaaggccaaaaaaccttgttggcgggaccatttctttcaaagagttagctccatcattatatatacaatcctgggatacattagcaaaaatatgccttgtagatgaaaaagtggccaaacggtatattccaatttttgttcaggagcttgagaggagtgatatggctacccttcgtaataatatcatgattgcgatggcagacttctatgtccgttatactgcattggttgactgttatatgccaaaaataacaaaatcactacgtgatccctgtgaagtagtacggagacaaacatttatcctactctctaagttattgcagagggactatgtaaagtggagaggggttctcttccttcgatttctgccatctttagttgatgagtctgagaagattaggcatttggcggactacctcttcgggaacatcttaaaagctaaagcgccacttcttgcatacaatagtttcattgaagctatatatgttctaaacgattgcactggacatggtgtatatagcgactctcagtctcagggaagtttagacagaagacctgccctttttgcaattcgtggcactgatgaaagcacgaggtcaaagagaatgcacatttatgtctctttgctgaaacaaatggcaccagagcatcttttagccacgtcggccaagttatgtgctgagatcttggcagctgtttgcgatggcttgctcagtgttgatgatgctggtggaagggctgtacttcaggatgctctgcagatactggcttgcaaggagatgcgcatccaccccaacatcttatcagagaattccgagatggacgaggaaggcggtgagggcggaggaacagccagcgcgctcctggcggccaaagggagggcggtgacccaggtcgctaagaagaacctgatccagatcgccgtcccgatcttcatcgagctgaagcggctgctggagagcaagaacagcccgctgatcgggtgcctgatggagtgcctgcgcgcgctgctcaaggactacaagaacgagatggaggagatcctggtggcggacaagcagctccagcgtgagctcctctacgacatgcacaagtacgaggcaggcaaggggaagggcaaggctgcggcgcaggccgaggccgaggccggggccggggccggtcttagcggcatcggcaggtccccggctgtcaggtcggtgctgaaggaggtgaaccggaagacgacgccgacgcaaccgctgcactcgatgagtgtgcccaaggtgaagtccattctggggagcgccgggccgggctctggtcgccccgatgtcctccagtcggtcaggcggcttcagccgtttgaatcggacgatgagagttagcctgcccccacttcgatggcagtttatttcggctgttgcacttgggcacgtctgctctagaggtctggtctggtccggtaagctcattctctcaatgaggttttcgccgatttgcagtgtatataattacatattctgtaaacgaacaacgagaagaactactcttctatgtcctcagatataatgggtccagagtttcagatttgtaccaaggtacaatatattctagatccttactcttctctcttgtgtttttaacaaaaatactctcttgactttttt

SEQ ID NO: 219016 - DNA, 2840 bp, Zea Mays
cccatctccagtcgagtgctctctccagtccccacgcccgatctcgcccccatcccatggacgccgatgagatggacctcgactccccatcctcggcctcccccgcgcccgcctccggctccctccccaccgtcctctctgagctcgccgccctccaccgccgcgcgtcttcctcctccgtcacctccccgcccttgtccctgccctccatcacattcctctcctccagccccgcagccgtcgcgtccatcttccctcgcctcgccgaggccggcgtccccgcatcctccttgctgcccccgctcgaggcctcgctctccgcgcacccgctccccgcagccgtcgcctacctccgcctcctcctcgccccggcctccccgcttctcaccctcttctccccgcttccattcctctccctcctcctcgtcatccgcaaggccgcctcctccttctccggagccggcagcgccgcctccaaccctagctccgtttccggcggcgccgccaacccccgcaagcgcaagaaccagcgccaaaagccagcagcggctccgccggcggcgccgtcgctgctcccgaaggcgctctccctgctggcggacgccgcggggaggctgccgctcggggcccacccggacgcgcggcggtcgctcgtcgataccgccgcggagctcacggcgtttgacgtcctcaccgctgtccttggatccgactaccacgccggggcggtgcaggacgtgatacgagcgctggcccctgtggtgctctcggccgcgaaatccgcagcacgggtggctgcggtgcagttcattgtgaggaacttggtgcctttgggcgccgaggaaggagaggaagcagttaggaaggcagtggggtaccttcctaggtacttggccgtaaaggcaccggacaaggcggaggccagggcactggcggtggaagcgatagtcgaggtggtgcgggcattggaggcagatggaagggagggatttgcagggtatgttgtggccatggcaaggggcaaggcaaagggacgactgcttgctgtggatttggtccttgccttgctgccagtgctgttaccatttgaaggggatgcctgtgatatggaggagggctcttgggggctgaagtgtctgcgggtgttggtggagaagtgctcagatagtgtgggaggggttcgagctcgggcattaataaatgcagcccaggcgcttgatattttgtctgagagaggtgtggaggttgaccggttgcaggaggtgatgaggattggggacatgaagcttggggaattgctgagacgacgctgcaccgatgataaggctgctgtgaggaaggctgcgcttgtgctcatcacaaaggcgattggtttgattgggagacccatagatgactctcttctttgtgcaatgggtgctgcatgctctgatccattagtcagcatccgcaaggctgctcttgctgccatctcagaggtgtttaggaaatttcctgatgagaaagtgatgaaagagtggcttcaatctgtgcctccactggtgattgatagtgagacaagcatccaggaggaatgtgaaaacttgtttcttgaactggtgcttaacaggatctgccaagctgccaatgtgagcttagatgatgatttcatcaccttggaggaagttttccctgaagggacactagatttgctgaaaagcatctgtgatggagaggttgctccatgcataaagaagatatgtgcaagccttggcaagaagaggaagctgaaaccactacttgctagttctctgcagaacatcataacactatctgaatccttgtggttgagacgttgtaagccaatcgaaaattggactgcacctattgggtcctggtggcttctttccgaggtctcatcattcgcgccaaaatcagttaactggaagttcctctcccaccactggaaactccttgacaatgttggcaaagacgaaagaggtaaagcttgttctcaggtggaaccaaactctgcgctctgggcagttaatcgtgtatcactcttgcaaaccatttcaaatgtctccatggagctgccagtggaacctgctgcagaattggcacacagcttgctcacaaggatcgaggattttgatatgaaccttagtgaggttgatgcacatgtaaaatcactgaaaactttgtgtaaaaggaaagcaaaaacagctaaggaaggtgatgcactgatcctgaagtgggcgcagcaacttatccgtagtgcttttgacatccttgaccagtacataaaagaggcatcagaatcagccaggggtcacagtttcattactcctatgactggtaaatgcaagggaatgaaacagacatctgcatcgaagtcaacatcacaagcagttgttgctgtgttcactgttggatcactgatcctagcttgccctattgccaatgtgaaggacatcacccctttgctacacacaatcgtaacttctggaaattctgagccaaggccaaaaaaccttgttggcgggaccatttctttcaaagagttagctccatcattatatatacaatcctgggatacattagcaaaaatatgccttgtagatgaaaaagtggccaaacggtatattccaatttttgttcaggagcttgagaggagtgatatggctacccttcgtaataatatcatgattgcgatggcagacttctatgtccgttatactgcattggttgactgatggattaatttagcacaattggcatagttcgcgagccggctcggctcatttcaccgaagagtccaaaaaacaggctcgtcttgctcgaggctcgcgagcctcgag

SEQ ID NO: 219017 - DNA, 3583 bp, Zea Mays
  misc_feature (2995)..(3094): n is a, c, g, or t
ctcgcatcggcacaacagaacgtgaagacggcggagcgggtagttgaacgtggaggcgctctgagatcctagctatggcctggacttccccctgcataagtatcaacgcatcctcgccttctcacccctattgagccagccatcccttcccgtgaccgagaaagcaggcccgagaaagaggtccactgtcggtgctccgtgcttgcaccgatgattggtggccagggttgggtcgtgggcgttcggcagcgtgcgtggatcatgtgtgtgaagtatcaagctcagggatcggtccgagcacctggaattcctcgttgaacctcgtcgctgctgcacctctgctccgcatcgtggaccgaccccgacgtgtctttcgcgctgatgggcaagcaactgaggacccaagtgctcagcaggtggaaagtgccgagcagaagctcgttgaaggccgtatcgcattgggctgcgaccgaacacaaatcgccggacacaaatcgccgccacggtcctcctcctggtgatcccgcgccataccgagcagcaaggtttccctcctcatggtgatctcgtgtcgcgcgttgtgtcctcttcaccgtcctctgccgccacacacatcgccggtgaggaccaccctcttcctctccctctccctgtggttcactattggtgattttgctactaggtctgctagtagtcaatgtgcttcatctgatttagaaaattcagaaagcaaaccaaacgctatattgttgtttccgaattttcttcatctgtattacccgattcaaccaaaccccacatgcattctgctagttgtttttattaccggactatcgaaacagcagaaatagaatggagaacaggacagcggcagggcgggaagaaaagccaaggtctgatgtgttgttttttgacaataaggttccatgtgtgtttgaattttatttcatatatgcatatgttcgatgtggttttcaattttgttcaatttaatcatagttagggagttaacgcaagttttaatttattgtcaaaatagatggatagaagatgggtttatgggaaacaattcacacctgcatatgtgaaaggagttgaagagttcatgaattttgttagtgaaagataccccgaagacacacacatccattgtccgtgcgtgaattgtcttaatcaaaggttgcgacctcagagtgaagtagaaacccatatacacatttatggaatgtcagctacatacacgaggtggattcatcatggggagtcggcagatacagaagttgagggtatagaggaggaggtcgaaggatatgatcatgactttgggatacatatggatgtggacgatgatgtttacgatgatgatcatgggtaccagagatgatcggtgaactgtttgcagtggtagaggctgatggagaagagccaagatttgcaggagttcttggagattcaaagaaggcacttagtccgagttctagccattcaaaattatcttttatggtgaggatgttgtatatgaagtctcgttatcgaatcaacaatacagcattttcagcaatgatgaagctgatgtcagatggataccctaacagtgagttgccaaaatcatatgatgaggccatgatatatcttaaagaattgggccttggatacgaaaacatccatgtgtgcaagaacaattgtgtgttgtttcgaaatgttaatgctaaaatgaatgagtgcatagtatgcaaggagtctaaatggaaagatgaaactagtttgaagcgggttccacataaggttttgaggcattttccactcttgccaaggttgaaaagaatttttgcttcaaaacaaacttctgaggaaacacgatggcacaagaaagtgaggaagccagtcgccaatttgatgagccatccagctgatggggaaacgtggaaggactttgaccgaaagtacccaggttttgctgatgatccgaggaacctgaggctagccttagctaccgatggattcaatccatttggcaacatgagtacccagtatagtatgtggccagtgcttgtgacaccgcttaatctcccaccatgggaatgtgtgaatccagcaaactgctttatgtctttactcatcccaggtccaagatgtccaggaaaggattttgatttgttccttgagcccctaattgaagaactgctcaagctatggaagggtgtcaatacctatgatgcatgtactggtaggaagttcgaccttcgtgctgctgtactacggtgtatacatgattatccagcgctggccacgttatctgggtgaacaacaaaagggtattatgcatgtatttattgcgacaagaatccattgtctctggcaataaggaacaagttatgctagattggacatcgtcgttgccttaaaaggacacattatggtggatagcatggatttcaatggtaagcgtgaaaacaaagttgagcctggcaggtttactgtggatgaggtcctacaagagctagagaaggtgaaagatgtcaggccaatgaagcaggctgacattactggaaataaaagatttgatgcttccacataatctcgatgtgatgcacatagagaaaaatgtatgtgaaaatattctttgcacactactcagtataccaggcaagtccaaggacacacataatgcaaggctagatttgtatgatatgggcataagacctgagctgcacttgcaacaagatggcaacttggcctgcagggctccacctgctccatatgtgttggggaaggatcagaaagtcgacttttgcaagttcctcaaaggtatcaagtttcctaatggatttgcggataacctagcaagatacataagtgaagatggttcaaaggtggttggaaaactgaaaacacattcttgccacatactcctacagagaatcatacccgctggtcttagaggactggtgaggaaggatgtatatgaagcaattgcagagctggggaccttctnnnnnnnnnnnnnnnnnnnnnnnnnnnnnnnnnnnnnnnnnnnnnnnnnnnnnnnnnnnnnnnnnnnnnnnnnnnnnnnnnnnnnnnnnnnnnnnnnnnnaatctttccatctgccttctttgatgtcatggtgcacttgtgtgtccatcttcccgatgaggcactgcttagaggacctgttcaatatggatggatgtacccaatagaaaggagactaggcactttgaaaaattttgtaaggaacagggctaggccggaaggatcaattgctgaggcaaatatggcaagtgataccttgacattttgttctaggtacatgaaggatgttgacactagatttaaccaggatgatgatagtggtacagagatgccattgcctaatgacatctctgtttttaagcatggtgctactcttgttggagctactaagactgagtacattgatgatgctatcatgaataagttagtttggtatgttctacataatgctgatgaagtagaggattatttgaagtaagtatcgtttacatgtttgagatttaatttttgttttatttatatttgaaaatattcttatgattaaagtat

SEQ ID NO: 219018 - DNA, 3382 bp, Zea Mays
ctcgcatcggcacaacagaacgtgaagacggcggagcgggtagttgaacgtggaggcgctctgagatcctagctatggcctggacttccccctgcataagtatcaacgcatcctcgccttctcacccctattgagccagccatcccttcccgtgaccgagaaagcaggcccgagaaagaggtccactgtcggtgctccgtgcttgcaccgatgattggtggccagggttgggtcgtgggcgttcggcagcgtgcgtggatcatgtgtgtgaagtatcaagctcagggatcggtccgagcacctggaattcctcgttgaacctcgtcgctgctgcacctctgctccgcatcgtggaccgaccccgacgtgtctttcgcgctgatgggcaagcaactgaggacccaagtgctcagcaggtggaaagtgccgagcagaagctcgttgaaggccgtatcgcattgggctgcgaccgaacacaaatcgccggacacaaatcgccgccacggtcctcctcctggtgatcccgcgccataccgagcagcaaggtttccctcctcatggtgatctcgtgtcgcgcgttgtgtcctcttcaccgtcctctgccgccacacacatcgccgtctgtacagggaggagctatcgcaacaaggtgcacgtccaaatgatgttgatcgaatggttcaacaaggatttgcaaagtggtttatgtcccatgtaagtcactaaacttttatgttataggtttactaaattttttggtatgcatatgtaattgttgagctgagtaattttgttgcgacagattgagaagaagcgtaatgagaatccagaattggttagcgaaggactgtgggcactgtcatgtggcccagctcggcgagttaagactagtacaacttgcaagattaatggagtgcggtttagcacagtggatcgtgagaagttcatgcagacacaaaatagtggtgtaatgactgaaggtgaacataatggggagaacatagatttttatggtgtccttaaagaggtaattgagttacaatataactcgaattgtcaagttcgtcggacggtggttctatttcgatgcgattggtacaaccaagtaggcaagactgtgggcattcgagatgacaaacatttcaaatccatcaatgtgcagtcattttggtacaagtctgatccttttatcttggcagaccaagcgaaaaagatattttacctggaagacacaactccacaatgtaaagatttccgagttgtgcagaaatttgaacatatgaatatttatgatgtggctgaaaaatatgagggccgtaatgatgtgcatcaggatgattattgttctgatactgagcatatagtgcaagaaggtgatgataatcaggttctacacaatgttgaaggtggagaagccactctaattgaaggcaatttagaggaactaataagaaaaaagaaggaagctactattattcttgaagatagtgaggatgaggaggaagatgatacaatgcttcaatattttaatgatggtggcgacgacaacaatgatgacatgtccatagaagatgaagatgaggatttctagtattgatagttgatttatgaacaagcctattctttagactaatacaacatatttctgatactgaccatggcttgattgaatgaattgaactcatgagcggtgtatgccagggaagacatcaacttcatgaactcgcgaccatcagcatcgacagtgaaaatattggatatctattgcactgtgcagtttgacaaaaaggtttataatggcgtgatggtggctgtctggacaatttgtttattatttccttcactagttataacgtcagaggcagatgttcttttgaactttgttacttggcagagttaaactgaagattctttcttttccttgatcgttctatcaatctgtttagttttacagttgttggtgcatcagttttctgcacaaacatgcaacataaaaggaaatcagtgtctatcactctatatgagtatctgagtaaaagtatatctggaagatcggttcgttgcatccttaataagatcgttaccaagattccatgacagatcgaaatatattttgatgttttcatctgtttgtagttacagtacctaataaagtttaatagagtagatcctgtcaaactatatcttctatgttttactttgttcttggagaattatatccttaccaagtgttggtggcagatccaaacatactttagtattttcaaaattatttgtggtacttgaaattaaattgatttgcattgactctcttgtacctctgtacaatgtgtcgaagtaatgcttgatacctgattagatctttgtacattttctcttctcaataatcaagatgagtcgtggtggtagtgccggtggtggtcaaagttctctgggttatctctttggaagcggtgagccccccaaaccagcagtggcaccagctgcaagtgctctacctgttgagaaaccatctgctgcaaagactgatgcgaccaagcaggttgttgctggggttaccagctgttgggacttgttctcaaatgctatgaattaagaacaaggcaacacagaaaatgttaaacattaaagtccttcgtccttcgaagcattatttcccttgagagataatgattttcggacgaaggttatgaaggacttaccttcatcaatacatataaataatgacgaaggaaacatataaaatataaaggataacataaacaattatgtattactatcaaatcatttctatttcattattatggaaaaatagaaatgataacaaattacgaatgtaccttaggcttgaaagaaggtaaaagtacaagcgtgacgcaaaagcaaatgccaagtcagcgtgaacagtatgggagcactgttcatctatttataggcacgggacgcagcccatgtaaagttacacccatgccctttacatttgctaataactttatagtaatccatcggggtctaaatagccttttcccctttaagtcgatttccttttctgctatcacgccgaagctcccctgtgcatagcttcggctctgcgctatccttcgtattctttatgcttctccacactgtggttttgatctaagtccaaaggtacctgttcatgtataatactccagaaacattgttaaatcatgtttttgagaaccttcggaagccgaagcccccaacaccagccaaaccaataactaccacagggctgatggtcagaacactggcaacttccttacggtatgctactttatgttctttcatttcacataggctttttacatattaagtgttgctatcatccattgactagctgagtgccacttccttacgg

SEQ ID NO: 219019 - DNA, 201 bp, Zea Mays
cccagccatcgtttccaagtacgcgcagagagagagagccacaagagttagagcgaaacatcagcgtatggatctaggggctcgagcaagcaagagaggagagatgcctgcgtcaatagatcatgtatgaggaaggtcaagaacaggtaccacaggacgaggcgcttgaaggatgctgtgcgagttcgtgagaggtctagg

SEQ ID NO: 219020 - DNA, 2001 bp, Zea Mays
agccgcccaggcacactagttgcatttcgttggcacttaaagttcaagatagcctgctgtaggccatcggccgtacagatgattgatgatgaggccaactttggtaatatccttgatgcctcagaagaagttcaggttactgcaaagttccgtcccaaggaacgacccaaaccccgaaaaacagctctatcatccagatctgcagcgcctaatcctactgaagaaactggagataggaaagtaggaaccttcaatcaagtcaattcttctaaagagctcacttgccaagaaaggacatccttgatgtgccctagtactgagtcagttgatattatcgctggttctcaaggtattctcgatacaccattggaagatgcattggcagttccccagggttctctgcctggtgcttctgctgcaggtaggacttctcaatatggtgaacacaatgatgatccttctaagttagctacacaccaagaaaacttggtggtttcagatatcaacgtcccacctaacagttcatgtggcaaggctattgatgatatagttgaatttgaggacatgtgtgatgtccaaattgaagaggaaagagttacaaagttccaaccaaaggcgcaaacgaagctccttaaggaaatagccaaatctcggaagactaaccaaaaggtggaaacttccactgtagatgtggttacacaaaatggaaagggcaataatattcagacaaggctccatggcaatcaggtacaggatcctaaaagtcatgaaagtgtgcagatcccagattctgaagaattattagcaactgataatagtaaaggttgcaatttagctaaactcaacaatgtccttgaggagtcagtccaagaggaaacaatagctaagtttcgttctgatttgcaaccaaagcccaggaaggcttcatcccatgttgctgcgattaaaattaatgttgctgctgttgctccaatagttggagtttgtgacagcaacaatgacatgtacagagaacctaaagatcaagaaaccatcaccggtccagtggtttggtcaccacaggctgtgcatgctgatgttgatttagacaatcacaatgaaccaattaatcctcctatcgatggtactcaatcaatgattggcgaagtcccaagtacagcttttacaggaagagaaaagggaaaatcaaaatctgtatcttttgctctatcggatgcttctggggtagctacccctatagataccaattctgagatgggtaacatcggcgattcctgtagtgacaaattgactgatgaaaatttaagtaactcatctcggcatatcgctgaaaagcattctattaccaaggaccaatattcaaatggtcaggaccatgagcgggagccactagatcatgctgttcaacagcaaccaaaatcggatgttggagaaagagcatcatcaatgaaacgacgctgcaggaaaaaggtgcaaaaagttgggacacctaatcacactgttgatgattattttggtgaagactgtgttgaaccttcattagctgaagaagataacaatactggtgatgattacactactggtaataaccataaggctaggaaaaagtcaaggggtggtgtagaagagtcacagcagcagaaagttcaaaaaaataaaagcaaggtgtcttcacggggccgcaaaagaaccttgaaggatgaaacggcagagaagcctgagaagaagctaacccacaggatacgtcagaggataacaaaagaggttaaggctttactggaaacacctcgtgagcagataaaacccatgaagctaagcgcatcacatctcaggttgttacaagaagctagagagcgtgttaatccaaaagggattccatccgggccatcttctaatacaaggtatacttctttttttcttctatttctctatgcatgttattatctaaccaaattagacttgggacttttggttgggcataaatgaacatattggaccagt

SEQ ID NO: 219021 - DNA, 570 bp, Zea Mays
ctggtgggcgcggacttgggcgtctcccaggggtaaataaggatgccctcgacccctacgcatcctgaggcaccactaaccgaggtcctgagtgtcgccccagctaaagagcccaagtagaaatctgagcgcggccggtgagggatcgagggcaactgtgagtgttctctcaccgggcagttgttgcgggtcaccgaggtgggcacgccagccgtgttcgcgacctcgccattgaaggttgcagtcttggttgataaaggagtcatcctcggggagtgatcgctgccgtgaaaccattgcgcggcgtggagaacttccctgctaccttgacctacggtagcccaggaggaggactactacgaggagtacaaggaagtctaggtggcgtctctcaatcagcttgatggcgtcgaggaataattattagttcactttattattatcatttatttttgtaagacacttctgctatgtaataatgtggtgacatttatctctatacacttggtcattatttgtgttgttttctttggcgcacatatgagacgcacctagctttatcccttaaat

SEQ ID NO: 219022 - DNA, 1975 bp, Zea Mays
gtcgcggctctcgcgcggcggctcctcacccgccgtcggtcgctcctcacccgccccacgcctgaccagcgccattactcctcatcccgcaggcagtctcgggtccctgttcccgctgtcgctcgtggcccgctccaccagcacgcaggcatcaccctcggccacggcctccgaccaccagccacgcttcgccgctaaccccctcgcggcggcttccattcggtccctgccctccacgccattctcttcctgacctcgccttcaagttcatgtccccgtcgtcgcccatgggcctgctccatcggcccgcctcaccctcggccacggcctccaaccgtcggccctgtttcaccgccgactgcacgccctgccctgtgccggctcttgccctcccctgactcgtcggccccgtttcgccgccgaccgcacacgctaccgtgcgccggctcctgccctctcctaacttggtcggcaccaactttgcaacttacaggtgatttgtccaaggagatggatttactgagcagtggtacatcttttgaagaggctgtcaaaccacggaagtggcttaatccaacggattgggggaggagagcctggtgccgttcgagattggggcctcatgaggtaaattcagaagcaaggatggcgacgacgatgaccccgacgacatcgtccccatggacacccaaggtcactggagtggagtgggtgacataccaagcacaaagcaactagactttctcatccgaaccatcatgtgacctccatagaccactggcgtcaaagatgaagcaagataatgtcatttcacttgtctctacgaccatggcacaacctggcatggtgtttcatttaataggtcactggagtggagtgggtgacataccaagcacaaagcaaaggcatatgtagggtgatgatgatgccgtagtgatgggccttgaggtagagcacggaggcagtaacgtagcggagtgcaacaagcagtagctagacaatataggcattgaccaagtagaggttaatacagacaccaacagctccgggccaggaccatgttgtgtacctcaatatggtcatgacttggagttctgcagtgaggatcatgtggagtgtccagtgcctgatggatgaaggctaacattggagtttcacagtgagtagttttgcggagagctctggctggagatctgacatgatagatgagatgagagagtcagcttcgcttggtggtcaagttgcctgtgatggggaaggggaagagtaagacgccttcctgagatggttgggtcacgatgaatgcgatggctgatggttggatcatgatggatggattccaacttgagggacttggattaaattagactcttaagcacattgagatatgtttggactggatggtggactttctgtagtaggattataattggattcctttgttaggatttggattttggtccaatcccccctaataagctgaagatcatgcttgctgtggagcctttgataccatcagagggaccaaagattggagagcacatttcggttacacggaatggaaaatgtgcatatatggtgctgattgcagtgagattagcctcgtccaagttaggggatctgccatgaactagacaagattagaagtttaaagaggccttacatcaagagagtacaagatcgccataaggaagtacaagtctttgaggaaagtgaccttatgagaagcttgagaaaaatcaacttgaaagtgaccttcatgatgatacaataaattgtctcaaacgcaacactattgaaatggagggatacattcgccctcttgacgtagtcataattgtgttgcagaccagcattctgatggtgttgcagatgatcatcccagcgattccttattctctccaacataccatcatcacaaggttcgttatttgaataaataacctaacgaaaggtataaagataataaaatgga

SEQ ID NO: 219023 - DNA, 3566 bp, Zea Mays
atgggatctggccgcgccgtcatgctctgtgggacccttgccctggtgcctaaagatcttgcgctgccaccctgccggagcacgagagggtggggatcatcgggcggacaaggcttggtcggcggacaccacagcggcggggagcgaccacagttttggctaccccgcgggaagaagatgaaggaggaccgttggatgcgcgatgaagaattgagcaggcagaggaaacctgagcgcaatggcagtgtatttacacctatagctgcaatgtattccagtggtcatgcactccctgttgcaaataggagccacggtttggtatttggcagtctgagcaaggactgggacgacattcgccagcgcaaggatcagttggtcaacttccttgctagtcttgaacgagcctctggagattctgcggcagctggcaaaatcgaagatagcaaattggccagtcctgtggagccaactgaacaaaaagagaaggctgccataatcgttcttgattcagacgatgaggacggaaatggttcaggaaacagtaagttggcatctgagactaacaaagaactcggaacatctggattgattaataatatcgcagaaaggatgacgtttaatgggagccaagcatttggaaccgtgcatacttatggagataagaacacacagattgttccgtatggtcaatgttctgctttagtgaatcagtttcctttgcaaaccagttggcaaccatctattcagtttgagagagtcgtgctgcagaaaaggcctgaggagcagcgaatgcaagatcttgtggctgctagcatagccgagaagagagcagaaacacaagtgttcctttcacttcccacagagaaaaagcgaaggagatcagaccccagtctgcatgccagtgacgatactgctactgtccctaaacaaagaaaaagtaaaggtgccacagttgtagcagcagctaatttgtcattggtttcacaacaaactgctacatcaccagaacctgacatggttatagaggaagaggagaaacataaaaatgaaagtgatggtcttgacgattattggaaagattttgcattggctgttgaaagcacaaagcttgacgaagttgatgaggcggcaattgaaaaggaagataatggaaagatggaggacatcgattgcaatcatgacatccggattcatgaagatttgggtcatgtatgccgtgtgtgtggtatgattgtgagaagagctgattcaataattgattatcagtggaaaaaggcttcaaggagaagaacgaatggctatggaggacattcaaaagatgctgatgagatagattgtggtactgttaaactgtctgaagatttcatagtcgcagatattgctattcatcctagacatgctcggataatgaaaccacatcagttggaaggtttcaactttttggttaagaatttgattggagacaagcctggaggttgcattctagctcatgccccaggtacagggaaaacatttatgcttataagcttcattcagagcttcatggcaaggtatccatctgcaaggcctcttgttgtgctgcccaaagggattctaggtatatggaagacagaaattaaacgatggcaagtgcaggatataccagtgtacgatttttactctgtcaaggctgaaaaaagagtagaacagttgcaaatcctcaaatcttgggaagacaagatgagtatactatttcttggatacaagcagttctccacaatcgtcactgatgatgggggcagcaatgtcacagctgcatgtcgagacaggctgcttaaggttcccaaccttctgatacttgacgaaggacatacacctagaaatcgggagactaatgtactcgaatcactaaatagagtggaaacaccacgcaaagtggttctttcgggtacacttttccagaatcatgttgaagaagtgtttaatatcttgaatctcgttcgcccaaagtttctcaggatggaatcatcccgtcctactgccagacgtataatgagtcaagttgaaatagttggtagaagttcgaaagggcttgctgatggcgcattcactaaggcagttgaagaaaccttattgaatgatgagaacttcaagagaaaagctcatgttattagaggtcttagagaactaacaaaggatgttcttcactattataagggtgatatcttagatgaactacctggcttagtagacttcagtgtgtttttgaagctcacacccaaacagaaagacattatttataagttggaagcacatgatcggttcaaaagaaatgcagtagggagtgcactgtacattcatccatgtctttcagaactttcagaggttaatgctgagcatagggctaacacctttagagatgatttagttgatagtctggtagattctatcactgtgagagatggcgtgaaggccaattttttcatgaatatcctgtcacttgctaattctgcaggagagaaagtgctagctttcagtcaatatatatctcccatgattttctttgaaaggctgctggtgaagaagaaaggctggcatgtggggaaagagatctttatgatctctggtgatactagccaagaagacagagaattggcaacggaccattttaacaactctgctgacgcaaaaattatgtttggttctatcaaggcatgtggggagggtatctccctcgttggtgcgtcgagagttgtcattctggacgtacacctgaacccatctgtcacccgtcaagcgattgggcgtgcattcaggcccggacagcagaagaaggtgtttgtgtacaggcttgtagctgccgattctgacgaggtaaaggtccatgagacagcattcaagaaagaagtcataccgaagctgtggttcgaatggagcgagcactgtactacggaagacttcaaacttggtcaaattgatattgatgactctggtgacgaactgttggatactaaagcaatccgcaaggatatcaaagcgctgtatagaaggtaacaagctttgtggccactggacaccatgtacatattgcagtgctgaccgtcgagctgatccttaaactgaagaaagaggtgacgggtgttgcggtggctacattgcgcggtcattcccagctatatccgtggaatggcggcttcttttgttcgtagtatgtgccaacttggggcagcagtcagctgatccccagacacatttctagactcttttttaggctcaagtttctgagaattaacctgctatggcgtttagccttaagtaaatatttcgttcgcaacaataataacccagtaaacctaatttgttcttgtgcgtttgtggtggtggttcttgaaatttacctggcgccttcttcctgggctagatgctatgcaggtgtcacaggttggtttgttggcatgtagaatcgggaaatgctaatctcgaaagctcgtagtttccttttcccccccgggtgacatgtttattcacctcttactagttaccacgtccatttccaactataagatatgatactttggcttttgaag

SEQ ID NO: 219024 - DNA, 3678 bp, Zea Mays
ctgtctcgtcgtcatttcctcctaaaatccccaagcctccaatccactgaactaaaccctagacatggcgggtagagactactgccggttgccggtgcgcccgcgcgacttctgaggccccgcccccgtcccggcgtcgccggaactggctccactgtcgcccccatcactgggactgggagagtgggagttcagagccgcagacgctggggcgccgggtcaccggaaggccgggaaggaaggtgtggccgcaagacgcaggcaggaggcatcgactcgactcaccatgtctcagtcaccgggaggacgggaaggcatatattacagcaggcagaggaaacctgagcgcaatggcagtgtatttacacctatagctgcaatgtattccagtggtcatgcactccctgttgcaaataggagccacggtttggtatttggcagtctgagcaaggactgggacgacattcgccagcgcaaggatcagttggtcaacttccttgctagtcttgaacgagcctctggagattctgcggcagctggcaaaatcgaagatagcaaattggccagtcctgtggagccaactgaacaaaaagagaaggctgccataatcgttcttgattcagacgatgaggacggaaatggttcaggaaacagtaagttggcatctgagactaacaaagaactcggaacatctggattgattaataatatcgcagaaaggatgacgtttaatgggagccaagcatttggaaccgtgcatacttatggagataagaacacacagattgttccgtatggtcaatgttctgctttagtgaatcagtttcctttgcaaaccagttggcaaccatctattcagtttgagagagtcgtgctgcagaaaaggcctgaggagcagcgaatgcaagatcttgtggctgctagcatagccgagaagagagcagaaacacaagtgttcctttcacttcccacagagaaaaagcgaaggagatcagaccccagtctgcatgccagtgacgatactgctactgtccctaaacaaagaaaaagtaaaggtgccacagttgtagcagcagctaatttgtcattggtttcacaacaaactgctacatcaccagaacctgacatggttatagaggaagaggagaaacataaaaatgaaagtgatggtcttgacgattattggaaagattttgcattggctgttgaaagcacaaagcttgacgaagttgatgaggcggcaattgaaaaggaagataatggaaagatggaggacatcgattgcaatcatgacatccggattcatgaagatttgggtcatgtatgccgtgtgtgtggtatgattgtgagaagagctgattcaataattgattatcagtggaaaaaggcttcaaggagaagaacgaatggctatggaggacattcaaaagatgctgatgagatagattgtggtactgttaaactgtctgaagatttcatagtcgcagatattgctattcatcctagacatgctcggataatgaaaccacatcagttggaaggtttcaactttttggttaagaatttgattggagacaagcctggaggttgcattctagctcatgccccaggtacagggaaaacatttatgcttataagcttcattcagagcttcatggcaaggtatccatctgcaaggcctcttgttgtgctgcccaaagggattctaggtatatggaagacagaaattaaacgatggcaagtgcaggatataccagtgtacgatttttactctgtcaaggctgaaaaaagagtagaacagttgcaaatcctcaaatcttgggaagacaagatgagtatactatttcttggatacaagcagttctccacaatcgtcactgatgatgggggcagcaatgtcacagctgcatgtcgagacaggctgcttaaggttcccaaccttctgatacttgacgaaggacatacacctagaaatcgggagactaatgtactcgaatcactaaatagagtggaaacaccacgcaaagtggttctttcgggtacacttttccagaatcatgttgaagaagtgtttaatatcttgaatctcgttcgcccaaagtttctcaggatggaatcatcccgtcctactgccagacgtataatgagtcaagttgaaatagttggtagaagttcgaaagggcttgctgatggcgcattcactaaggcagttgaagaaaccttattgaatgatgagaacttcaagagaaaagctcatgttattagaggtcttagagaactaacaaaggatgttcttcactattataagggtgatatcttagatgaactacctggcttagtagacttcagtgtgtttttgaagctcacacccaaacagaaagacattatttataagttggaagcacatgatcggttcaaaagaaatgcagtagggagtgcactgtacattcatccatgtctttcagaactttcagaggttaatgctgagcatagggctaacacctttagagatgatttagttgatagtctggtagattctatcactgtgagagatggcgtgaaggccaattttttcatgaatatcctgtcacttgctaattctgcaggagagaaagtgctagctttcagtcaatatatatctcccatgattttctttgaaaggctgctggtgaagaagaaaggctggcatgtggggaaagagatctttatgatctctggtgatactagccaagaagacagagaattggcaacggaccattttaacaactctgctgacgcaaaaattatgtttggttctatcaaggcatgtggggagggtatctccctcgttggtgcgtcgagagttgtcattctggacgtacacctgaacccatctgtcacccgtcaagcgattgggcgtgcattcaggcccggacagcagaagaaggtgtttgtgtacaggcttgtagctgccgattctgacgaggtaaaggtccatgagacagcattcaagaaagaagtcataccgaagctgtggttcgaatggagcgagcactgtactacggaagacttcaaacttggtcaaattgatattgatgactctggtgacgaactgttggatactaaagcaatccgcaaggatatcaaagcgctgtatagaaggtaacaagctttgtggccactggacaccatgtacatattgcagtgctgaccgtcgagctgatccttaaactgaagaaagaggtgacgggtgttgcggtggctacattgcgcggtcattcccagctatatccgtggaatggcggcttcttttgttcgtagtatgtgccaacttggggcagcagtcagctgatccccagacacatttctagactcttttttaggctcaagtttctgagaattaacctgctatggcgtttagccttaagtaaatatttcgttcgcaacaataataacccagtaaacctaatttgttcttgtgcgtttgtggtggtggttcttgaaatttacctggcgccttcttcctgggctagatgctatgcaggtgtcacaggttggtttgttggcatgtagaatcgggaaatgctaatctcgaaagctcgtagtttccttttcccccccgggtgacatgtttattcacctcttactagttaccacgtccatttccaactataagatatgatactttggcttttgaag

SEQ ID NO: 219025 - DNA, 3662 bp, Zea Mays
ctcgtcgtcatttcctcctaaaatccccaagcctccaatccactgaactaaaccctagacatggcgggtagagactactgccggttgccggtgcgcccgcgcgacttctgaggccccgcccccgtcccggcgtcgccggaactggctccactgtcgcccccatcactgggactgggagagtgggagttcagagccgcagacgctggggcgccgggtcaccggaaggccgggaaggaaggtgtggccgcaagacgcaggcaggaggcatcgactcgactcaccatgtctcagtcaccgggaggacgggaaggcagaggaaacctgagcgcaatggcagtgtatttacacctatagctgcaatgtattccagtggtcatgcactccctgttgcaaataggagccacggtttggtatttggcagtctgagcaaggactgggacgacattcgccagcgcaaggatcagttggtcaacttccttgctagtcttgaacgagcctctggagattctgcggcagctggcaaaatcgaagatagcaaattggccagtcctgtggagccaactgaacaaaaagagaaggctgccataatcgttcttgattcagacgatgaggacggaaatggttcaggaaacagtaagttggcatctgagactaacaaagaactcggaacatctggattgattaataatatcgcagaaaggatgacgtttaatgggagccaagcatttggaaccgtgcatacttatggagataagaacacacagattgttccgtatggtcaatgttctgctttagtgaatcagtttcctttgcaaaccagttggcaaccatctattcagtttgagagagtcgtgctgcagaaaaggcctgaggagcagcgaatgcaagatcttgtggctgctagcatagccgagaagagagcagaaacacaagtgttcctttcacttcccacagagaaaaagcgaaggagatcagaccccagtctgcatgccagtgacgatactgctactgtccctaaacaaagaaaaagtaaaggtgccacagttgtagcagcagctaatttgtcattggtttcacaacaaactgctacatcaccagaacctgacatggttatagaggaagaggagaaacataaaaatgaaagtgatggtcttgacgattattggaaagattttgcattggctgttgaaagcacaaagcttgacgaagttgatgaggcggcaattgaaaaggaagataatggaaagatggaggacatcgattgcaatcatgacatccggattcatgaagatttgggtcatgtatgccgtgtgtgtggtatgattgtgagaagagctgattcaataattgattatcagtggaaaaaggcttcaaggagaagaacgaatggctatggaggacattcaaaagatgctgatgagatagattgtggtactgttaaactgtctgaagatttcatagtcgcagatattgctattcatcctagacatgctcggataatgaaaccacatcagttggaaggtttcaactttttggttaagaatttgattggagacaagcctggaggttgcattctagctcatgccccaggtacagggaaaacatttatgcttataagcttcattcagagcttcatggcaaggtatccatctgcaaggcctcttgttgtgctgcccaaagggattctaggtatatggaagacagaaattaaacgatggcaagtgcaggatataccagtgtacgatttttactctgtcaaggctgaaaaaagagtagaacagttgcaaatcctcaaatcttgggaagacaagatgagtatactatttcttggatacaagcagttctccacaatcgtcactgatgatgggggcagcaatgtcacagctgcatgtcgagacaggctgcttaaggttcccaaccttctgatacttgacgaaggacatacacctagaaatcgggagactaatgtactcgaatcactaaatagagtggaaacaccacgcaaagtggttctttcgggtacacttttccagaatcatgttgaagaagtgtttaatatcttgaatctcgttcgcccaaagtttctcaggatggaatcatcccgtcctactgccagacgtataatgagtcaagttgaaatagttggtagaagttcgaaagggcttgctgatggcgcattcactaaggcagttgaagaaaccttattgaatgatgagaacttcaagagaaaagctcatgttattagaggtcttagagaactaacaaaggatgttcttcactattataagggtgatatcttagatgaactacctggcttagtagacttcagtgtgtttttgaagctcacacccaaacagaaagacattatttataagttggaagcacatgatcggttcaaaagaaatgcagtagggagtgcactgtacattcatccatgtctttcagaactttcagaggttaatgctgagcatagggctaacacctttagagatgatttagttgatagtctggtagattctatcactgtgagagatggcgtgaaggccaattttttcatgaatatcctgtcacttgctaattctgcaggagagaaagtgctagctttcagtcaatatatatctcccatgattttctttgaaaggctgctggtgaagaagaaaggctggcatgtggggaaagagatctttatgatctctggtgatactagccaagaagacagagaattggcaacggaccattttaacaactctgctgacgcaaaaattatgtttggttctatcaaggcatgtggggagggtatctccctcgttggtgcgtcgagagttgtcattctggacgtacacctgaacccatctgtcacccgtcaagcgattgggcgtgcattcaggcccggacagcagaagaaggtgtttgtgtacaggcttgtagctgccgattctgacgaggtaaaggtccatgagacagcattcaagaaagaagtcataccgaagctgtggttcgaatggagcgagcactgtactacggaagacttcaaacttggtcaaattgatattgatgactctggtgacgaactgttggatactaaagcaatccgcaaggatatcaaagcgctgtatagaaggtaggtaacaagctttgtggccactggacaccatgtacatattgcagtgctgaccgtcgagctgatccttaaactgaagaaagaggtgacgggtgttgcggtggctacattgcgcggtcattcccagctatatccgtggaatggcggcttcttttgttcgtagtatgtgccaacttggggcagcagtcagctgatccccagacacatttctagactcttttttaggctcaagtttctgagaattaacctgctatggcgtttagccttaagtaaatatttcgttcgcaacaataataacccagtaaacctaatttgttcttgtgcgtttgtggtggtggttcttgaaatttacctggcgccttcttcctgggctagatgctatgcaggtgtcacaggttggtttgttggcatgtagaatcgggaaatgctaatctcgaaagctcgtagtttccttttcccccccgggtgacatgtttattcacctcttactagttaccacgtccatttccaactataagatatgatactttggcttttgaag

SEQ ID NO: 219026 - DNA, 3678 bp, Zea Mays
ctcgtcgtcatttcctcctaaaatccccaagcctccaatccactgaactaaaccctagacatggcgggtagagactactgccggttgccggtgcgcccgcgcgacttctgaggccccgcccccgtcccggcgtcgccggaactggctccactgtcgcccccatcactgggactgggagagtgggagttcagagccgcagacgctggggcgccgggtcaccggaaggccgggaaggaaggtgtggccgcaagacgcaggcaggaggcatcgactcgactcaccatgtctcagtcaccgggaggacgggaaggcatatattacagcaggcagaggaaacctgagcgcaatggcagtgtatttacacctatagctgcaatgtattccagtggtcatgcactccctgttgcaaataggagccacggtttggtatttggcagtctgagcaaggactgggacgacattcgccagcgcaaggatcagttggtcaacttccttgctagtcttgaacgagcctctggagattctgcggcagctggcaaaatcgaagatagcaaattggccagtcctgtggagccaactgaacaaaaagagaaggctgccataatcgttcttgattcagacgatgaggacggaaatggttcaggaaacagtaagttggcatctgagactaacaaagaactcggaacatctggattgattaataatatcgcagaaaggatgacgtttaatgggagccaagcatttggaaccgtgcatacttatggagataagaacacacagattgttccgtatggtcaatgttctgctttagtgaatcagtttcctttgcaaaccagttggcaaccatctattcagtttgagagagtcgtgctgcagaaaaggcctgaggagcagcgaatgcaagatcttgtggctgctagcatagccgagaagagagcagaaacacaagtgttcctttcacttcccacagagaaaaagcgaaggagatcagaccccagtctgcatgccagtgacgatactgctactgtccctaaacaaagaaaaagtaaaggtgccacagttgtagcagcagctaatttgtcattggtttcacaacaaactgctacatcaccagaacctgacatggttatagaggaagaggagaaacataaaaatgaaagtgatggtcttgacgattattggaaagattttgcattggctgttgaaagcacaaagcttgacgaagttgatgaggcggcaattgaaaaggaagataatggaaagatggaggacatcgattgcaatcatgacatccggattcatgaagatttgggtcatgtatgccgtgtgtgtggtatgattgtgagaagagctgattcaataattgattatcagtggaaaaaggcttcaaggagaagaacgaatggctatggaggacattcaaaagatgctgatgagatagattgtggtactgttaaactgtctgaagatttcatagtcgcagatattgctattcatcctagacatgctcggataatgaaaccacatcagttggaaggtttcaactttttggttaagaatttgattggagacaagcctggaggttgcattctagctcatgccccaggtacagggaaaacatttatgcttataagcttcattcagagcttcatggcaaggtatccatctgcaaggcctcttgttgtgctgcccaaagggattctaggtatatggaagacagaaattaaacgatggcaagtgcaggatataccagtgtacgatttttactctgtcaaggctgaaaaaagagtagaacagttgcaaatcctcaaatcttgggaagacaagatgagtatactatttcttggatacaagcagttctccacaatcgtcactgatgatgggggcagcaatgtcacagctgcatgtcgagacaggctgcttaaggttcccaaccttctgatacttgacgaaggacatacacctagaaatcgggagactaatgtactcgaatcactaaatagagtggaaacaccacgcaaagtggttctttcgggtacacttttccagaatcatgttgaagaagtgtttaatatcttgaatctcgttcgcccaaagtttctcaggatggaatcatcccgtcctactgccagacgtataatgagtcaagttgaaatagttggtagaagttcgaaagggcttgctgatggcgcattcactaaggcagttgaagaaaccttattgaatgatgagaacttcaagagaaaagctcatgttattagaggtcttagagaactaacaaaggatgttcttcactattataagggtgatatcttagatgaactacctggcttagtagacttcagtgtgtttttgaagctcacacccaaacagaaagacattatttataagttggaagcacatgatcggttcaaaagaaatgcagtagggagtgcactgtacattcatccatgtctttcagaactttcagaggttaatgctgagcatagggctaacacctttagagatgatttagttgatagtctggtagattctatcactgtgagagatggcgtgaaggccaattttttcatgaatatcctgtcacttgctaattctgcaggagagaaagtgctagctttcagtcaatatatatctcccatgattttctttgaaaggctgctggtgaagaagaaaggctggcatgtggggaaagagatctttatgatctctggtgatactagccaagaagacagagaattggcaacggaccattttaacaactctgctgacgcaaaaattatgtttggttctatcaaggcatgtggggagggtatctccctcgttggtgcgtcgagagttgtcattctggacgtacacctgaacccatctgtcacccgtcaagcgattgggcgtgcattcaggcccggacagcagaagaaggtgtttgtgtacaggcttgtagctgccgattctgacgaggtaaaggtccatgagacagcattcaagaaagaagtcataccgaagctgtggttcgaatggagcgagcactgtactacggaagacttcaaacttggtcaaattgatattgatgactctggtgacgaactgttggatactaaagcaatccgcaaggatatcaaagcgctgtatagaaggtaggtaacaagctttgtggccactggacaccatgtacatattgcagtgctgaccgtcgagctgatccttaaactgaagaaagaggtgacgggtgttgcggtggctacattgcgcggtcattcccagctatatccgtggaatggcggcttcttttgttcgtagtatgtgccaacttggggcagcagtcagctgatccccagacacatttctagactcttttttaggctcaagtttctgagaattaacctgctatggcgtttagccttaagtaaatatttcgttcgcaacaataataacccagtaaacctaatttgttcttgtgcgtttgtggtggtggttcttgaaatttacctggcgccttcttcctgggctagatgctatgcaggtgtcacaggttggtttgttggcatgtagaatcgggaaatgctaatctcgaaagctcgtagtttccttttcccccccgggtgacatgtttattcacctcttactagttaccacgtccatttccaactataagatatgatactttggcttttgaag

SEQ ID NO: 219027 - DNA, 3668 bp, Zea Mays
ctcgtcgtcatttcctcctaaaatccccaagcctccaatccactgaactaaaccctagacatggcgggtagagactactgccggttgccggtgcgcccgcgcgacttctgaggccccgcccccgtcccggcgtcgccggaactggctccactgtcgcccccatcactgggactgggagagtgggagttcagagccgcagacgctggggcgccgggtcaccggaaggccgggaaggaaggtgtggccgcaagacgcaggcaggaggcatcgactcgactcaccatgtctcagtcaccgggaggacgggaaggcatatattacagcaggcagaggaaacctgagcgcaatggcagtgtatttacacctatagctgcaatgtattccagtggtcatgcactccctgttgcaaataggagccacggtttggtatttggcagtctgagcaaggactgggacgacattcgccagcgcaaggatcagttggtcaacttccttgctagtcttgaacgagcctctggagattctgcggcagctggcaaaatcgaagatagcaaattggccagtcctgtggagccaactgaacaaaaagagaaggctgccataatcgttcttgattcagacgatgaggacggaaatggttcaggaaacagtaagttggcatctgagactaacaaagaactcggaacatctggattgattaataatatcgcagaaaggatgacgtttaatgggagccaagcatttggaaccgtgcatacttatggagataagaacacacagattgttccgtatggtcaatgttctgctttagtgaatcagtttcctttgcaaaccagttggcaaccatctattcagtttgagagagtcgtgctgcagaaaaggcctgaggagcagcgaatgcaagatcttgtggctgctagcatagccgagaagagagcagaaacacaagtgttcctttcacttcccacagagaaaaagcgaaggagatcagaccccagtctgcatgccagtgacgatactgctactgtccctaaacaaagaaaaagtaaaggtgccacagttgtagcagcagctaatttgtcattggtttcacaacaaactgctacatcaccagaacctgacatggttatagaggaagaggagaaacataaaaatgaaagtgatggtcttgacgattattggaaagattttgcattggctgttgaaagcacaaagcttgacgaagttgatgaggcggcaattgaaaaggaagataatggaaagatggaggacatcgattgcaatcatgacatccggattcatgaagatttgggtcatgtatgccgtgtgtgtggtatgattgtgagaagagctgattcaataattgattatcagtggaaaaaggcttcaaggagaagaacgaatggctatggaggacattcaaaagatgctgatgagatagattgtggtactgttaaactgtctgaagatttcatagtcgcagatattgctattcatcctagacatgctcggataatgaaaccacatcagttggaaggtttcaactttttggttaagaatttgattggagacaagcctggaggttgcattctagctcatgccccaggtacagggaaaacatttatgcttataagcttcattcagagcttcatggcaaggtatccatctgcaaggcctcttgttgtgctgcccaaagggattctaggtatatggaagacagaaattaaacgatggcaagtgcaggatataccagtgtacgatttttactctgtcaaggctgaaaaaagagtagaacagttgcaaatcctcaaatcttgggaagacaagatgagtatactatttcttggatacaagcagttctccacaatcgtcactgatgatgggggcagcaatgtcacagctgcatgtcgagacaggctgcttaaggttcccaaccttctgatacttgacgaaggacatacacctagaaatcgggagactaatgtactcgaatcactaaatagagtggaaacaccacgcaaagtggttctttcgggtacacttttccagaatcatgttgaagaagtgtttaatatcttgaatctcgttcgcccaaagtttctcaggatggaatcatcccgtcctactgccagacgtataatgagtcaagttgaaatagttggtagaagttcgaaagggcttgctgatggcgcattcactaaggcagttgaagaaaccttattgaatgatgagaacttcaagagaaaagctcatgttattagaggtcttagagaactaacaaaggatgttcttcactattataagggtgatatcttagatgaactacctggcttagtagacttcagtgtgtttttgaagctcacacccaaacagaaagacattatttataagttggaagcacatgatcggttcaaaagaaatgcagtagggagtgcactgtacattcatccatgtctttcagaactttcagaggttaatgctgagcatagggctaacacctttagagatgatttagttgatagtctggtagattctatcactgtgagagatggcgtgaaggccaattttttcatgaatatcctgtcacttgctaattctgcaggagagaaagtgctagctttcagtcaatatatatctcccatgattttctttgaaaggctgctggtgaagaagaaaggctggcatgtggggaaagagatctttatgatctctggtgatactagccaagaagacagagaattggcaacggaccattttaacaactctgctgacgcaaaaattatgtttggttctatcaaggcatgtggggagggtatctccctcgttggtgcgtcgagagttgtcattctggacgtacacctgaacccatctgtcacccgtcaagcgattgggcgtgcattcaggcccggacagcagaagaaggtgtttgtgtacaggcttgtagctgccgattctgacgaggtaaaggtccatgagacagcattcaagaaagaagtcataccgaagctgtggttcgaatggagcgagcactgtactacggaagacttcaaacttggtcaaattgatattgatgactctggtgacgaactgttggatactaaagcaatccgcaaggatatcaaagcgctgtatagaaggtaacaagctttgtggccactggacaccatgtacatattgcagtgctgaccgtcgagctgatccttaaactgaagaaagagggtgttgcggtggctacattgcgcggtcattcccagctatatccgtggaatggcggcttcttttgttcgtagtatgtgccaacttggggcagcagtcagctgatccccagacacatttctagactcttttttaggctcaagtttctgagaattaacctgctatggcgtttagccttaagtaaatatttcgttcgcaacaataataacccagtaaacctaatttgttcttgtgcgtttgtggtggtggttcttgaaatttacctggcgccttcttcctgggctagatgctatgcaggtgtcacaggttggtttgttggcatgtagaatcgggaaatgctaatctcgaaagctcgtagtttccttttcccccccgggtgacatgtttattcacctcttactagttaccacgtccatttccaactataagatatgatactttggcttttgaag

SEQ ID NO: 219028 - DNA, 3406 bp, Zea Mays
ctcgtctctgtttcgtctagaagctgttgcaaacatgccgttgcatatattacagcaggcagaggaaacctgagcgcaatggcagtgtatttacacctatagctgcaatgtattccagtggtcatgcactccctgttgcaaataggagccacggtttggtatttggcagtctgagcaaggactgggacgacattcgccagcgcaaggatcagttggtcaacttccttgctagtcttgaacgagcctctggagattctgcggcagctggcaaaatcgaagatagcaaattggccagtcctgtggagccaactgaacaaaaagagaaggctgccataatcgttcttgattcagacgatgaggacggaaatggttcaggaaacagtaagttggcatctgagactaacaaagaactcggaacatctggattgattaataatatcgcagaaaggatgacgtttaatgggagccaagcatttggaaccgtgcatacttatggagataagaacacacagattgttccgtatggtcaatgttctgctttagtgaatcagtttcctttgcaaaccagttggcaaccatctattcagtttgagagagtcgtgctgcagaaaaggcctgaggagcagcgaatgcaagatcttgtggctgctagcatagccgagaagagagcagaaacacaagtgttcctttcacttcccacagagaaaaagcgaaggagatcagaccccagtctgcatgccagtgacgatactgctactgtccctaaacaaagaaaaagtaaaggtgccacagttgtagcagcagctaatttgtcattggtttcacaacaaactgctacatcaccagaacctgacatggttatagaggaagaggagaaacataaaaatgaaagtgatggtcttgacgattattggaaagattttgcattggctgttgaaagcacaaagcttgacgaagttgatgaggcggcaattgaaaaggaagataatggaaagatggaggacatcgattgcaatcatgacatccggattcatgaagatttgggtcatgtatgccgtgtgtgtggtatgattgtgagaagagctgattcaataattgattatcagtggaaaaaggcttcaaggagaagaacgaatggctatggaggacattcaaaagatgctgatgagatagattgtggtactgttaaactgtctgaagatttcatagtcgcagatattgctattcatcctagacatgctcggataatgaaaccacatcagttggaaggtttcaactttttggttaagaatttgattggagacaagcctggaggttgcattctagctcatgccccaggtacagggaaaacatttatgcttataagcttcattcagagcttcatggcaaggtatccatctgcaaggcctcttgttgtgctgcccaaagggattctaggtatatggaagacagaaattaaacgatggcaagtgcaggatataccagtgtacgatttttactctgtcaaggctgaaaaaagagtagaacagttgcaaatcctcaaatcttgggaagacaagatgagtatactatttcttggatacaagcagttctccacaatcgtcactgatgatgggggcagcaatgtcacagctgcatgtcgagacaggctgcttaaggttcccaaccttctgatacttgacgaaggacatacacctagaaatcgggagactaatgtactcgaatcactaaatagagtggaaacaccacgcaaagtggttctttcgggtacacttttccagaatcatgttgaagaagtgtttaatatcttgaatctcgttcgcccaaagtttctcaggatggaatcatcccgtcctactgccagacgtataatgagtcaagttgaaatagttggtagaagttcgaaagggcttgctgatggcgcattcactaaggcagttgaagaaaccttattgaatgatgagaacttcaagagaaaagctcatgttattagaggtcttagagaactaacaaaggatgttcttcactattataagggtgatatcttagatgaactacctggcttagtagacttcagtgtgtttttgaagctcacacccaaacagaaagacattatttataagttggaagcacatgatcggttcaaaagaaatgcagtagggagtgcactgtacattcatccatgtctttcagaactttcagaggttaatgctgagcatagggctaacacctttagagatgatttagttgatagtctggtagattctatcactgtgagagatggcgtgaaggccaattttttcatgaatatcctgtcacttgctaattctgcaggagagaaagtgctagctttcagtcaatatatatctcccatgattttctttgaaaggctgctggtgaagaagaaaggctggcatgtggggaaagagatctttatgatctctggtgatactagccaagaagacagagaattggcaacggaccattttaacaactctgctgacgcaaaaattatgtttggttctatcaaggcatgtggggagggtatctccctcgttggtgcgtcgagagttgtcattctggacgtacacctgaacccatctgtcacccgtcaagcgattgggcgtgcattcaggcccggacagcagaagaaggtgtttgtgtacaggcttgtagctgccgattctgacgaggtaaaggtccatgagacagcattcaagaaagaagtcataccgaagctgtggttcgaatggagcgagcactgtactacggaagacttcaaacttggtcaaattgatattgatgactctggtgacgaactgttggatactaaagcaatccgcaaggatatcaaagcgctgtatagaaggtaacaagctttgtggccactggacaccatgtacatattgcagtgctgaccgtcgagctgatccttaaactgaagaaagaggtgacgggtgttgcggtggctacattgcgcggtcattcccagctatatccgtggaatggcggcttcttttgttcgtagtatgtgccaacttggggcagcagtcagctgatccccagacacatttctagactcttttttaggctcaagtttctgagaattaacctgctatggcgtttagccttaagtaaatatttcgttcgcaacaataataacccagtaaacctaatttgttcttgtgcgtttgtggtggtggttcttgaaatttacctggcgccttcttcctgggctagatgctatgcaggtgtcacaggttggtttgttggcatgtagaatcgggaaatgctaatctcgaaagctcgtagtttccttttcccccccgggtgacatgtttattcacctcttactagttaccacgtccatttccaactataagatatgatactttggcttttgaag

SEQ ID NO: 219029 - DNA, 2743 bp, Zea Mays
ccctggtcgctcatggtattaaattttgcctgcttgttggcaagaaatacactcaaatttttgatgtaaggtcaagtcaaccatgtgagattgcaagtcaacaaaagattccaagaactttgtggctgttggagtgttggtattgtggaaattttcatgcacaaccataacaacgactacacctttattacaattgtgagttgtattgtgaaatgcttgacgaagttgatgaggcggcaattgaaaaggaagataatggaaagatggaggacatcgattgcaatcatgacatccggattcatgaagatttgggtcatgtatgccgtgtgtgtggtatgattgtgagaagagctgattcaataattgattatcagtggaaaaaggcttcaaggagaagaacgaatggctatggaggacattcaaaagatgctgatgagatagattgtggtactgttaaactgtctgaagatttcatagtcgcagatattgctattcatcctagacatgctcggataatgaaaccacatcagttggaaggtttcaactttttggttaagaatttgattggagacaagcctggaggttgcattctagctcatgccccaggtacagggaaaacatttatgcttataagcttcattcagagcttcatggcaaggtatccatctgcaaggcctcttgttgtgctgcccaaagggattctaggtatatggaagacagaaattaaacgatggcaagtgcaggatataccagtgtacgatttttactctgtcaaggctgaaaaaagagtagaacagttgcaaatcctcaaatcttgggaagacaagatgagtatactatttcttggatacaagcagttctccacaatcgtcactgatgatgggggcagcaatgtcacagctgcatgtcgagacaggctgcttaaggttcccaaccttctgatacttgacgaaggacatacacctagaaatcgggagactaatgtactcgaatcactaaatagagtggaaacaccacgcaaagtggttctttcgggtacacttttccagaatcatgttgaagaagtgtttaatatcttgaatctcgttcgcccaaagtttctcaggatggaatcatcccgtcctactgccagacgtataatgagtcaagttgaaatagttggtagaagttcgaaagggcttgctgatggcgcattcactaaggcagttgaagaaaccttattgaatgatgagaacttcaagagaaaagctcatgttattagaggtcttagagaactaacaaaggatgttcttcactattataagggtgatatcttagatgaactacctggcttagtagacttcagtgtgtttttgaagctcacacccaaacagaaagacattatttataagttggaagcacatgatcggttcaaaagaaatgcagtagggagtgcactgtacattcatccatgtctttcagaactttcagaggttaatgctgagcatagggctaacacctttagagatgatttagttgatagtctggtagattctatcactgtgagagatggcgtgaaggccaattttttcatgaatatcctgtcacttgctaattctgcaggagagaaagtgctagctttcagtcaatatatatctcccatgattttctttgaaaggctgctggtgaagaagaaaggctggcatgtggggaaagagatctttatgatctctggtgatactagccaagaagacagagaattggcaacggaccattttaacaactctgctgacgcaaaaattatgtttggttctatcaaggcatgtggggagggtatctccctcgttggtgcgtcgagagttgtcattctggacgtacacctgaacccatctgtcacccgtcaagcgattgggcgtgcattcaggcccggacagcagaagaaggtgtttgtgtacaggcttgtagctgccgattctgacgaggtaaaggtccatgagacagcattcaagaaagaagtcataccgaagctgtggttcgaatggagcgagcactgtactacggaagacttcaaacttggtcaaattgatattgatgactctggtgacgaactgttggatactaaagcaatccgcaaggatatcaaagcgctgtatagaaggtgagcttccctccttcccttacaattgttttgcatgctagttgcctcatctagtgcctttgtaggtaggtaacaagctttgtggccactggacaccatgtacatattgcagtgctgaccgtcgagctgatccttaaactgaagaaagaggtgacgggtgttgcggtggctacattgcgcggtcattcccagctatatccgtggaatggcggcttcttttgttcgtagtatgtgccaacttggggcagcagtcagctgatccccagacacatttctagactcttttttaggctcaagtttctgagaattaacctgctatggcgtttagccttaagtaaatatttcgttcgcaacaataataacccagtaaacctaatttgttcttgtgcgtttgtggtggtggttcttgaaatttacctggcgccttcttcctgggctagatgctatgcaggtgtcacaggttggtttgttggcatgtagaatcgggaaatgctaatctcgaaagctcgtagtttccttttcccccccgggtgacatgtttattcacctcttactagttaccacgtccatttccaactataagatatgatactttggcttttgaag

SEQ ID NO: 219030 - DNA, 358 bp, Zea Mays
atttgaacaacccctgcatctccctcgccccgctcccctctctctagcgcctccctgccctcgggcacgaccaaccctttccggcggcgcagctccgcccttggctctcctgcgcgcagctcggcgtggcgtggcccggctccggcgagcggtcgaagaaaccccgacgccaagcaccttccccaccggagcttcgctgacctgctgtccatgttttccctcgccgttcttcatcgtgatggtctggtgagactgtgatccgtttccgagcttcgagggatcgatgatcaagcttggcgaccaagtgatcgaactcttcgagttctacgaggatgaagaccctgagcatctgtttggt

SEQ ID NO: 219031 - DNA, 429 bp, Zea Mays
atttgaacaacccctgcatctccctcgccccgctcccctctctctagcgcctccctgccctcgggcacgaccaacccttttcggcggcgcagctccgcccttggctctcctgcgcgcagctcggcgtggcgtggcccggctccggcgagcggtcgaagaaacccggacgccaagcaccttccccaccggagcttcgctgacctgctgtccatgttttccctcgccgttcttcatcgtgatggtctggtgagactgtgatccgtttccgagcttcgagggatcgatgatcaagcttggcgaccaagtgatcgaactcttcgagttctacgaggatgaagaccctgagcatctgtttggtgaaggcaagtgtcccttgacctatctttgtcctatacattctataattcaattcccgcatttacacagtta

SEQ ID NO: 219032 - DNA, 2386 bp, Zea Mays
ggccgtctccggcctgcctgcccgattccatccccatgtccgccaccaccaccgagtccccggagagcccggagcggcgatcagatgcggttgcgtggctacggtcgttgttggcgggctctggcctgcctctgcccccgccgcacgtgtccgacgacgacctacggtcctttctcgccgatggcgtgatcctcggcgcagcgctacgcaggctcggatgtgcttctacgtccaaccagggcggagcctcagcggcggcggcggcggggagtgatgtcgagaggttcgtcgcggcaatggagcgcctgggccttcccagctttgccgcctctgaccatgacaggggcccaatgttagctgtcatagtctgtcttcttgcactgaggggtctgtttggttccaatgttggggaaggcttgcattgtagccttgaagcaaaaagtaggatgcacaacatggagtttcccataagggtgaacggctgctgtactcaaaattgtcagtctagagaaaagggtgaagggagcataccaaaggtctccagaagtccagctacgtcagagccatcatctccgatatcaatgcctgaactatcttctatttcaaggcacactcgacataattttcatgaagtcttccatctgagacaaggaatttactctgacatgcctatttctaaagttttggagataatgaaatccaccaacttggataatgcccctactcagtcacttttgagttttgtgaatgccatccttgatcggatcattgaaaatgagaatggagaaattccttatgtaggctactcaaaagcaatacaaatatcgcttgcttgttgagaaaggtaataatggagattgaacgccgcatttctactcaagcagaacacataagaaatcaaaatagccttatcagagcacgtgaagagaaatataaatcaaggataagagtactagaggcacttgcaagtgggacaggtggacaaatgcaaataaattcaagtgcggcaaatggaaaaataaatattgctgaagatcatgtgctccagatgatgataaacaaaagcaaaattggagaaagaagattagttgataaagatatgtcaagcttgatggctcagaaggaagatgtagctagattgacaaaggataaggaagatatggttaggctgctgaaagataaggaagatataattagattgatgaaagagaaggaagaaatggttttgctgattaaggagaaagatgatatggttacctcgaggaaggagaagattgatggaagagatcaatcagccaatgcatatgcgaataaatcaactacatataatgatgaaaccattaggatgataaaggaaaaagaagacagtaatattacaattatgaaactaaagagcaaattggaagctgtaaaatcattatttgaagagagccacaaccagttagaatctgcaaaggaggaggttcttaagcttcaaaaggacaaggaaaatagtgccaatataatatcaaaactcaggcaagagctttcgttagcacatgaatcttataagacacatattcaagaactggagagtagtgctttgcaggcaagcaaattctttgaacatagaataaaagaagtagatctcatgctcgaagattctataaagaaaagaacagatctagaggaagtattaaaatctagaatggatacttggaagaagaaggaaatcatggatttgaggttatcttctgtttccattaggcatgaaatccaaaactgccagcgaagatggtctgaagaacttaatggccttggacaaagtctcaacatactgataaatgattctgaaaattatcatgctgctttagaagaaaatagaaaattatacaacgagattcaggaactaaaaggaaatataagagtctactgccggataaggccttttattcctggggaggatcagaaatctactacaattaaatatgttggtgataatggggatctgataattgcaaatcccacacgccatggaaaagaggggagcaagtcgttcaaattcaacaaagtttttggccccactacttctcaagatgacgtattcaaggacattgaaccacttattagatcagttcttgatggttataatgtttgcatttttgcgtatggtcaaactggatcagggaaaacatacacaatgactggacctgaaaatgcaacagagaatgaatggggtgtcaattacagagctctgaatgatctgttccatatttcacataatcgtggggataccatcatgtatgaaataaatgttcaaatgattgagatatacaatgaacaaatccgtgatcttctttgcagcaatggttcagagaagaaatatccttttccccttcatttattt

SEQ ID NO: 219033 - DNA, 2580 bp, Zea Mays
agcaatggattatcggtgattgctatttggactttggagatggggcagggttgaaccttgtgaagacttttgttactttccggggtcatatgctagttctggtggcagctgggcataggaaagtaggaaggcacaaacaaggaggggaggacaattatttgtgtttcttaattttagttatttggaccggcgtttattctagggctatccaatttgcagttcgtaaaatgtagtgggacaaatctttcaattctacgatattttggatttcagggattgtactattgcatctgtagagggtcatccttgtgaaacttgcgatttattcattgattgccagaacaagatcagtttttttttcagcactgaccaagtgaccatgcatttgagtgccctgttgcgaagtgcctatatgttagggatagggaatgacaacggcagtgctgttttccatgataaattaggatgctgaagcttcaaattagcagtgaacaatgtcaaatggattatgtaattctgtccagggattgagatgttgtttttaatgactatgcacatggtttacttttaatgctaagatacatgaaatttgatagtgacatatattaacaagaaaaccattgggggtccaatggtccatcattcgtagcaaatcaacctatctataccactttagattttatatcctcattttttgtgtctcttgttgggtctcatatgtaggctgtagcctaccccaacttgcttgggaatggaaggctttcttgttgctgataaaaaaacaatgttcatcttatagcctacttatatttgtttcatataattatttattaaacattcagggatcaatggccatttgagaaagtgccttgtgatgctttggggctaagagaactatacatccatagacacactgaaatacatcagatgaaatttggtgaccccatatcagctctttattacttagatcctgcgggaacaacaccaagtcatgtaatgatggataggaactccatctggttttgtcaaggtccagcagccaaaaaactgaatattgatttgccagaaactgaaattgtagaaacacacaggaaccatagtgcaaggatcacttgtctgaggctatttcctctgattgatacgccactgtttcgaagtgatacacaaaaaaatgaaaaagcattagtcacttcaagcacagacagaacaatccgtctttgttggaagggctactcacgctgttacaagggccattcagcgcctgtgactgctctggctgacagattgcttatggatggtgaatctaaactacttgcaagtggaggggaagactgcaccattcgtctatggtctatgagtacgagggcgaaaaatcacccactaatagcaacatttcatgggcatgaaaaggcactgtcatttttatctgttgcgtggcataaatcgtccctgttggtgagctgttccaaagactcaaaggttaaagtttgggacacagtgtctccttcgagtggttcatcatcatgtgtaggcagtgctcacctcaactcaaacgggccaccaattgctatgaaatgccatgaatccctttgctatatcgctgctggagctgaagtgacagcgattgacttgaggacaatgaagaaggcttctgtccttgcactccagaaccacagaatactttcttgtgagatgatgccttctgaatggttaatatgtactggcacgaaagacagggctcttctatgggacatccgcaaggctcaggagctcccaaacacagtggcggagatgcaatcgagcggcccggtgacattgcttcacttggaccaatacaagctccaaagcttcgtggaacaaccagacaaggtgatggtcacagaccttttctccattggaatcctgtggggacgagcgagcactcacggtcacggccatgggcacggggggatcctgggttctgcatggcacgtacatgacaaaataggcaagcaacaagaaggcaggaaggaccccagctgcccagcagcccaccctgcaggttttccacagctgtttggcctggctgcccagcccacaggaatgcctgatgcgatggttcctctgcctctccggccggcaggcggcagcagcttataaaacttgagaggggactcaattttcattggtttgtgtacaccggcggcggcaacagagtggagtaggacgacgacgacaacacgaaagcgaagagggagcaggctgtgccttactatataacaacatgcatgcatgggcgctttgtcatgtatgtatatagcagttgaaatctgattagaattctgggatgcaaaagttccagatgatcaataactatttttgaacgtaaggaaatttagaaggtatttgaatacagtagagataatagttagttagctaaaaatatactagtagaattagctagctaataactagttagctaactagtagctaatttactaagaataactaatagttgggtgtttggatatctctagttaattttagccactaactattatctctagtgcattcaaacaccccctagatagtggtattagg

SEQ ID NO: 219034 - DNA, 2445 bp, Zea Mays
ccagcctcgccatggcctgccgccccctgcgcgccgccgcgtattgcgacgcggtctggtaccgcctcttcagatcctgcgggaacaacaccaagtcatgtaatgatggataggaactccatctggttttgtcaaggtccagcagccaaaaaactgaatattgatttgccagaaactgaaattgtagaaacacacaggaaccatagtgcaaggatcacttgtctgaggctatttcctctgattgatacgccactgtttcgaagtgatacacaaaaaaatgaaaaagcattagtcacttcaagcacagacagaacaatccgtctttgttggaagggctactcacgctgttacaagggccattcagcgcctgtgactgctctggctgacagattgcttatggatggtgaatctaaactacttgcaagtggaggggaagactgcaccattcgtctatggtctatgagtacgagggcgaaaaatcacccactaatagcaacatttcatgggcatgaaaaggcactgtcatttttatctgttgcgtggcataaatcgtccctgttggtgagctgttccaaagactcaaaggttaaagtttgggacacagtgtctccttcgagtggttcatcatcatgtgtaggcagtgctcacctcaactcaaacgggccaccaattgctatgaaatgccatgaatccctttgctatatcgctgctggagctgaagtgacagcgattgacttgaggacaatgaagaaggcttctgtccttgcactccagaaccacagaatactttcttgtgagatgatgccttctgaatggttaatatgtactggcacgaaagacagggctcttctatgggacatccgcaaggctcaggagctcccaaacacagtggcggagatgcaatcgagcggcccggtgacattgcttcacttggaccaatacaaggtggtgaccggagtgccgtcggacggccaggtccacgtctgggaaacacggacggggcactcgctgaacacgttgggctgtggcgaaccttcgagactgggtgtgcggagcagggtgtcggccatggccgtggacgggtgcaggatcgccatggcgggcagctctccggaaggctgcatgctgcactaccgtgacttcgcgacggcttctgcccctgtagtgtccttgccaggcaaggagaaggaggtctccaggttctggaggccccaggaattcgacgacagcgaggaagaggagtattgattaatcattacatccccagttccaaattataagtcactttgacttttttttacgtaaattttgccatgcatagtaaaattgatgtaccaaaaaaagagtcaaagctacatagtttggaactgaattagtattacgctatctcggtgagcttccagttctgctacatgcagacaagagaaaagcttgtatatataaaaagaaagaaaggtatgtcaactgggcctgggtgcgcggcgtgattgcatcatgcatcccacagctgcagcctgcaggatactacagaatgctagaggtagaagtgataccagaggttgcattaccatgggcgccgcatgtgttggtcgctataccgctgttgcttgtgttgtttgtgtcgcctttggacttggtgaggataatgccgatgctacgggcaattaatgcgcctatgctttgctgtttgttttatgcctgcagctccaaagcttcgtggaacaaccagacaaggtgatggtcacagaccttttctccattggaatcctgtggggacgagcgagcactcacggtcacggccatgggcacggggggatcctgggttctgcatggcacgtacatgacaaaataggcaagcaacaagaaggcaggaaggaccccagctgcccagcagcccaccctgcaggttttccacagctgtttggcctggctgcccagcccacaggaatgcctgatgcgatggttcctctgcctctccggccggcaggcggcagcagcttataaaacttgagaggggactcaattttcattggtttgtgtacaccggcggcggcaacagagtggagtaggacgacgacgacaacacgaaagcgaagagggagcaggctgtgccttactatataacaacatgcatgcatgggcgctttgtcatgtatgtatatagcagttgaaatctgattagaattctgggatgcaaaagttccagatgatcaataactatttttgaacgtaaggaaatttagaaggtatttgaatacagtagagataatagttagttagctaaaaatatactagtagaattagctagctaataactagttagctaactagtagctaatttactaagaataactaatagttgggtgtttggatatctctagttaattttagccactaactattatctctagtgcattcaaacaccccctagatagtggtattagg

SEQ ID NO: 219035 - DNA, 712 bp, Zea Mays
cttgcttcgctgcgctgcgctgccgggaactgtggccaccgggcccgccgccagacccccggtgttctcctcgccggcgatgtcggcgccgcctgtgcgtacgctcgccgaccttgatggcgacgtgctggctcactgcgccggctacctcggcgcccgcgacgtcgccagcctcgccatggcctgccgccccctgcgcgccgccgcgtattgcgacgcggtctggtaccgcctcttcagggatcaatggccatttgagaaagtgccttgtgatgctttggggctaagagaactatacatccatagacacactgaaatacatcagatgaaatttggtgaccccatatcagctctttattacttagatcctgcgggaacaacaccaagtcatgtaatgatggataggaactccatctggttttgtcaagtgagttgaaatataacctttttttgtctgaacctgcacacgatgtataatttcttctttgcagggtccagcagccaaaaaactgaatattgatttgccagaaactgaaattgtagaaacacacaggaaccatagtgcaaggatcacttgtctgaggctatttcctctgattgatacgccactgtttcgaagtgatacacaaaaaaatgaaaaagcattagtcacttcaagcacagacagaacaatccgtctttgttggaagagatgaagatgtggatactggca

SEQ ID NO: 219036 - DNA, 828 bp, Zea Mays
ctaaatcgtctctaattatggtttcaggaggagagtggagatcatcccgatgatgatgcgaggtggaaggctcacgggtttgacctctcaggttctgaggtgcttcagcacggagatatttgtcagcagattatcattctatacgacagaggaagaattcaaagatattttttcaccatttggcaccgtagaggaagctcgacttatgagagaccaccaaactggaaggatgaagggatttggttttgtcaaatattcatcgcaagcagaggcagagaaagctgtcaaggcaatggatggcaagattctacgtggaagattgatctttgtggagatggcaaaaggacacgaaagcaagtaggacaccctccccacgagaggatttcactgaacatgaaacatgagagcgccatcagcttatgccagatggcaaatatcccaaattctcaattgatgttgcaacttatatacaaagcacaagttaattttagctagcttatctttgataacactgctaccttgccatctgaaaggttgccgtgcattggtatccgttgacctgtgtaagaaatgttggcagctctgtgccctacgaactagcctggttgattaaccaagatctgttcaaaattaaagccagtaaaacatgaatattgttaaagatttcagcaatgaatcgttgagaaaagattgataaagacgttctaattataatatactcgttagcctttaacgagtgggtctagttagcctttaacgagtgggtctagtggccgcgaggttagataagaaaatttagtgagaagaaaatttagtatgggggtcttc

SEQ ID NO: 219037 - DNA, 311 bp, Zea Mays
tctctaattatgaggagagtggagatcatcccgatgatgatgcgaggtggaaggctcacgggtttgacctctcaggttctgaggtgcttcagcacggagatatttgtcagcagattatcattctatacgacagaggaagaattcaaagatattttttcaccatttggcaccgtagaggaagctcgacttatgagagaccaccaaactggaaggatgaagggatttggttttgtcaaatattcatcgcaagcagaggcagagaaagctgtcaaggcaatggatggcaaggcaactcccaacctggatgactg

SEQ ID NO: 219038 - DNA, 1931 bp, Zea Mays
ggtgaatgtgagcattaattaattggttttgtagtcgatggagatcaaagagttgcggtgctaattagacgggatgccctttttcctattgagcacgttcccatccttatatttgcccttggtatcatagatggaaaactctaagtcaaaatggtatgcttttgctgcaatagaagtgtcaaactgtcaatccgggattagatacctcatacccatcccataaagttataactatctctatccccataccatcataaatataaaattcatctcataccatctccattcgggtatgaaatccgtaatggatctccatccccgacaaaaaaaataattatattatattttatatgacattaacggtcacacgacactcaacaacaatacaccactaataaatctgacatgtgacatgtaacaaaaaaatattgtttaactatgcaaaataacaaaaataaagtgacgcgtgggctggtagctgtccacggtgaatatttgcttaaaagggtttggagaggtagggttagttgttgtgtttattgactattaagatgtacacctaattttactaagtaaatattatccatggttaatcgagttcggattctatctccttgtactcatatccacacacccaatggggaagaatttctctcaaatttgtattgattaaaatcttctcatactctaaccctgatagaaaaattcacaatgagttaatgggtatcgggtccaggtgcccattgacacctctagctgctaaggtcttttgaccacatttgcttggaagaagaccttgtccatgatagaccacaaaaatgctttgacagtgtgggccatgaaaatcttgtgaaatagttctttaatcgttccaaaaggctatacacccaagagcaaatgaagaacaagtgggttgtatcataccaagtggaagaataaggccaagaatagcattgatacctacaaaatttgcatcgtcaaggtgctgaatcaggttttgggcattgtcatctcatctcctcaacaccatgtccatcatgaagctgtcacaggaggccgcctgctacaagaatcccaccacttcctgtgcttcgctctccccagggaccacctagacttaatggtttcaggaggagagtggagatcatcccgatgatgatgcgaggtggaaggctcacgggtttgacctctcaggttctgaggtgcttcagcacggagatatttgtcagcagattatcattctatacgacagaggaagaattcaaagatattttttcaccatttggcaccgtagaggaagctcgacttatgagagaccaccaaactggaaggatgaagggatttggttttgtcaaatattcatcgcaagcagaggcagagaaagctgtcaaggcaatggatggcaagattctacgtggaagattgatctttgtggagatggcaaaaggacacgaaagcaagtaggacaccctccccacgagaggatttcactgaacatgaaacatgagagcgccatcagcttatgccagatggcaaatatcccaaattctcaattgatgttgcaacttatatacaaagcacaagttaattttagctagcttatctttgataacactgctaccttgccatctgaaaggttgccgtgcattggtatccgttgacctgtgtaagaaatgttggcagctctgtgccctacgaactagcctggttgattaaccaagatctgttcaaaattaaagccagtaaaacatgaatattgttaaagatttcagcaatgaatcgttgagaaaagattgataaagacgttctaattataatatactcgttagcctttaacgagtgggtctagttagcctttaacgagtgggtctagtggccgcgaggttagataagaaaatttagtgagaagaaaatttagtatgggggtcttc

SEQ ID NO: 219039 - DNA, 583 bp, Zea Mays
atggctgctggcagctggctgggcaaaaggtactagtatggagacatggagattggagagtggtcctgtgcggtgcttactgcttagtgcttagtgttgtctgaattggtgttgtgcggtgcttagacatggagataggtactatggattgaattgatgttgtctgttctgttgtgcggtgcttagacctgaccacctgttgtctgttctctattgactgttgtgcttgtgccattgtgcacttgtgccgttgtgcgccttgtgcctgagctagtgcctgtgccacactgccagtctgccactgcgcaatgcgcatgccgcatgatgccgttcaggcgttcagctatggactgaagcggtgaagcctgagctagtgcggacgtgcggtgaagcctaagctagtgcagacgcctgatggctgatgtctgaagcctgatgccgttcagctgttgtgcactatttcactgttttaatttttaaataatctgtgactggaatattgtttcactgttttaatttttaaataatgtgtactgtgtctgtgtactctatagtctatattctctctattattgtttcactg

SEQ ID NO: 219040 - DNA, 122 bp, Zea Mays
attcctgtactactggacacatagctattcgacgttcgttgattcaaattccaaggcgtcgtttcatcgacagatttcttgagaacagacgggcacatttcacaactgtgatatcggattga

SEQ ID NO: 219041 - DNA, 2173 bp, Zea Mays
gcaaaattgaaaatttcaaatggggcggtggcaaattttgccgcgatcttcgtctaaaagaaggaaacccactcctccaaggctccaacctccttccctcctcgcactctgtgttgcagacctccgccaccggaggttcctgcgggtgcgtttgccctgacagaacactggaggcccctgcgggtgcgctacccctgaccaagcaaccacggactagtctaccgccgtccgcagcatccgttcaccttcaccccgcctgcgcgctctctctctgcgacgactgggtgggctactgcagccgccgccgccctacgccgggtgccgaggccttcgccggtctcttcgctggtgacgagcactcaccaggctgcttcatcgtgaaaaattgttgcatgcagccacgcacatggtttgcactatccacctacacagtgatctatgcttctgaccccacatgccttaggtctatctgcaccagaaagaagtgaatcgtttcaagcgattgattttgggaaccaatttggtaatcagtacaatggagtgcaacagagaagaagccttgaaagccagggaaattgctgttaagaagttggaaagcagagattttgttggtgctaaaaggattgcccttaaagcacagaggattttcccagagatagagaacataccccagctgttaactgtctgtgaagtacattgtgcagcagaagcaaaagtaaatggaatgttggatttttatggaattctccaagtagaaggaacagcagatgaggtgaccataaagaagcaatatcgtaagcttgtcctctcacttcaccctgataaaaacagttatgctggtgcagaatctgctttcaagtttgttgcagaagcatactcaacattgtctgatcgaaccaaacgatatgcatatgatgtcaaatggagggctgctcccaaagttgcaccaaagcaggctacacagccgacacaaccaaatcaggctacacaacagaaacaggatgcaaaaccaaagcatgttgctaaaccaaagcaggctgcacagccaaagcaggctacacaaccaatgtggactacagagccaatcaacaaaaatagcacaaatagtagtgcagcaggatatggaccttggacattttggaccgtatgcattcactgtaaaacaaaatataagtaccatggtgacatactcaatcgtcagatccgctgtcagaattgcaggcagaatttctttgcacaccagacaagtacagaggatgtgccttctgcattctcatcaaaaacagcaaatagtgctgcgcagcaaggctgctctacaaatatcttttctagagagaacaaagaggggcctgtgatggaaggagttaaattttcagcaaagaattctactgtaccagattttggtgacaggaaaaacctaggtggtggggtggatacatcagcagggccaggttctgcagaaatccctactccacggagatcttctaggagaaaggcttgtgctgatgccaacaacatcctgaattctccaaagaaaaagagtcggacactcaaagattggttctcaaatgctacctccagttctaataaagtagttgatgataatgttgcccatgctgatggacatgttagtgaacctcatgtgtctagcaaaacagataatcaagatagttgtgttgtcaatgaaggcaataaaagaaacactaaaacaacttgtgatccacctgctgagaagccttggaatactgggagtttcacgtaccctgacccagaattttttgacttcgacaagtgcagagatgtcaaactgtttgcagttgatcagatatgggcactttatgatgaattcgatgccatgccaagattctatgctagaataagacatgttaataccaccaacttcagagttaagtacacttggctggagcattctacagtgaatgatgatgaggaaaaatggattgataataaacttcctgtggcttgtgggaactttacgttaggaaacacagaggagtcacaagatcccctcatgttttctcacatggtttcgtgggttaaaggaagaaaaaggggttcttatgtaatatatccaaatataggtgaggtttgggctctttataagggctggagtatgcagtgggtctcagatgcagacagtcatagatcctac

SEQ ID NO: 219042 - DNA, 1798 bp, Zea Mays
caaacctgtgcttcgcagaacagccacgcacatggtttgcactatccacctacacagtgatctatgcttctgaccccacatgccttaggtctatctgcaccagaaagaagtgaatcgtttcaagcgattgattttgggaaccaatttggtaatcagtacaatggagtgcaacagagaagaagccttgaaagccagggaaattgctgttaagaagttggaaagcagagattttgttggtgctaaaaggattgcccttaaagcacagaggattttcccagagatagagaacataccccagctgttaactgtctgtgaagtacattgtgcagcagaagcaaaagtaaatggaatgttggatttttatggaattctccaagtagaaggaacagcagatgaggtgaccataaagaagcaatatcgtaagcttgtcctctcacttcaccctgataaaaacagttatgctggtgcagaatctgctttcaagtttgttgcagaagcatactcaacattgtctgatcgaaccaaacgatatgcatatgatgtcaaatggagggctgctcccaaagttgcaccaaagcaggctacacagccgacacaaccaaatcaggctacacaacagaaacaggatgcaaaaccaaagcatgttgctaaaccaaagcaggctgcacagccaaagcaggctacacaaccaatgtggactacagagccaatcaacaaaaatagcacaaatagtagtgcagcaggatatggaccttggacattttggaccgtatgcattcactgtaaaacaaaatataagtaccatggtgacatactcaatcgtcagatccgctgtcagaattgcaggcagaatttctttgcacaccagacaagtacagaggatgtgccttctgcattctcatcaaaaacagcaaatagtgctgcgcagcaaggctgctctacaaatatcttttctagagagaacaaagaggggcctgtgatggaaggagttaaattttcagcaaagaattctactgtaccagattttggtgacaggaaaaacctaggtggtggggtggatacatcagcagggccaggttctgcagaaatccctactccacggagatcttctaggagaaaggcttgtgctgatgccaacaacatcctgaattctccaaagaaaaagagtcggacactcaaagattggttctcaaatgctacctccagttctaataaagtagttgatgataatgttgcccatgctgatggacatgttagtgaacctcatgtgtctagcaaaacagataatcaagatagttgtgttgtcaatgaaggcaataaaagaaacactaaaacaacttgtgatccacctgctgagaagccttggaatactgggagtttcacgtaccctgacccagaattttttgacttcgacaagtgcagagatgtcaaactgtttgcagttgatcagatatgggcactttatgatgaattcgatgccatgccaagattctatgctagaataagacatgttaataccaccaacttcagagttaagtacacttggctggagcattctacagtgaatgatgatgaggaaaaatggattgataataaacttcctgtggcttgtgggaactttacgttaggaaacacagaggagtcacaagatcccctcatgttttctcacatggtttcgtgggttaaaggaagaaaaaggggttcttatgtaatatatccaaatataggtgaggtttgggctctttataagggctggagtatgcagtgggtctcagatgcagacagtcatagatcctac

SEQ ID NO: 219043 - DNA, 1830 bp, Zea Mays
caaacctgtgcttcgcagaacaggctgcttcatcgtgaaaaattgttgcatgcagccacgcacatggtttgcactatccacctacacagtgatctatgcttctgaccccacatgccttaggtctatctgcaccagaaagaagtgaatcgtttcaagcgattgattttgggaaccaatttggtaatcagtacaatggagtgcaacagagaagaagccttgaaagccagggaaattgctgttaagaagttggaaagcagagattttgttggtgctaaaaggattgcccttaaagcacagaggattttcccagagatagagaacataccccagctgttaactgtctgtgaagtacattgtgcagcagaagcaaaagtaaatggaatgttggatttttatggaattctccaagtagaaggaacagcagatgaggtgaccataaagaagcaatatcgtaagcttgtcctctcacttcaccctgataaaaacagttatgctggtgcagaatctgctttcaagtttgttgcagaagcatactcaacattgtctgatcgaaccaaacgatatgcatatgatgtcaaatggagggctgctcccaaagttgcaccaaagcaggctacacagccgacacaaccaaatcaggctacacaacagaaacaggatgcaaaaccaaagcatgttgctaaaccaaagcaggctgcacagccaaagcaggctacacaaccaatgtggactacagagccaatcaacaaaaatagcacaaatagtagtgcagcaggatatggaccttggacattttggaccgtatgcattcactgtaaaacaaaatataagtaccatggtgacatactcaatcgtcagatccgctgtcagaattgcaggcagaatttctttgcacaccagacaagtacagaggatgtgccttctgcattctcatcaaaaacagcaaatagtgctgcgcagcaaggctgctctacaaatatcttttctagagagaacaaagaggggcctgtgatggaaggagttaaattttcagcaaagaattctactgtaccagattttggtgacaggaaaaacctaggtggtggggtggatacatcagcagggccaggttctgcagaaatccctactccacggagatcttctaggagaaaggcttgtgctgatgccaacaacatcctgaattctccaaagaaaaagagtcggacactcaaagattggttctcaaatgctacctccagttctaataaagtagttgatgataatgttgcccatgctgatggacatgttagtgaacctcatgtgtctagcaaaacagataatcaagatagttgtgttgtcaatgaaggcaataaaagaaacactaaaacaacttgtgatccacctgctgagaagccttggaatactgggagtttcacgtaccctgacccagaattttttgacttcgacaagtgcagagatgtcaaactgtttgcagttgatcagatatgggcactttatgatgaattcgatgccatgccaagattctatgctagaataagacatgttaataccaccaacttcagagttaagtacacttggctggagcattctacagtgaatgatgatgaggaaaaatggattgataataaacttcctgtggcttgtgggaactttacgttaggaaacacagaggagtcacaagatcccctcatgttttctcacatggtttcgtgggttaaaggaagaaaaaggggttcttatgtaatatatccaaatataggtgaggtttgggctctttataagggctggagtatgcagtgggtctcagatgcagacagtcatagatcctac

SEQ ID NO: 219044 - DNA, 2439 bp, Zea Mays
cgcgcggccgcgaacgtcgccacggtcatggtcgccatgacggagccgcgcgacccgccgaccggctgcgccctgttcggcatctacaacggcatgttccgccgccgccgctccgcgtccatgacctccctccacaggatcaacggggccgaggccgaggccgaggccgcggcgccgccgaaccagaagcccgccgcgcaccgcgactcctccctcgcgcgccgccccagcgccatgcccgtgccggcggcggcgcagaacggcaggagcaggccggccgccaaggcagcgcccgccgcggagccggcggcggagtacagcggcatggccgcggagctggacaggatgatcctcgaccaccagagggtcaagggcaccgcgcagctggtgcgcgccacctcgggcaacatgatgctgcaccgcaacctcggcaacctgaacgcgggcggcagggcggcgaacgagcggaaggcgccccacgggtacgcgtcctccggcatggggaacatcgtcagggagccccggccggcacctgcagcggggggccagctgtgccgggcgctgtcgcaccgcacggaccccgagaagctcaaggagatgggcaacgaggagtaccgccaggggcactacgcggaggcggtggcgctctacgaccaggccatcatcatggacgccagccgcccggcgtactggagcaacaaggcggccgcgctcgccgcgctcggacgcctcatcgaggccgtcgccgactgcaaggaggccgtccggatcgatccttcgtacgatcgcgcgcaccaccggcttgccggcttgtacctcaggagaacctgacaaagccatctaccacatgaagcaatcctccaacgaatccgcgggcgcagacgtttcccgtgcgcaatcggtgaagagccgcatcgccaggagcaacgacgcgcgcaggctcaagaactggatcacggtgctccaggaagcgcaggccgccgtggccgacggcgccgactgtgctccgcaggtgatggcgttgcaagccgaggcgttgctgaggctgcaacggcacgacgaagccgactcgcttctcagcggcgccggcgcgccaaggttcggggtcgacgagtcgaccaagttcttcggcaccttcggccacgcctacttcctcatcgtgcgagctcaggtcgacatggctgctggaaggttcgaggacgcggtggcgacggcgcagacggcgtttcagctggacccaagcaaccgggaggtctcggtcgttcagaggagggccaaggcggcggccgcggcgcggctgcgtggcaacgacctcttcaaggccgccaagttcgcggaggcgtgcgccgcgtacggcgagggcctcgacagggagcccggcaacgccgtgctgctctgcaaccgcgcggcgtgccacgccaagctcgggcggcacgagaaggccgtcgaggactgcagcgccgcgctcgacgtgcgcccctcgtacagcaaggcgcggctcaggagggcggactgcaacgtcaagctggagaggtgggaagcgtccttgagagattaccaggtgctggtccaagaactgccggagaatgaggacgtgaagaaggctctctctgaggtcgaagccaagctcaagggccaaaggcatggggccgcagcagccagatctcagcactgacgtcatgttttctttactctgtcggctaccagagaaatcaaccgcgactgcttaagacttaagaggacaagattttcgaaagaacaattctgcatgcgccgatgaacaatttgttataccaaatctgtatgttttttttgtccaccatatacaccaatttgaaaaggaggtcaagagatggaactgtacataatacttgctccagtgtgatgtatagttagttgaatgcgtttggttccttgcgaaaagaaagctgatgtatttggttgcaggggtgccggtgacggatcccagagatttgtaaggtttcagtttggctctgaaaatgacaactaccgactgaagactctgctctagaaatgaatgatcatctcgaatctaaattatgtgatttgttcctttgagcaaggcctcttttgctgcagctgcagccattctcctgctgttcccatcttacaacttcagatgtaaaactttgatcgatgacttaattattttcttttgaagaaaaccctccaaagaattcagggaatttcagctgttcacctaaaaagaaaaggaaattaggctcaaaacttaacaagtgcactatttattagaagaaattctgcaaaataaaaactgagcatgacaacctaaacaactacaattcagtggtaaacctgaaggacaatcagacggctaggtgaatgagagcaaattaaaaattctttctaatagccattattgaactaatcctaaaaaatccaaaatctccaaacaag

SEQ ID NO: 219045 - DNA, 2537 bp, Zea Mays
atgacggagccgcgcgacccgccgaccggctgcgccctgttcggcatctacaacggcatgttccgccgccgccgctccgcgtccatgacctccctccacaggatcaacggggccgaggccgaggccgaggccgcggcgccgccgaaccagaagcccgccgcgcaccgcgactcctccctcgcgcgccgccccagcgccatgcccgtgccggcggcggcgcagaacggcaggagcaggccggccgccaaggcagcgcccgccgcggagccggcggcggagtacagcggcatggccgcggagctggacaggatgatcctcgaccaccagagggtcaagggcaccgcgcagctggtgcgcgccacctcgggcaacatgatgctgcaccgcaacctcggcaacctgaacgcgggcggcagggcggcgaacgagcggaaggcgccccacgggtacgcgtcctccggcatggggaacatcgtcagggagccccggccggcacctgcagcggggggccagctgtgccgggcgctgtcgcaccgcacggaccccgagaagctcaaggagatgggcaacgaggagtaccgccaggggcactacgcggaggcggtggcgctctacgaccaggccatcatcatggacgccagccgcccggcgtactggagcaacaaggcggccgcgctcgccgcgctcggacgcctcatcgaggccgtcgccgactgcaaggaggccgtccggatcgatccttcgtacgatcgcgcgcaccaccggcttgccggcttgtacctcaggtaccgcgtacatctcgccgattttcagatcagagagaggcacagtctacagatttctgccatccattgccttgcccctccgtcgtgtcactgctcgtccaattctgcttcaactcttcgtcaccagttgtgcggagaacctgacaaagccatctaccacatgaagcaatcctccaacgaatccgcgggcgcagacgtttcccgtgcgcaatcggtgaagagccgcatcgccaggagcaacgacgcgcgcaggctcaagaactggatcacggtgctccaggaagcgcaggccgccgtggccgacggcgccgactgtgctccgcaggtgatggcgttgcaagccgaggcgttgctgaggctgcaacggcacgacgaagccgactcgcttctcagcggcgccggcgcgccaaggttcggggtcgacgagtcgaccaagttcttcggcaccttcggccacgcctacttcctcatcgtgcgagctcaggtcgacatggctgctggaaggttcgaggacgcggtggcgacggcgcagacggcgtttcagctggacccaagcaaccgggaggtctcggtcgttcagaggagggccaaggcggcggccgcggcgcggctgcgtggcaacgacctcttcaaggccgccaagttcgcggaggcgtgcgccgcgtacggcgagggcctcgacagggagcccggcaacgccgtgctgctctgcaaccgcgcggcgtgccacgccaagctcgggcggcacgagaaggccgtcgaggactgcagcgccgcgctcgacgtgcgcccctcgtacagcaaggcgcggctcaggagggcggactgcaacgtcaagctggagaggtgggaagcgtccttgagagattaccaggtgctggtccaagaactgccggagaatgaggacgtgaagaaggctctctctgaggtcgaagccaagctcaagggccaaaggcatggggccgcagcagccagatctcagcactgacgtcatgttttctttactctgtcggctaccagagaaatcaaccgcgactgcttaagacttaagaggacaagattttcgaaagaacaattctgcatgcgccgatgaacaatttgttataccaaatctgtatgttttttttgtccaccatatacaccaatttgaaaaggaggtcaagagatggaactgtacataatacttgctccagtgtgatgtatagttagttgaatgcgtttggttccttgcgaaaagaaagctgatgtatttggttgcaggggtgccggtgacggatcccagagatttgtaaggtttcagtttggctctgaaaatgacaactaccgactgaagactctgctctagaaatgaatgatcatctcgaatctaaattatgtgatttgttcctttgagcaaggcctcttttgctgcagctgcagccattctcctgctgttcccatcttacaacttcagatgtaaaactttgatcgatgacttaattattttcttttgaagaaaaccctccaaagaattcagggaatttcagctgttcacctaaaaagaaaaggaaattaggctcaaaacttaacaagtgcactatttattagaagaaattctgcaaaataaaaactgagcatgacaacctaaacaactacaattcagtggtaaacctgaaggacaatcagacggctaggtgaatgagagcaaattaaaaattctttctaatagccattattgaactaatcctaaaaaatccaaaatctccaaacaag

SEQ ID NO: 219046 - DNA, 442 bp, Zea Mays
gatttgcattagggtataggaggcaaccatcgtttcttgttatcttgggtatcacatgagccttccctacccagccgtcatgtccctccgttccctgatctatctaaacaaatgaagaagaagagaaggggcctgctcctgtcgctagatctggtctgcccaacaaaaaccgaagtctggaggagtggccaaccctcatattgctgctccttgttcttatattcgaattgtgctgcagcttggctttggaaaagctaggtgaaaataaggagagaagggaggaggtcgtggtctccttgaggtcaagaacatgtaccgcatgatgaggagcatggaggatggtgtggcaagttcgtgagaggtctaggacatcgtctcccagtcaactttgggttgctggatcattgtctccttatgatgtaactatttatttattttgtac

SEQ ID NO: 219047 - DNA, 484 bp, Zea Mays
atgagccttccctacccagccgtcatgtccctccgttccctgatctatctaaacaaatgaagaagaagagaaggggcctgctcctgtcgctagatctgcttggctttggaaaagctaggtgaaaataaggagagaagggaggaggtcgtggtctccttgaggtgtgctaattggatatgtctgctcgagggatgggagtagctgcacttcacacacatagatgacactttaaccgacgtttggcttgctactaatttaagtgaatggaagagaagtctttaactagcttgttttaccttttttttaattagtgcttttgctttgtcttagaggtgatgtgtcaaaattcaatctattttggcataacagtgtagttctagtagcaccctagagttgttttcttaataactgtggggagttttcatcttctcaatatagtatgaattttcggggtgttataatcctggcccaaggcttaatagaa

SEQ ID NO: 219048 - DNA, 395 bp, Zea Mays
atcgtttcttgttatcttgggtatcacatgagccttccctacccagccgtcatgtccctccgttccctgatctatctaaacaaatgaagaagaagagaaggggcctgctcctgtcgctagatctggtctgcccaacaaaaaccgaagtctggaggagtggccaaccctcatattgctgctccttgttcttatattcgaattgtgctgcagcttggctttggaaaagctaggtgaaaataaggagagaagggaggaggtcgtggtctccttgaggttgcagtgctctgtatcagacttaattcattgtcgccttattggtaaaggcatggaaatgtagcggtggtttgctacagttttgacttgttatttttttatcacctacactttaataatct

SEQ ID NO: 219049 - DNA, 6223 bp, Zea Mays
ctactaggaaaaacctagacacgaagtccaacccaaatctcaatatcccaaccctccgatccccatttccatccactccgacaccaatcctccgctccgaccaccgccggagaaatggggcggcgccgccggttcgcgcagctggacgatgacgacgacgacgacgaagacgtgcccatcaatttcaagccctcgggtggcgcctcctcctcggacgccaaacccaggaagccccagccgccgccgcagcagcgccgcgagcaggaggccgagacgaagactcgccgccgccggggacggcccaagcgccgccgcgacccggggagcgaggatgaggagcccgaggagctagagctgcaaacggaggatccccgtgaggaggagatcacggaggcggtgcccgtagctgtaggggacccggtcaagatcactggcaaggggaagaagcagaagaagcactatgcttccttcgagtacgagggcaacagcttcgagctggaggaccccgtgcttctcacgcctgaggacagcaatcagaagccctatgtcgccatcctcaaggatataacagaaactgatgggagcctatatgtaactggccaatggttttatagaccagaagaggctgacaaaaaggagggtggattctgggtagcacgagatacacgagagctattttacagttttcatactgatgatgtgcctgcagaatcagttatgcacaaatgtgtggtccatttcattcctcagcaaaaacagattcccagtcgaaagcagcatccgggatttattgtccagaaggtctatgatgcagttgagaagaaactgtggaacctaacagacaaggactatgaggataacaagcagcaagagattgatcttctggttaagaaaacaatagaccgtattgggcagcttcctgatctcgaacctgaagagacacctcttgagaacaattatttgtcaaataaacgaggcctgcgtaagaaacctgttaaccctatagatgtaacaagagaacctccagttggcaaatccgagcagtttgcaaaagcagagacacctggaagtgataagatacggaattatgatacccttgttaagtataaagtacttactggacattctcatcgtgataggtggctcgataaattgatagaaagtattccgcttgcatcaaaggagaatgctggaacatctgctgatgctaattctacagccaaaagttcaatcagtggttcacctgcaaaggatgttggttctgctgaaaatgaaaaatcatatggacttgatgttgttgttgagataatgactgcattagaaagatctgcatatgaagctcttggaacagattttgggaaatataaccagaaactgcgacaactacagttcaacatcaagaatatctctaaacttcgcaggaggctgatggacaaggagcttgatcctccagttcttttaaccatgtcccccgatgaattaaaggagaactgcgtatcattatattaagaagcaagaagggtctaagatagtccgaatacaaggtgccacaattggcggccctctataacctggccaccaaaagtgccaccaaaaggcaactccctagctacaaaccacctacaaagacacccacaaactcctaagagcagaagctcctgcaataccccttaaggtagcatcttcctgaatattttgcaagagtgtgtcgacatttggtgaggctgcataaaacacacatcacacatgcattcctatgtttccaaatccaccaggtcaccaagatgacagtggagttaaaaccttttctgtgaattttctgcatatctccaccaatcttggaacaccttatcattaactgtagacgccagatgctgcaaacccactttactcagaatccggaatcaaatttccctagcaaatacacaagatacaagaatgtgctgaactgtttcctgttcctggtcgcatagcagacatctctgggtgatccatgcctcgttgtgcaagactgtgcaagacgatcagcagtccaacatctattgagggaggccaaccaaataaaacatttacaccgaggtggaacccagctcttccagatcctattggctggctcaaaggatactgcaccagcaaggaaatgctcatatgcagatttcgcagagtactctcctgaagatgttggcagccatcggtgttgatcaggaaccgcaggctggagatgaacttcctgtaatatatcccagaccatgaagaattccagaataacctgtattggtagactaccagagatgtcttgaacccatctatgctcctccaaagcctgctggactgttttttttcttaattcttatagagatacgggtagacaaagctggagcaatctgagtcagggacatcccattaagccaattatccgaccagaacatagtggaggtgccaaagcctgctggactgtttttttttcttaattcttatagagatacgggtagacaaagctggagcaatctgagtcagggacatcccattaagccaattatccgaccagaacatagtggaggtgccgttaccaactacagaacacattgatgctgcaaataaggctgcagccatagggtgtgtcctaacctcaaattcagcccaaggcctattcggttgagtcttcttaagccaaagccatctaatatttagagcccaacccataatttccaagtcatgaatacccagacctccttgagcaagtggtctgcatacccttgtccatccaacagaacaatgcccacctttgatactgtcctgcctttccacagaaaacccctcctgattttatcaatagccttgacaacccatttagggcattgtagagctataaggtgatagacgggaatggcagaaagcacggatttaactaacacagctctacctgccgggtgcagtagagccgccttccaccttggcaacttatctgcaactttgttaatgaggtccaaaaaaacactccttggaagtttcctaacagaaagaggaagacccaaatatttgcaggaaaaagtcaataccctgcaggggagaaaaaaaactgtgcagcaataatatcctgctcctcacactgaattggtgttaggctgcatttattcaagcttgtgatcagacctgaagccataccaaagatccatataatttctttgatcacagcaaactcttcttcctttggcttcaaaaacaggactacatcatctgcatatagcgatacccgttgaccagagcctcttcttaacaaaggctgcagcaggcccaaattactagccttttggattagataattcagcacatccataacaaggataaagagcattagggagagaggatccccctgtctcaacccacgctcgtggcaaattagatccctaggttctccattcaccaacactctagtcgaggaggagtgcagcaatttagcaatcatattgcaccacaatgggccaaaaccaagatgccggagaacttcaaacaggaatggccaagagactgagtcaaaagccttaccaatgtccaatttaagtagggcaaccggatccttctgcttgtggacggctctggcagtttgctggaccataagataattgtcatgtatgctcctccctttcacaaatgcactttggtttgaggaaaccagacccggaagcttgagcgcatgcctaccggccataattttattgacaatcttagcaagggaacacatccggtgcacatatggtgcacatgaactaacaaagttcacaaaaaattctgaaaaaaatcatacatatattttttttccattttactccaattatatacaaaatttcaagttcaaattcattatactttagctgtaataaaaatataaattttctgacaagtttaaattagaaaatcagctaaaatgttatcttttttattacagataaaatataacgaacttgaacttgaaattttgtatataataggagtaggatggaaataatatgtatggttttttagaatattttgtgaactttgttagtttatgtgcactggatatgttcactcttagcaaagctatgaattaggctaatcggccgaaaatctataacctctatggcctcctgtttttaggcagcaaaatcacataagcagagtcaaggagctgcagtttagaaacatccccatggaagatcatccctaaggcagccataaaattgttcttaataaccggccaagcatagtgctggacctcggatcgactggctaagcgagggttaccccatcaagcagcatccctttttgtgatcagtcagaggaaaccatacatcacatccttttctcctgtgtgctgcccagagaagtttgggatgggattttgaggaaacttaatcttgatatggttccacgccccaattcctctatcccgttttggacctggtggtgtaaggccactgttgctatccacagattttaaaaaagaatttcttggtcattttagtctcttgggagctttggaagcacagaaatgcgtgcatgttcgatggagttcaacctcagccacaagcgatttttgctcaatcggctgttgaatcccacatgtggtgcttggctggggcttctaaccttaagaagctcctcctaagggaggctccttaggctgggggtggtcgtttaggtcgtttgcagctgctgtgtaaagtgttcgagtgctcctctccttttattttttttctgccttaatgaaatgacacacagttctcctgcgtagttctaaaaaaaataaccggccaagcacatttataaaaacgaccagtaaaccatttggacctggggctttataagaaggtaggagattaatagtactccacacctcctcagagatcaaaagatcaagacgcaagaggtcgatagatggtcgatggaaggcctctaagtttagagacaattccctgtgtgtagcagttcccaacagattattaaagaaatcccaaatcacagttttcttatcttcctgttcaaccaagattctgtccccaactttctattttctgatgaagtttttcttctttctatatcttgcgtgatggtgaaaataggaagtattagcatctccttccttcatccaattaagctcacttctgagcctagccatggttctcttcatagaggacaacccccataaatgctgtttaagacggcagcgcagccactcttcattaaaggataagacccttgagtccctggccatctccagacgatgaataatctccttggccaaaaacagttgtcgtttgaccagcccaattcttttctcactccatgactgtagctgcctcacaaaacttttcagtttatccacaaagcgctgcagtgaacaaaccgcatctaccggctggctgatcccaagaagagcacacctcatccatgaaaccatccaatctaactcaaaaactttcaaaatgaaacgtctcttgtcttgtgtgagttcattcattctaacagaagaggacaatgatctgagatcaaggaagcagaactttctaaaaactcggccggggagggaaagaccgccctcccggtattatattaagaagagaccgaaacaatggtcccggccgagaaaatccccgaaccctggcctccatcactaacgggccggcgtcaactgtacactctacaacgacccagccggagggtggcacacaggacatcgtaggacatcgtaacccgagagtggatggggcataacgtgggaatttttttaaccaagcctgaaaattcgccccagagggggatcagactcaggacttggaggtgctacttggaagcccttaaccactaggctagaggccctttcgtgaagcagaactttctagaacagaatctggaaaaagatcccccaatcactggtatggaagacccgatccaaacgaacaagagtagaagatctctcgttggaccaggtgaactttattcccagcagaggtaactcaattaaatgcaaatcattaataagcttcctgaatctccccatcatagctctgttgagattgttattgttcttgtcctcagaacgggaatatgaggttaaaatcaccaccaatcgtccaaggaccctagcagaaagacctaaccaagcaaagctcttgcaaaaactgattttatttttctcattctggggcgataaaccccagtaaccaccacggagacccattac

SEQ ID NO: 219050 - DNA, 5732 bp, Zea Mays
ctactaggaaaaacctagacacgaagtccaacccaaatctcaatatcccaaccctccgatccccatttccatccactccgacaccaatcctccgctccgaccaccgccggagaaatggggcggcgccgccggttcgcgcagctggacgatgacgacgacgacgacgaagacgtgcccatcaatttcaagccctcgggtggcgcctcctcctcggacgccaaacccaggaagccccagccgccgccgcagcagcgccgcgagcaggaggccgagacgaagactcgccgccgccggggacggcccaagcgccgccgcgacccggggagcgaggatgaggagcccgaggagctagagctgcaaacggaggatccccgtgaggaggagatcacggaggcggtgcccgtagctgtaggggacccggtcaagatcactggcaaggggaagaagcagaagaagcactatgcttccttcgagtacgagggcaacagcttcgagctggaggaccccgtgcttctcacgcctgaggacagcaatcagaagccctatgtcgccatcctcaaggatataacagaaactgatgggagcctatatgtaactggccaatggttttatagaccagaagaggctgacaaaaaggagggtggattctgggtagcacgagatacacgagagctattttacagttttcatactgatgatgtgcctgcagaatcagttatgcacaaatgtgtggtccatttcattcctcagcaaaaacagattcccagtcgaaagcagcatccgggatttattgtccagaaggtctatgatgcagttgagaagaaactgtggaacctaacagacaaggactatgaggataacaagcagcaagagattgatcttctggttaagaaaacaatagaccgtattgggcagcttcctgatctcgaacctgaagagacacctcttgagaacaattatttgtcaaataaacgaggcctgcgtaagaaacctgttaaccctatagatgtaacaagagaacctccagttggcaaatccgagcagtttgcaaaagcagagacacctggaagtgataagatacggaattatgatacccttgttaagtataaagtacttactggacattctcatcgtgataggtggctcgataaattgatagaaagtattccgcttgcatcaaaggagaatgctggaacatctgctgatgctaattctacagccaaaagttcaatcagtggttcacctgcaaaggatgttggttctgctgaaaatgaaaaatcatatggacttgatgttgttgttgagataatgactgcattagaaagatctgcatatgaagctcttggaacagattttgggaaatataaccagaaactgcgacaactacagttcaacatcaagaatatctctaaacttcgcaggaggctgatggacaaggagcttgatcctccagttcttttaaccatgtcccccgatgaattaaagacatctctgggtgatccatgcctcgttgtgcaagactgtgcaagacgatcagcagtccaacatctattgagggaggccaaccaaataaaacatttacaccgaggtggaacccagctcttccagatcctattggctggctcaaaggatactgcaccagcaaggaaatgctcatatgcagatttcgcagagtactctcctgaagatgttggcagccatcggtgttgatcaggaaccgcaggctggagatgaacttcctgtaatatatcccagaccatgaagaattccagaataacctgtattggtagactaccagagatgtcttgaacccatctatgctcctccaaagcctgctggactgttttttttcttaattcttatagagatacgggtagacaaagctggagcaatctgagtcagggacatcccattaagccaattatccgaccagaacatagtggaggtgccaaagcctgctggactgtttttttttcttaattcttatagagatacgggtagacaaagctggagcaatctgagtcagggacatcccattaagccaattatccgaccagaacatagtggaggtgccgttaccaactacagaacacattgatgctgcaaataaggctgcagccatagggtgtgtcctaacctcaaattcagcccaaggcctattcggttgagtcttcttaagccaaagccatctaatatttagagcccaacccataatttccaagtcatgaatacccagacctccttgagcaagtggtctgcatacccttgtccatccaacagaacaatgcccacctttgatactgtcctgcctttccacagaaaacccctcctgattttatcaatagccttgacaacccatttagggcattgtagagctataaggtgatagacgggaatggcagaaagcacggatttaactaacacagctctacctgccgggtgcagtagagccgccttccaccttggcaacttatctgcaactttgttaatgaggtccaaaaaaacactccttggaagtttcctaacagaaagaggaagacccaaatatttgcaggaaaaagtcaataccctgcaggggagaaaaaaaactgtgcagcaataatatcctgctcctcacactgaattggtgttaggctgcatttattcaagcttgtgatcagacctgaagccataccaaagatccatataatttctttgatcacagcaaactcttcttcctttggcttcaaaaacaggactacatcatctgcatatagcgatacccgttgaccagagcctcttcttaacaaaggctgcagcaggcccaaattactagccttttggattagataattcagcacatccataacaaggataaagagcattagggagagaggatccccctgtctcaacccacgctcgtggcaaattagatccctaggttctccattcaccaacactctagtcgaggaggagtgcagcaatttagcaatcatattgcaccacaatgggccaaaaccaagatgccggagaacttcaaacaggaatggccaagagactgagtcaaaagccttaccaatgtccaatttaagtagggcaaccggatccttctgcttgtggacggctctggcagtttgctggaccataagataattgtcatgtatgctcctccctttcacaaatgcactttggtttgaggaaaccagacccggaagcttgagcgcatgcctaccggccataattttattgacaatcttagcaagggaacacatccggtgcacatatggtgcacatgaactaacaaagttcacaaaaaattctgaaaaaaatcatacatatattttttttccattttactccaattatatacaaaatttcaagttcaaattcattatactttagctgtaataaaaatataaattttctgacaagtttaaattagaaaatcagctaaaatgttatcttttttattacagataaaatataacgaacttgaacttgaaattttgtatataataggagtaggatggaaataatatgtatggttttttagaatattttgtgaactttgttagtttatgtgcactggatatgttcactcttagcaaagctatgaattaggctaatcggccgaaaatctataacctctatggcctcctgtttttaggcagcaaaatcacataagcagagtcaaggagctgcagtttagaaacatccccatggaagatcatccctaaggcagccataaaattgttcttaataaccggccaagcatagtgctggacctcggatcgactggctaagcgagggttaccccatcaagcagcatccctttttgtgatcagtcagaggaaaccatacatcacatccttttctcctgtgtgctgcccagagaagtttgggatgggattttgaggaaacttaatcttgatatggttccacgccccaattcctctatcccgttttggacctggtggtgtaaggccactgttgctatccacagattttaaaaaagaatttcttggtcattttagtctcttgggagctttggaagcacagaaatgcgtgcatgttcgatggagttcaacctcagccacaagcgatttttgctcaatcggctgttgaatcccacatgtggtgcttggctggggcttctaaccttaagaagctcctcctaagggaggctccttaggctgggggtggtcgtttaggtcgtttgcagctgctgtgtaaagtgttcgagtgctcctctccttttattttttttctgccttaatgaaatgacacacagttctcctgcgtagttctaaaaaaaataaccggccaagcacatttataaaaacgaccagtaaaccatttggacctggggctttataagaaggtaggagattaatagtactccacacctcctcagagatcaaaagatcaagacgcaagaggtcgatagatggtcgatggaaggcctctaagtttagagacaattccctgtgtgtagcagttcccaacagattattaaagaaatcccaaatcacagttttcttatcttcctgttcaaccaagattctgtccccaactttctattttctgatgaagtttttcttctttctatatcttgcgtgatggtgaaaataggaagtattagcatctccttccttcatccaattaagctcacttctgagcctagccatggttctcttcatagaggacaacccccataaatgctgtttaagacggcagcgcagccactcttcattaaaggataagacccttgagtccctggccatctccagacgatgaataatctccttggccaaaaacagttgtcgtttgaccagcccaattcttttctcactccatgactgtagctgcctcacaaaacttttcagtttatccacaaagcgctgcagtgaacaaaccgcatctaccggctggctgatcccaagaagagcacacctcatccatgaaaccatccaatctaactcaaaaactttcaaaatgaaacgtctcttgtcttgtgtgagttcattcattctaacagaagaggacaatgatctgagatcaaggaagcagaactttctaaaaactcggccggggagggaaagaccgccctcccggtattatattaagaagagaccgaaacaatggtcccggccgagaaaatccccgaaccctggcctccatcactaacgggccggcgtcaactgtacactctacaacgacccagccggagggtggcacacaggacatcgtaggacatcgtaacccgagagtggatggggcataacgtgggaatttttttaaccaagcctgaaaattcgccccagagggggatcagactcaggacttggaggtgctacttggaagcccttaaccactaggctagaggccctttcgtgaagcagaactttctagaacagaatctggaaaaagatcccccaatcactggtatggaagacccgatccaaacgaacaagagtagaagatctctcgttggaccaggtgaactttattcccagcagaggtaactcaattaaatgcaaatcattaataagcttcctgaatctccccatcatagctctgttgagattgttattgttcttgtcctcagaacgggaatatgaggttaaaatcaccaccaatcgtccaaggaccctagcagaaagacctaaccaagcaaagctcttgcaaaaactgattttatttttctcattctggggcgataaaccccagtaaccaccacggagacccattac

SEQ ID NO: 219051 - DNA, 7345 bp, Zea Mays
aaaatgaagcagtcccaaatactcaagctggatgatacaaagttaagtttagagcatcttcaaaggacacttcatttttttattactttttatttgactctttatttatctctcaataacgattatactctataatatagcatctcatctcaaccgactctctaatatgcaatttagtttggttaggaagatgactaatttagagagccagatatcttgacgatttagataattattctgttgaatagttattttgctattaaatagctaaaatttagtattttagagatgttcttaaggttagtatgctactaggaaaaacctagacacgaagtccaacccaaatctcaatatcccaaccctccgatccccatttccatccactccgacaccaatcctccgctccgaccaccgccggagaaatggggcggcgccgccggttcgcgcagctggacgatgacgacgacgacgacgaagacgtgcccatcaatttcaagccctcgggtggcgcctcctcctcggacgccaaacccaggaagccccagccgccgccgcagcagcgccgcgagcaggaggccgagacgaagactcgccgccgccggggacggcccaagcgccgccgcgacccggggagcgaggatgaggagcccgaggagctagagctgcaaacggaggatccccgtgaggaggagatcacggaggcggtgcccgtagctgtaggggacccggtcaagatcactggcaaggggaagaagcagaagaagcactatgcttccttcgagtacgagggcaacagcttcgagctggaggaccccgtgcttctcacgcctgaggacagcaatcagaagccctatgtcgccatcctcaaggatataacagaaactgatgggagcctatatgtaactggccaatggttttatagaccagaagaggctgacaaaaaggagggtggattctgggtagcacgagatacacgagagctattttacagttttcatactgatgatgtgcctgcagaatcagttatgcacaaatgtgtggtccatttcattcctcagcaaaaacagattcccagtcgaaagcagcatccgggatttattgtccagaaggtctatgatgcagttgagaagaaactgtggaacctaacagacaaggactatgaggataacaagcagcaagagattgatcttctggttaagaaaacaatagaccgtattgggcagcttcctgatctcgaacctgaagagacacctcttgagaacaattatttgtcaaataaacgaggcctgcgtaagaaacctgttaaccctatagatgtaacaagagaacctccagttggcaaatccgagcagtttgcaaaagcagagacacctggaagtgataagatacggaattatgatacccttgttaagtataaagtacttactggacattctcatcgtgataggtggctcgataaattgatagaaagtattccgcttgcatcaaaggagaatgctggaacatctgctgatgctaattctacagccaaaagttcaatcagtggttcacctgcaaaggatgttggttctgctgaaaatgaaaaatcatatggacttgatgttgttgttgagataatgactgcattagaaagatctgcatatgaagctcttggaacagattttgggaaatataaccagaaactgcgacaactacagttcaacatcaagaatatctctaaacttcgcaggaggctgatggacaaggagcttgatcctccagttcttttaaccatgtcccccgatgaattaaaggtgtatttcccatttcatattttgtgtttttgttactgtacgatccagataccttatcctatttaccttgttgacaaaattgatttcattcttgtggtaatttccttcaatattgtttgtactgccaaagttgatatgacaatttagcatactatgacaacttgggcagctgcttttgcagcatgaaactgcatcatatgccaacacaatataatcttactgtatataacagacaagtttttgtttttactgcatatttttggaaatttgtttttcatcagtgatgcacgatatattcccttattccttcagttctcattgagtagggagtgtttgtccttcaaaggccgaatacctatactccttcggtttttattcgagtataaaggtgcatagttccttttccaaagagattgacgatatgtggctgcgcatactgtcagttgtgtgaattacttggtggctcatctgtggtagtgtttggtgtggggtgcgtgggggttgcggtaaatatttaaactcttcctcttagttcaattatacacagttctgtgtattcgagaggaaaatagaattatgactattagcactgctgtacatttttttatctagttacgttaaacttgcaagtgcatggtatttgacagtaatgcattgagtttactaaagtactggtagtgtaggtttgctagagggcctcttctattatgagaaaatggtttttatattttcttaaatttcttaacattttccagactgtatgttacactatatcatgaattcgctgccacaattttttttctcgaacacgcaggagaactgcgtatcattatattaagaagcaagaagggtctaagatagtccgaatacaaggtgccacaattggcggccctctataacctggccaccaaaagtgccaccaaaaggcaactccctagctacaaaccacctacaaagacacccacaaactcctaagagcagaagctcctgcaataccccttaaggtagcatcttcctgaatattttgcaagagtgtgtcgacatttggtgaggctgcataaaacacacatcacacatgcattcctatgtttccaaatccaccaggtcaccaagatgacagtggagttaaaaccttttctgtgaattttctgcatatctccaccaatcttggaacaccttatcattaactgtagacgccagatgctgcaaacccactttactcagaatccggaatcaaatttccctagcaaatacacaagatacaagaatgtgctgaactgtttcctgttcctggtcgcatagcagacatctctgggtgatccatgcctcgttgtgcaagactgtgcaagacgatcagcagtccaacatctattgagggaggccaaccaaataaaacatttacaccgaggtggaacccagctcttccagatcctattggctggctcaaaggatactgcaccagcaaggaaatgctcatatgcagatttcgcagagtactctcctgaagatgttggcagccatcggtgttgatcaggaaccgcaggctggagatgaacttcctgtaatatatcccagaccatgaagaattccagaataacctgtattggtagactaccagagatgtcttgaacccatctatgctcctccaaagcctgctggactgttttttttcttaattcttatagagatacgggtagacaaagctggagcaatctgagtcagggacatcccattaagccaattatccgaccagaacatagtggaggtgccaaagcctgctggactgtttttttttcttaattcttatagagatacgggtagacaaagctggagcaatctgagtcagggacatcccattaagccaattatccgaccagaacatagtggaggtgccgttaccaactacagaacacattgatgctgcaaataaggctgcagccatagggtgtgtcctaacctcaaattcagcccaaggcctattcggttgagtcttcttaagccaaagccatctaatatttagagcccaacccataatttccaagtcatgaatacccagacctccttgagcaagtggtctgcatacccttgtccatccaacagaacaatgcccacctttgatactgtcctgcctttccacagaaaacccctcctgattttatcaatagccttgacaacccatttagggcattgtagagctataaggtgatagacgggaatggcagaaagcacggatttaactaacacagctctacctgccgggtgcagtagagccgccttccaccttggcaacttatctgcaactttgttaatgaggtccaaaaaaacactccttggaagtttcctaacagaaagaggaagacccaaatatttgcaggaaaaagtcaataccctgcaggggagaaaaaaaactgtgcagcaataatatcctgctcctcacactgaattggtgttaggctgcatttattcaagcttgtgatcagacctgaagccataccaaagatccatataatttctttgatcacagcaaactcttcttcctttggcttcaaaaacaggactacatcatctgcatatagcgatacccgttgaccagagcctcttcttaacaaaggctgcagcaggcccaaattactagccttttggattagataattcagcacatccataacaaggataaagagcattagggagagaggatccccctgtctcaacccacgctcgtggcaaattagatccctaggttctccattcaccaacactctagtcgaggaggagtgcagcaatttagcaatcatattgcaccacaatgggccaaaaccaagatgccggagaacttcaaacaggaatggccaagagactgagtcaaaagccttaccaatgtccaatttaagtagggcaaccggatccttctgcttgtggacggctctggcagtttgctggaccataagataattgtcatgtatgctcctccctttcacaaatgcactttggtttgaggaaaccagacccggaagcttgagcgcatgcctaccggccataattttattgacaatcttagcaagggaacacatccggtgcacatatggtgcacatgaactaacaaagttcacaaaaaattctgaaaaaaatcatacatatattttttttccattttactccaattatatacaaaatttcaagttcaaattcattatactttagctgtaataaaaatataaattttctgacaagtttaaattagaaaatcagctaaaatgttatcttttttattacagataaaatataacgaacttgaacttgaaattttgtatataataggagtaggatggaaataatatgtatggttttttagaatattttgtgaactttgttagtttatgtgcactggatatgttcactcttagcaaagctatgaattaggctaatcggccgaaaatctataacctctatggcctcctgtttttaggcagcaaaatcacataagcagagtcaaggagctgcagtttagaaacatccccatggaagatcatccctaaggcagccataaaattgttcttaataaccggccaagcatagtgctggacctcggatcgactggctaagcgagggttaccccatcaagcagcatccctttttgtgatcagtcagaggaaaccatacatcacatccttttctcctgtgtgctgcccagagaagtttgggatgggattttgaggaaacttaatcttgatatggttccacgccccaattcctctatcccgttttggacctggtggtgtaaggccactgttgctatccacagattttaaaaaagaatttcttggtcattttagtctcttgggagctttggaagcacagaaatgcgtgcatgttcgatggagttcaacctcagccacaagcgatttttgctcaatcggctgttgaatcccacatgtggtgcttggctggggcttctaaccttaagaagctcctcctaagggaggctccttaggctgggggtggtcgtttaggtcgtttgcagctgctgtgtaaagtgttcgagtgctcctctccttttattttttttctgccttaatgaaatgacacacagttctcctgcgtagttctaaaaaaaataaccggccaagcacatttataaaaacgaccagtaaaccatttggacctggggctttataagaaggtaggagattaatagtactccacacctcctcagagatcaaaagatcaagacgcaagaggtcgatagatggtcgatggaaggcctctaagtttagagacaattccctgtgtgtagcagttcccaacagattattaaagaaatcccaaatcacagttttcttatcttcctgttcaaccaagattctgtccccaactttctattttctgatgaagtttttcttctttctatatcttgcgtgatggtgaaaataggaagtattagcatctccttccttcatccaattaagctcacttctgagcctagccatggttctcttcatagaggacaacccccataaatgctgtttaagacggcagcgcagccactcttcattaaaggataagacccttgagtccctggccatctccagacgatgaataatctccttggccaaaaacagttgtcgtttgaccagcccaattcttttctcactccatgactgtagctgcctcacaaaacttttcagtttatccacaaagcgctgcagtgaacaaaccgcatctaccggctggctgatcccaagaagagcacacctcatccatgaaaccatccaatctaactcaaaaactttcaaaatgaaacgtctcttgtcttgtgtgagttcattcattctaacagaagaggacaatgatctgagatcaaggaagcagaactttctaaaaactcggccggggagggaaagaccgccctcccggtattatattaagaagagaccgaaacaatggtcccggccgagaaaatccccgaaccctggcctccatcactaacgggccggcgtcaactgtacactctacaacgacccagccggagggtggcacacaggacatcgtaggacatcgtaacccgagagtggatggggcataacgtgggaatttttttaaccaagcctgaaaattcgccccagagggggatcagactcaggacttggaggtgctacttggaagcccttaaccactaggctagaggccctttcgtgaagcagaactttctagaacagaatctggaaaaagatcccccaatcactggtatggaagacccgatccaaacgaacaagagtagaagatctctcgttggaccaggtgaactttattcccagcagaggtaactcaattaaatgcaaatcattaataagcttcctgaatctccccatcatagctctgttgagattgttattgttcttgtcctcagaacgggaatatgaggttaaaatcaccaccaatcgtccaaggaccctagcagaaagacctaaccaagcaaagctcttgcaaaaactgattttatttttctcattctggggcgataaaccccagtaaccaccacggagacccattac

SEQ ID NO: 219052 - DNA, 578 bp, Zea Mays
atctcggcggcgtcgccagaaacgcttcgccgtcgattcgcatggatccataaaaggcttggctctcccatccgtcgtcgccccatcgcgttgtccctagagaggaagcaaggcacatgaccgccgtctccgggtgggacgacgagtctgtcctcctcgatgtgatggtcgctgaggccaccctcgcctgtgagtcccatcgcaagaggcaggcctccacctgctccaacgatgacggcaccggatccaacaccaaatacggagatacagttgacagcagggctcctctcttccacgatgcgaaggtgacttgtgtacttagcaatggtgcaaatcatgcccatccacgagatcttggcctcatcgccgattgagaagatgacgttgcaaatatttcagacttaccaccaaggagccaccttcctccaatggtgtggtgcaaaaacaacaacatggtctacacagtagtgcctctaacgcaaggacacaggcaggcgtcatagagtatcattgaggaaattatatctctgttattaaatggtgtgtttaatttgttctcgatcccagtttaatctatt

SEQ ID NO: 219053 - DNA, 1106 bp, Zea Mays
tggtacgggtgacaggagatgatacaggcgaatcgttgcagagagatgtgatataggggagagattgctgacgtagtgggtgaaattccgttcaagacagtctcagtcatccacttcccctctgcaccttgaacgtcctccgcagaggcagctccccaactgttagaatggacgacacggaagccgccaagaacacggccaccaccggccccactttcgcctcccctctcttctctttctccaacctcggcggtgcttccttcggctctggctttggcttcaaatccagcgctcctctgccgcctgccatcgaggtccagctctgcgaggaatcacccgttccggcagctaggttggagccagtcgtggtcgatgactccttgacgatctacaagggcagagtgagtacatctgacgtgtttggtgtcaaagactctgatttggtccctggaaaatatgaaggtgggttgaagctgtgggaaggttcattagacttggtgaaagccctgaattctgatatcaaagaagataaatttcatctggaaggcaaacgcgtattggagcttggatgtggacatggcctccctggcatttttgcgggtctcaagggtgctgacctgattcatttccaagatttcaatgccgaggtgcttaggtgcttgactataccaaatgtaaaagtcaatcttttcaaggattcaccagaaggaacatgtacatgtccgattgttggtttctttgctggtgattggagtgaaatggataagctactactttgcggggatgctgagcaagacaaaacagccagtggtgatacagaagtgcttgcgctaccctgggggtgtggtttacatggcagggaagaagcattactttggagtaggtggtggcacaaggcagtttctgcgcttggttgaaaaagacggtgccatgcatcctgagcggctcaatgatgttgctgatggatcatccaatgttagggaggtttggaaattctcattcaaatagattagcactgcccctgcgattgtcgggagaactggaaacatgtactggactccatattggttccaatggcagacacatctgattgagtcacacctgac

SEQ ID NO: 219054 - DNA, 2589 bp, Zea Mays
tggtacgggtgacaggagatgatacaggcgaatcgttgcagagagatgtgatataggggagagattgctgacgtagtgggtgaaattccgttcaagacagtctcagtcatccacttcccctctgcaccttgaacgtcctccgcagaggcagctccccaactgttagaatggacgacacggaagccgccaagaacacggccaccaccggccccactttcgcctcccctctcttctctttctccaacctcggcggtgcttccttcggctctggctttggcttcaaatccagcgctcctctgccgcctgccatcgaggtccagctctgcgaggaatcacccgttccggcagctaggttggagccagtcgtggtcgatgactccttgacgatctacaagggcagagtgagtacatctgacgtgtttggtgtcaaagactctgatttggtccctggaaaatatgaaggtgggttgaagctgtgggaaggttcattagacttggtgaaagccctgaattctgatatcaaagaagataaatttcatctggaaggcaaacgcgtattggagcttggatgtggacatggcctccctggcatttttgcgggtctcaagggtgctgacctgattcatttccaagatttcaatgccgaggtgcttaggtgcttgactataccaaatgtaaaagtcaatcttttcaaggattcaccagaaggaacatgtacatgtccgattgttggtttctttgctggtgattggagtgaaatggataagctactactttgcggggatgctgagcaagacaaaacagccagtggtgatacagaaggtaaaatgtgtaatggttatgatatcatcctgatggctgagactgtttacgcggtatcttgtcttccaaatctctacaggctcatcaagaagtgcttgcgctaccctgggggtgtggtttacatggcagggaagaagcattactttggagtaggtggtggcacaaggcagtttctgcgcttggttgaaaaagacggtgccatgcatcctgagcggctcaatgatgttgctgatggatcatccaatgttagggaggtttggaaattctcattcaaatagattagcactgcccctgcgattgtcgggagaactggaaacatgtactggactccatattgggtgagagggaggtcttataggacttcctggttctgttaatctacctgtgactgtttcaaaaagctgatctttctcttttggagcactgctttgctcttgtagactaaaaaaaatcgcttttacctctggtttctgtttgttaaacttgtttagcctttcatatgaaacgatgaattctccatgatattatcacacttgctctcaaattaccctccaaagatagcatctcctatgtagattaaaagcgtcactttccaccgagcatcatgacgaagattcctgatagttccaatggcagacacatctgattgagtcacacctgacaagtcaaaaaaaggcgcaaggacaaaattctatcccagatgcttcaccctctattttttctatctggattgataaaccatgctggatggggccaagaggaatgttttttttccagtaaacactcgagaatgcacccccagcaggcagcagcacaagacagcgagaggtgtgaatgcagtagggacatggatgtgaaagggtgctcatagccccatgtgatgcaaggagtcaagcattggggcaagctttgtccctatctccacgtttcagtgctgctaatcctagcttcaacatgcttttgcagtgagctaccatgtccacgatgggcttcttccaggacacccgcgtcgtcggtggtggcagcagccggacggccaggtttctccagtaccagaggctggagtgctgggaggacgccggagtcgctcccagtcccaggtcccggtggcggtggccgtggctgccgacggagaatggttgctgagctctccgcaaagatccgtcacgccagcgccaggaccgaggccgccgccaccatctgcccggccgtcgtcttcgtgtcaccgtgggggcttcctgtgctctcccggccactcttggtcggccacaagagcaggtaccagtatcaccatggaaaggacacctgatgatgagctgagcaggtagtacccaatctgtattcctggcgatgattatatatgcggcgagctagttgatcttgtagtatgtgtagtaatcctcattttgattcccctgcgatgcttgtgtcatgcttgattgggccccttgctacggcatgcatgtcatgttgtgccctctatcaacatccgtaccaagcaaagcaattgctatattccatcactaccattcgcccatgtggatttggatatctcgtaggaattcaccgttcttcatgagcagcttcaatcgcatgcataattgcatatatggcctggaaaaacatctaggatttggtgttctttttttttctatttaggccatgattggcagatctccggctcctctacaggagcagctcattcataagagccatttttttttttttgcaaatcgttgcaaaatggctcctcctatacgattttat

SEQ ID NO: 219055 - DNA, 1601 bp, Zea Mays
atggccttggccatctggaggggtgcaacaagagtggactgggccacaacgtcagatggggggcagctgacggagcaacgaagtagcgagtccgacaagagtagaggtgaattcgacagtcggccaacgagggaaagatcgccggctcctgtggcctgcaaggggagcaccgctgctggccacgccggtgggagcgagtgtgcccatgtctatagaaggctaggcatctgcgcctgtggtggggcaagccttgtgcatgaggtcgcgccaacggtggagcaggcccatgctggcatcaatgctctagcattatctcagataacaataaacaaactacgtgagaacttcattgatatagacaagttgtgtcaggagtgtcaaactttaattgagaaccatgacaagatcaagcttcttagcaatacaagaaacaatttgaacacaactctaaaggatgtgggaggtatgatgtccatttctgttgaggctgctgctgcacatgactcattaagcaatgaccaggagttaattcacacttacgagcgactaatagctcttgatggtaagaggcgttttgctctagctgctgctgcatctcataaggaagaagttggaagattaagagaatactttgaggatgttgatcaaacatgggaaacatttgagaaaacattatggggccatatcactaactttttcaaactttcaaaagagagccctcagacattggttcgagctttgagggttgttgaaatgcaagagatctttgatgaacaagttgcagaagaagcaactgaggctgagggtgctggtgttatagcgacaataacaaaccaacgtagaactgcaaaaaaaggtgcaggggcaacagctaccccaagaaagagcactcaagaaaaatcgaaggttcagggaaagggctacagggacaaatgctatgagtctatcagggtggctgttgaggcccgcttcaacaagttgcttactgagcttgtttttgtggaggacttgatggaagctttggaggaagccaaagcaattggagaggagcttggtgatatatatgattatgttgcaccatgctttccttctagatatgaaattttccagctcatggtaaacctatacactgagagattcattcagatgcttcgacttctcagtgatagagcaaacgatattcaaaatataaacatcttgaaggtgactagttgggtcgtacaatatcaagaagatttgattggtcttggtgtggatgaatcacttgcccaagtttgttctgaaagtggtgcattggatcccctcatgaacatgtatgttgagcgtatgcaggcaacaaccaagaaatggtacaataacattttggaggctgacaaaacacaaccaccaaagagtagagaggatggaaaactatatacacctgcagcagtggatctattcagaatattgaccgagcaagttcagatagttagagacaacagcacatatgtcatgctatatcgcatcgctcttgcggttattcagggttggaagggtatatatagcatgttatgggccaaggcccattacaaggaagatgttgagattgcagcgaaactcgg

SEQ ID NO: 219056 - DNA, 2270 bp, Zea Mays
cgccgctcgctgctttgctcaaatccatacctcaacatcgatgccggaaccatgtctccgctcgagcatggcgaagtgtttgttttggacgacggcggtgaggtggacttggaccttggaaactacgaacgatttctggacatcaagctgactcgtgacaacaacataaccacggggaagatctaccagtctgttattgacaaggaacgtagaggggattacctaggaaaaactgttcaggttgtgccgcacatcacagatgaaatacaagagtggattgaacgtgtggcaatgaatccagttgatggcacagaagagccagctgatgtttgtgtcatagaacttggtggcactataggggacattgaatcaatgcctttcattgaagcattaggtcaattttcataccgtgtagggcctggaaacttctgcttggtgcatgtcagtcttgtaccagttttaaatgtggttggtgagcagaaaacaaagcccacccaacatagtgttcgcggacttagaggacttggactcatgcctgatattttggcatgccgtagtacacagccacttgaagaacatgtgaaagtgaagctcgcacaattttgtcatgttccgatatcaaatatcattaatctccgtgatgtaacgaacatttggcacatccctttgttgctcagagaccagaaggcccatgaagctattttgaaagtgttagacattcagtgtgtgggtaaagttgctcgagaaccccagttgtctgaatggactgaaagagccagcagatgtgacagattgaaatctccggttaggattgctatggttggaaagtatactggcctgtcagattcctacctatctgttatcaaggctcttttgcatgcgtcggttgctttggacaggaaacttgtggtagactgggttccttcctgtgatcttgaagattctgcagcagaagagaatcttgatgcctacgaaaaagcatgggaattgttaaagggtgcagatggtgtgttggtgccagggggttttggagacagaggagttcaagggaaaattctggctgcaaaatatgcgcgagaaaacaacattccatatcttggcatttgcttgggcatgcaaattgcagtgattgagtttgcacgttctatcatgaagttgcacggtgcaaacagcacagagttcgatccaaccacaaaaaccccatgtgttattttcatgccagaggggtcaaaaacccatatgggggcaacaatgcgccttggatcaaggaggacctttttccaggtcactaactgcaaatctgctaaactgtatgggaatgctagctacgttgatgaacggcaccgccacagatacgaggtgaatcctgatatggtcccagaatttgagaaggcagggctttctttcgttggcagggatgaaagtggtaaacgcatggagattatcgaactgccaactcataggtttttcgtcggtgcacaatttcatcctgaattcaagtcaaggcccggcaagccatctccgcttttcttaggattggtagcagcgtcatcaggtcagcttgatcacctgctccaacctggtcttatcagttcgactggcagacacacctgcagcaaaggaggagcgcaaaaattaaaggctgggcacgtcatgaagccactgaatggcctggtgaacgcacactattcagcaaccggcaatggcgccattcccatctagcagcgcagagctgcgacgcgtcgcgtgcttgtttgggatttctcttctaccgttactgcttgttctttttttttccctttccttcgagggtgttcttccgtacgttctgccaggccaactgagaagaagagaagggctgtttgctctagcgacacgggcagccgcgtttccgatgttttaacgtggaagcatttggcatggaagctgtcgcatgcatcaagaggcaaatctagcaggttagctagagtttgattagtagtggtaatccgatatatatgctggttgatttgttcgtttgtttgctaagattacaagggccggtgatgtgcagctagctggtagtgtagcctgccgtctcgcctcatttgtacattgtaaaacaactgctactctccattgactgactgaatggacgagtataaacgtattggaccaacatgctgcgtgtgtgtttagtttatcactggtagaaaagctactatcgaatgccagttttatatacaggcgaggccgatacagaagggattttcagtctaaatttgaattgc

SEQ ID NO: 219057 - DNA, 7044 bp, Zea Mays
ggcgggggagcagcaggaggggatgagcgccggcgggggagcaatttctatgaccgtgtgggagggagaccgagcggctgcacagcgcgcgctaatactcccgcgcgcgcgcgctaaaaattgtcgcgcgcccgcctgcgcgcccgcttaggcgcctgcgcgccgcccactcgccgcctaggcgcggctgagcgccgcctagtcgccgcggtcgcctagacgccgcacaggaccctaggctacgcggcagcctatcgactagcgcctaggcgcgcctaatcgccgcctagtcggcgcctagccgaacactggtagcagctcctttttgcacaacagctcacataattgccaactacaacatgtcagcatcattaggagtaagagaatatataatccttgaacattagaccacacagatacctgatcgtccccgcggccgaaatgcaacatgttgtcttggagcatcttcagaagggggatcacgacaccatccttccatgttgccacggctgttgcggccagtgcaccgatcaaatccctcgcaaatacagtgtctcccttccataacacagagaacaacgaacggcctcaggaactagagcacccaatccacccccatcggcaaccatccctgctgcctgttgcctgccgcgtcagttccgtgcacactatcagaccccgacgcgagcgcctggacaaaggggtggtcgtgggccgggaagcgagagcctgagtgaagggcacaggtcgcgagcacggagactatcttgacgagacaggaagcgagtcgtggggcggggaggccacgaggggcgcgatatggagcggtagggcgacatctgacgggaggaggtcggggcaggaggcgatgagacgggcgagggaggccgcagcgtgcgcggcaactgcaggatgaggcgaagcgaggagggctgaggcggcgtcgtgggcggccgcgagggaggaggtcgaagacgcccccaaacacacggtgcagcagtgtggggtccgggacctaggtggtcaacgaggcgggagagcgccgtcgtggtggaggcggtggaggaaagcatggctataggcgcgacatctgacggggtcgggagtgtgtttagccggagaggatggagctagaaccttctcgttgcgtcgtgaaacggagagcggcgcgtcaccgtcgagaagcgatcagacggctgaaaattttataagcgacgtggacacattctcatgcccgttttcgatccggctttaatatataggaaataccagttgaagctattgaatcaagtggtagccaagtgcttgaacaactactcagagtcatgcttccaagatttctgaagcatgttggtttaattttatttgacgtgctatagatactttttcattaacatttttttagttcagcctttagattttttccaagcttcagcactttctttgagattacgactctagaagaatttgtgttagagcaagtaaagagtgagttggtctataagataatatactgatataggaaattgagatgaaattatatttctagaattacctctcgctttattgtaaattggacagtccattgttttaaaaagagttgaggttggtttacttcactatataatatcgttttgatgatccactagctgtgcttacccattttttaacttatattctcttgtcttttccatccgaagttaaactttaaaagcaaaccaaatgtttgggcctatttctctattaaggcaagtatatgtccatccaaactggttttttcttttgtgttatacatcaccacagctgaaagtatcactcttgactatttatttttgtttctttgtttcaataaaatttcttgctaaaatacatatccttgtatgatacaaactaactgaaatattgtttttattttttgaattttcagtctgggggagcaattcgctatacatctttgttgttttatcccggtaggtcaactttttcctattaaaaagttttgatacgtctttgttgtaaattcttcagtcggatggagacagtcatgtaatgtatgcaaagaatgtcagtaagtctatattcccctatgcacatttcgtaggtatgaaagctagctttagcggacaagtacgtgccacttgctgactaattaatcagtggtgagtaaggtcatcaatggataagttatcgtttatatattggataatttgtcaagattgctctaaaatgctgcaagtttgtgttgcggcggcgtacaattttgcttgtgcgcatgtgtagataaccatatggttcatagaaaagatgcttatggtttctgaagtgcttgcagaagcagaaaagggcgacgaaacttaatctctatatctcaggcctcatcatattgaactgtgtttttacatcgttatgttttgtgatatgtcaagcacattgtttgtacaggttgcctattgttacatgctcttggaattattacaagtctatagatctcatggggtcatctttagtggaaacatgtcatatattacttaggtagaagctagaagacttttgagcattataatttgtgttatagtttgattatgtcctatgaagtcccttgtacgatggcatgtaagagtggccactttttgttctaatgttgttttatatgaactcacagctatcaattctatattcaagtccaatccctttctacaaaatatgacgagagatgcaagaatgttggagatggggcatctaatctaacaaacaatggatgaggctactttccgtgatacccaggtatatttgtgattctattagaatgctagcaacttcatcctcgagtttggctgtgagcatttcttttttatgtttgcatgaaaatatgttagaaatttattatgccatagttaagccacaaaaaattgtatgaagaagttgttttaaaatgccattttccaaataaatacatataccatatacatcgtgagcacatctcacacctacatttatgtcagcaccccccccctgctagtttatctgcattgtattctgttctagaaagattaacagaaaaaggaaattatctacaggcctacagtctacctttgaactcaggattttactacttagccctccaaaatccagttgatcccatggtggtttatgcagaactcttttgtgtttatttcattttatggctttttgttttttttcttttagtaatttcagggcaattatatttttccaggttcacgtccatagatgtctacatattcagagaactgcaacagtgcacactcctttcaaagactgggtgcagcaaagattgttcttactgccctcagtaacattggatcgaaagctcaaaaatgatggacaaggatgttggagcagcaaaaaaaggtactgttattgtctgggaggtaacaagttggcttcaattattttttaaactgtcataaagtacatctaatcttattgttgattgcgggcttaaaactttataactcatgaaattctttgttgtattattattgctcgacataacgagaatatgattgccatccaaactaaacttgtatcagaatttgtgctttctgtttttgtataagactgccaaacattttgatttaaatatagtgctttctggttttgtataaaactgccaaatattttgatttaaagatagtgctttctggttttgtataaaactgccaaacattttgatttaaagatagatcgacttcacccaagaatgcgccctaaaaactcttcaaaatgctcgtctcagaaaaataaagaaacttaagttaattgatttaataaatggtgctccccccgttcctttttatttgttgccatttagttaaaaaatgaactagcgggctacaaatattcgagaacggaggtagtataacattttgattttaatcttagtatcttagttgttttgaagatacttcttccagtagatttgaattcgtggaccttgaatttgtttcatatgcaaacccacatgcagacccagttgttctcccaaatatctacaacacattgactgtcataactttcgtttgcaattctttttatctctacattagcctaaataaatgacaacatgctatttatttttggggtcagcgatgaaatatgcctttaggaaacacattcatgttccttagatcttgaacttagcaaaaagtggtgatgtaggactaaattgtgacctacctacaaacttttagtactgtcttttgacttctgcttatttgatgctttatacagtgtcccacccctttgctcaaccatagttgatggtgaaaaggctctaattacctttggcagttacaacgggaactacaacaacgaggtgttcagttcaagtaaatgatatttattcatattattttttctaaaatgattcatacggtgttactttagatattagatccatttttctgggattgtcttcatatatgttggcggcttgagtgcttgagtttctttcagtatctattcctgatgttaaaatcatgcttagctatccggcagaatgagcattctgctattgttgttgttttttttaaatgattcatatgttgaacataatatattagattcatttttctgtgattgccttcgtatatgttggtgacttgagtgcctgagtttctttcagttatctgtttatgatgttaaagacatatttaactatctgacagaaggagcactttgttgcagatctttgttttgaaacacaaggcaagacatttagttcaacctcgtcttcttcagtcacccgttgtagctgtcgtcgccgcttctgtgacaattggctatgttgtaattactaccacagatgagaaacccagagatattattgtgacagataattttgatatcaagagaactcaacctgcaagtaattccaaaatgatcgttgctgaaactgatgtacttactggagagaatgacatgacaaacttgccatatggtgaattggcaaagaagcttaaattagttcaagatcaactagcaccagagggttcaagatgatagaagcctgatgtgctaaacttaaacatgcagttgattctgtgaccctgaacgcttattttctggtttctttcgcttctgattacttgccttttgtcctgaacctgtcaacttagtcccaaattgctgctgcacggaagagaatgaaatctttgtggttttctttgtctaattttgtggctgcattacaatatgtcatatatagtacaacatatggttggttacttggtttaatttagtcccgtgcatgaggtgctagcgcccaatagggcgcttcctttttctagttccataaatactactgccactgcaacaatatgttgcatacgtacttttttttaagttccaggcatcattaatcaattaataacttagttaatgaaatggagattcatatatttttcttttgtttctctgtataacggatttgcacggagctgcgtttattcgtttcacatcttctaagggttcaaatgagttttgaaatcgcacgcagggcccgcggcatacactagtgtaattagggcctgttcgttttgttttaaaatccacgtggattgaggggagtactagtctaaatccatctcaatccacccccaatacccctcaattcacatggttttgggatgaaacacgatgccgctggatccagtggcggatctccgaccggggctgcctgggctgcagccccggtcgcggcccaaaaatcagtgaaatggcccatcagctccagccgcgcgaccacgtgaacagcccccggtcgcaggtctctcctcctccctctaccctcggcctccagccgccagccgcccatgccccgacgcccggagcaccgctgcaacccgcagcgtcgctcgcccggaggccggactgctagagcaccgccgcttgcctcgcccggagcaccgccacgaccacgccgctgtccagccgccgctccgtgctccctcctgctgctaattcgtggagctcaggtttgtacacacgtgctgagaagaaagtgtgcttagctattagcttgttcttgcgttggagtgatgagcctgacagccagtgatgtatggccttgccataatgccatcgagatgtgcggcgtgtgccaatgcccctccaagctttctgttggggattccttgttctgatgggagtttgggacgatgaaggaataggaggacaaaagagtttctgctaatttgtgacaaatcatgtaggaataggacgctctgtgcaaattgagaagcagaaacaacgaaggtgaagctgtgatttgtgaagtaggcaagcagtgaaggtaaaacatgtgctattatttgctttgagtttgattaagttttgatttgattatttatttggtagcaatcccatgtttataggaataaaatggataaattctcatcaagatccagaagaaagatgcttctaattctaaaacaattagggcgaataagagccgtgtagaacaaaagagaccatatatagtagccccctcttggatcaattctagatccgccactggctggatccgccctgcattttctcgcgcgctttggatccacccggcgacgccgctgatcgctcgctcccacctccgagacggaagagaccgcgggtcgcgggagcaggcagccgccttccacacgagtacacgacgaaccaaaagtacgatatcgcgagtgaaaacgtaatatactggaatacgtgttaacaaggccatgtgggttgtggcctgtgggcagtgagggccaatgcatataagccaagtgaaaatagaatcatcgaataacaacagaaaacacgaaccgtaccttgggttcctctcctctctggagattcgccattgctgtgcacacgagagtaacgcaccagccgacggcgtcgctcgtaaccccgcgcggcgtcgctcgtcaatgcaccagccgacggcgcagcgtcgctcgtaaccctaggcagaggcgcagagcgtggggtagcgggcggatgggagcttgcgggaggaacaac

SEQ ID NO: 219058 - DNA, 2022 bp, Zea Mays
gggcgtattcctctctctttcctcaacctcatccgagtggctctccgtgtgctgtggcggcggcggcgcccggctctgctcggacggactccaccgaaggctcggctcccctcggactccacctgcgacggccggccctctgcctgcaccgacggtgcccggctccctcggcatccaccagcggtgcccgactccaagaaatgtacaagtcacggctgcaggagctgtgccagaagcggcgatgggcgccgccgttgtacgagcctacccgagagggtcctgcccacgcgcccctcttccgcgccactgtcgtcgtgaatggcgagaggttcagttcccgggatgaaggggagaagtcactcaaggaggcgtacaacctcgcggcgatggccgccttcgacaacctcatcgcgctcccggccgcggcccttgcccctgccccggctgctccagcgccgccctcatccgagacccagcttccttacaagagtcagttacaaatttatgctcagaagcgaggcaaactcctgccttcatatcgtcccattcatggaggttctcttcatgcacctctatttaagtcagaagtaaccatagatggtcaaacatttgagagcccagagtactgtcacacaatgaaggaagctgaaacagttgctgcaaaagttgctctgatgtccttacctcaagaagcaaacccaacacagcaattactgcttccatctgtaaactataagaatcttctacaagaactagttcagaaggaaggctttcccttgcctatctataatacagcctcggatgtctcgaactattctgctgccttcgtatcaactgtggaaatccatggtgtaacttttcatggaaagccagggaacaccaaaaagcaagcagagatgaatgctgcaaagtctgcttttgaacatttcaaaaacatctgttgatggaaacactctacgtgcaaagctggaagttaacaaatcacaccttgcagagccaagcacagaagttgaagcaatatattcatctacagaagttgacaaactgccacttccagggccaagcatggatatcgaagtaatggactcaactcttgaagttgacaaactgccccttccagagcgaagcatggatgttaaagttgtgaattcgtctctgaaagttgacaaactgcactttgcagagccaatcacagaagctgaagtgatccactcatctctgcaagttgatgaaccgctcattccaaagccaggcatgagctcatctctagagaacacacctgctgtgaatggccactcagcccccatatccccaaccattactcctactctaataagcgtgccaacagcaaccatgcctgtcagcaatgacagatgcggttgctacatgtcaaccaacagaatccaagtctaccctcgccacactgatatggttatcccggaaggcgcggccgtgcttcccatcagcgataatcagtgggtagctgtcagcctaccttattccatggaacaaaggtgagacaaacccagggagacaaaaccatccataaataactaaatatcttatgcaaataatatctctgaaccccacgttataagtttactggatttgggtttcaaaataatatctctgggattgctcacaccgggaaaatgcagggatttctgttgccgtaatccggactgccacttaggaagataaaagcagacaaaaggatggatgctttgtgatgattatatagcttgtgatgctgagcattgcccgtgatgtactaaaatctagtgtaacaagactgccttgcgctggactacgattagtgtccctaatgcggagacttgtgtgactcctattgtatctagattaagctgtacttgtttgactatgtgcggaagtcttgagttacactcctatagtagaggacttgaactctggatggaccatccgcaacatttatcatgatcagacttttttcatacttcctacttgagcttgttgtctttcggaatgcttctgtatgttgat

SEQ ID NO: 219059 - DNA, 1823 bp, Zea Mays
gggcgtattcctctctctttcctcaacctcatccgagtggctctccgtgtgctgtggcggcggcggcgcccggctctgctcggacggactccaccgaaggctcggctcccctcggactccacctgcgacggccggccctctgcctgcaccgacggtgcccggctccctcggcatccaccagcggtgcccgactccaagtcacggctgcaggagctgtgccagaagcggcgatgggcgccgccgttgtacgagcctacccgagagggtcctgcccacgcgcccctcttccgcgccactgtcgtcgtgaatggcgagaggttcagttcccgggatgaaggggagaagtcactcaaggaggcgtacaacctcgcggcgatggccgccttcgacaacctcatcgcgctcccggccgcggcccttgcccctgccccggctgctccagcgccgccctcatccgagacccagcttccttacaagagtcagttacaaatttatgctcagaagcgaggcaaactcctgccttcatatcgtcccattcatggaggttctcttcatgcacctctatttaagtcagaagtaaccatagatggtcaaacatttgagagcccagagtactgtcacacaatgaaggaagctgaaacagttgctgcaaaagttgctctgatgtccttacctcaagaagcaaacccaacacagcaattactgcttccatctgtaaactataagaatcttctacaagaactagttcagaaggaaggctttcccttgcctatctataatacagcctcggatgtctcgaactattctgctgccttcgtatcaactgtggaaatccatggtgtaacttttcatggaaagccagggaacaccaaaaagcaagcagagatgaatgctgcaaagtctgcttttgaacatttcaaaaacataaatcatgatgctggatcatctggctctgctaacccacttcctgttgccgctacaaaacagtctgttgatggaaacactctacgtgcaaagctggaagttaacaaatcacaccttgcagagccaagcacagaagttgaagcaatatattcatctacagaagttgacaaactgccacttccagggccaagcatggatatcgaaagccaatcacagaagctgaagtgatccactcatctctgcaagttgatgaaccgctcattccaaagccaggcatgagctcatctctagagaacacacctgctgtgaatggccactcagcccccatatccccaaccattactcctactctaataagcgtgccaacagcaaccatgcctgtcagcaatgacagatgcggttgctacatgtcaaccaacagaatccaagtctaccctcgccacactgatatggttatcccggaaggcgcggccgtgcttcccatcagcgataatcagtgggtagctgtcagcctaccttattccatggaacaaagggatttctgttgccgtaatccggactgccacttaggaagataaaagcagacaaaaggatggatgctttgtgatgattatatagcttgtgatgctgagcattgcccgtgatgtactaaaatctagtgtaacaagactgccttgcgctggactacgattagtgtccctaatgcggagacttgtgtgactcctattgtatctagattaagctgtacttgtttgactatgtgcggaagtcttgagttacactcctatagtagaggacttgaactctggatggaccatccgcaacatttatcatgatcagacttttttcatacttcctacttgagcttgttgtctttcggaatgcttctgtatgttgat

SEQ ID NO: 219060 - DNA, 438 bp, Zea Mays
caacgaaggcacgtcacggcagcagtacctagcatgggcgtcggtgtggttctcatctagacagccataaggttagtaccgagctccccttttacctcctccctctcctctacctcctctccgcctagcgttccaagacatccgtctacggctgcttggaagatcttgcaatcagctccaccatccctcacttcctttccacctctgtcatgtagttttcagcaatcatgccataacaagggaggtttctagagagagtatcgaactcagagagagagagatgatactggagccacctatccacaagtcgctattccgcaagatcgtcgtggccctatcgagaacggagatgctcttagcgaagcaggaggacatggtggacgtgaacatgaagctaaagctgacttccagccaatccaactagcagtagtaggcggg

SEQ ID NO: 219061 - DNA, 2106 bp, Zea Mays
accatggagccatagcgcgcggttacctcgaggagcagagagcctcgtcgcatgagagagatagagagagaggatcgggtgccgctgcgtttggctcagtcgtgggagcttctacgtagctccgatgacgaattgtgtccttgccttgtggggctgacaacctggtgatctggggatcgattgatgcgtcgggctgagctcaccaaatttctctgccaccgccttcgccggcccactgctctacccgatcgccgggcatttgtgcgctggattctggagctctccgccgtgcgttgaagaccgcaatgctgccgcgacacgtggccggtcgtccgcgtcgaatcgtgcagctacgaatcacctgaagttcatcctgtcacctggattctcaagtgccaggcaagttgtgcccttgatccacttttgttacacaataatgttctttataatcatttaccatgcataggtttaattttgatgggacccgataggtcaccctagattgtttatctcatttaccttgtttacccctgaatcacttgggtagtttgctattgctttatatggttttcggataatcatttattatatccatgttccagttattatgttatttatttatgttcatgacaagatcattatattattgttaattggaatatagagcttaacttgagaaacacgtgccaccacaagggaggaatgggaccccttggctaactaattaggaaagctagtggaagactaccttacccgaaaggggcaagggcagtaggggagttgcatgcaaggaggttttcgggttgattttgctgcgatggcagtcagacgagggattcttgcaagtgctcttcccataaaatgtatcgggttttcggaagctagtggaactttgtaaaggcctcgtagtggatctctagccattcaccttggtagtgtttatgggcctagctaaccctggcgacatgggaaacacgacctgtgggtaaagggtacaacctctgcagagtgtaaaactggtatactagccgagctcacggtcatgagcagctcaggactccctgatgattaatctatggaacttaaattcaatttgtcatatgcattgcatgggatcatttgttaattttgttctattattatttattatggtttggtatttacttacacttagtaattgctaataaaattttgaccaacttataaaagcaatgctcagctttaacctctattgttgatcagccttacacaccacatgaactcccacctttggtgagttcatgtcacattattccccacaacttattgagcgatgaacatgtgtgagctctaggcctgggcaaaaagaaccggaaccgaggaaccgaaccgaaataaccgagaaccggaaccgaactaaccgaaccgaaggaaccgttatgaatttcggttctggttttttgagaaccgaaataaatgagatattttcggttctgcactccaaagaaccgaaagaaccgaaaaacccaaaagtattagattcaatttgttacatgtgtttgtaacttcggatgttgtgttatcgacttatgttgaacatctaatcatccatgtattatctatgaaattatagtcattgtgcacttgtcgttgtttgtggggagatgttgatgaaatttctcacaaaagttgtcgttattcataattttagagtggctgttacagttcggttagaaccgaggaaccgaaccgaagaaccgagaaccgaactagtcggttctgatttctttatcttgctatttcggttctagtttttgaagaaccgaatttctacaaaaaccgaggaaccgaaccgaaccgaaccgaagaaccgaatgcccaggcctagtgagctcacccttgctgtctcacacccccccacaggtcaagaacaggtaccactggatgaggcgcatggtggatgttgcactgtattcgagagaggtctagatcgtcgtctcccagttgactttctagcgccaaggatggattttagatcctgttctatttatcttttattttgtaagacttccgctatgtaataagtactctaaggatattatgacatttatctctatacactctgtt

SEQ ID NO: 219062 - DNA, 3438 bp, Zea Mays
aaacaaccccacagacaccagacgtccagacacacactcacgccccaacattcccatactactgatcttgtttcaaatacatggtgtgactagaaactacctggcttgattatggacatccctctttctctgactctaatctatgaagcaatacttggccaatcagttttatggatgctcacattgtttatagattgtcgatgcttgatgcctgctttataaaaacacctcctgaatgacttttttatttattgagttcctactatatattacaaattttgtgcacaacataggttcggatgaccttgtatttcaattatcattatccaaagcccttgataaaacacagtactgtgctagtgtgctgttgcatgtgaaactcatttttagcagtacacagttttttccattctgtattcaaccttcatagaaaaggattcaacctataaatcgcaaacacaattatttgcattgtgcaattgttattttttgttcaattatcagttcagttcacagaatgggaacgtcttgttttgttcatatactaatcgcatgcttttatctgagtacgaattgagtggactacgatgtggcttcaaatgcatgaaaggggtggatatcaatatatcatgagatcttaatgcctcaacaaactctatatttgtgattgcacctctgatcatctgcattggccaaacaatggagtactatgttagttacagggctttaccagtatgcttccatatgtttatcatcatgctgatgtcatagagatacgtccaatactgcagcgcatatgtcagagcagatacaagattcttctaaataaagataattaaagtgcatatggacataagttgaacacatcatgaacacatcatggcgatgccatatagttaatgatgcacaaactcaatggagcatatattgagtctcaccacattgaggcttcatatattaaccaatctacatggtacggtaactcactcactgggtcacttctttctggtgaggaaggaaaaggcttggtcaatcatcacagttagggtcgtggggggagggaaaaaaaaggcgatgtcagtgatgttcgtattccaggacagagagcatctttcctttgtttatcgccggccggcagctagcaattctaatcagaaatggttactgctccggtccaacaccaatagaagcacgtcgcgggcgctggatgtctgtcaagaatcaagcttcccataatcgcgatgcaggaccggacttgcggttgagccagaaaataaaaaggactgcatgccagtgccagggaagaagtgctcgttcgtccactccagaatctggagcagatgaagctgaccctacaggtgattatattattgcatgcgtgtacggacggaggtgggcattattctgacgaggggaagggaaggggaggcgggcggcggcagcggagcatggcaattaacaacaaggctggcactagaagatcacggggaaggcgagtttgacaacgggggcatcttttctggggtccccagaggcccactccccacacgatgatgcatgcacgaacaactagtgaatgctgctggacaggaataccctgcgagtcgccgttgtccttgtcacgccttttgttttcccctcccgttgctagctgtccgcggacgtgtacgtgcccaggcatcctatacgaacgccatgcaccaaggaaagcagctcatcccacggacaatcgtcctgaggtgtgcagtattcatgcatggacgcctggcctcctcctctgcagaattggaacatcatatcgaattggcgagcgagttttgcagatttaaagagctatttcagtcaagcttcaagtggaagtagaccaagtactcgcgctagtggagtttgcaatgaccccggaatacaagttgaagttcaagagaataatagtgaagatgccaatggtgaagtcgaagaagcagtcacacgtgcaattaaagaagaaatgggggattgtttattctctgttcttgttgatgaatcccgtgatatatcgattaaagaacaaatggctattgttgtgagatttgtcaataaaaagagtgaagtaatagaaagatttttgggcatcaagcatgtcaaggacacaacatcagaatcattgaagaaagcattagttgagatgagagtggagaaatttcatcaaagagaggcaaacaacaagaaacatcattgtcaagacctggagatacaagatggggatctcattacaagactttgctccgtattgagtcaatgtgggaatcagtgatagaagttttagaaattgtgcaccaagatgagcgtaatccatcaggtgcaggtggctttgttgggaaaatggagtgtttcagctttgtgtttatgatgaagttgatgttacaaatcctccgtatcacaaatgagctttctcttctcttgcaaagaaaggatcaaaacgttgtccaagccatgtctttggttgttgatgtgagaacatgtttgataaatttgagaaatgatggttgggagccattgttggaagaagccacaacattctgccttgcaaatgatatcccaattccaaatatgagtgatgttgtaccacgatttggtcgatcaaggaaaggtgggagaaataatattaccacggagcatttttatcgtgttgatactttctatgttgttatagattctatcaccacagagtttgatcatcgctttaatgagctatctcaagagttgcttgggtgtttttcttgtcttgacccaagggattcgttctctaagtttgatgtggataagcttgctcggctcgcggatatctattctgatgatttttcttttgatgattgcaagactataaaagatcaactaagaacttttattattcatgtacgaagaattgaagagttcaaagcttgttgtgatattgctagtctatcgaagacaatggttcagcttgagaggcatattgtgtttccactggtatatcgacttattgagttagcactgttgttaccggtagcgactacaacagtggaaagggccttctcagctatgaagattattaagactgagttgcgcaacaagatgtccgatggttggttaaatgacttgatggtgtgctacattgaaagagaaatttttaaaggactggaccttcagaaaataaagaaggcatttcaaaataagaaaactagacaaatgcaatgtctagatctcctagaactagactcaactaaaggtatattcttatttcacttgttcaacaatttttacttcaatttaccattcgtaacttatctttttcttttttccagattttattcgctatatggcagttggttgtaaatggattgtaatcaagatgactattaaataaggtattttcaacatctattacttattttgtagctacaagtcattttaaactat

SEQ ID NO: 219063 - DNA, 1418 bp, Zea Mays
gcaaatcacaacttgttcttaatattcccctatcataggcttctagcgtggagtatgaaaatatgtgatatatattgtggtggtattgttttctgatgaaatgaatattattaccccataagtggacacaggccagttgaaccaatacgaacccgatcaactacatcgatgcatcaccaacccaagcatcccaatccaaacaacttgtaatttgaaactagaggtacattatagtaccccttttctttttagggaactagactattaaggaacaccttttctctagtggggtacaagactaatataatcagtttgtgtgacccgcctgaaaactatgttctgttatcagtattttgtgccgtcacaattcagttagcagcatgcatgttcaattgttggtgtctttgttaagtttgagtagaaaagctcaatctagcatgctcttcgctctgttttactttccatgattcgttgattatctatgcagtttctgcacgattactatgagtatgtgctttcatatattgtttactcgatgacttgaatagtttacaacgtatgattattgcttaggaccctgcactactaaatcaggggactcgcttgagtcagaaaaacttaggaaccaagttttctctctaagttactgacttcattttctactgtttatagattgcgaactgaatttaaatcaaatacttcagtattggtctctagagaggaagctctgccaaccattactaataactgagaaggatttggcaatcgcttatctttgactcaataccttatgacctcggaaaggtttgaacccgtcagggactaaagatgccaaaggttgaagaagggtcacgagcaaagagggcatttactatcctttgcaatcttcaccgttggaaggattatgataactgcaatttcatttcttcttggatatgagctccacaagaggatgagacccctctcttcgccatatgtataggacctaccttcttgacatgacctatgcatccaaaagttctgagatgacccacttgtggtttactgccatgccatgcctcatatggagttttcccttgcacacttcttggcaatattatatatgaggaggtgaagcaagctagaagctcatcttgtacccgcaacaagttgatacctgcagcacgtggacaaagctagatggcgtggacaaagctagatgggaagcctagtataattgcaaagtgaatcagttagattctagtagttactaaaatttttaagtgatatttgtatgatattgccactttggctttgcttctttgtgaacacaattggcagttactgaacatgtttgctatcgagttagttagcttcttgatattttgccaaggccaaaagcaatattattgagggtttataatttgattttttaacat

SEQ ID NO: 219064 - DNA, 1044 bp, Zea Mays
gcaaatcacaacttgttcttaatattcccctatcataggcttctagcgtggagtatgaaaatatgtgatatatattgtggtggtattgttttctgatgaaatgaatattattaccccataagtggacacaggccagttgaaccaatacgaacccgatcaactacatcgatgcatcaccaacccaagcatcccaatccaaacaacttgtaatttgaaactagagattgcgaactgaatttaaatcaaatacttcagtattggtctctagagaggaagctctgccaaccattactaataactgagaaggatttggcaatcgcttatctttgactcaataccttatgacctcggaaaggtttgaacccgtcagggactaaagatgccaaaggttgaagaagggtcacgagcaaagagggcatttactatcctttgcaatcttcaccgttggaaggattatgataactgcaatttcatttcttcttggatatgagctccacaagaggatgagacccctctcttcgccatatgtataggacctaccttcttgacatgacctatgcatccaaaagttctgagatgacccacttgtggtttactgccatgccatgcctcatatggagttttcccttgcacacttcttggcaatattatatatgaggaggtacctagaccatctaatcagattcgtacactaattgatgctattggctatgttattccttggctaattacacatgtgaagcaagctagaagctcatcttgtacccgcaacaagttgatacctgcagcacgtggacaaagctagatggcgtggacaaagctagatgggaagcctagtataattgcaaagtgaatcagttagattctagtagttactaaaatttttaagtgatatttgtatgatattgccactttggctttgcttctttgtgaacacaattggcagttactgaacatgtttgctatcgagttagttagcttcttgatattttgccaaggccaaaagcaatattattgagggtttataatttgattttttaacat

SEQ ID NO: 219065 - DNA, 1208 bp, Zea Mays
gcaaatcacaacttgttcttaatattcccctatcataggcttctagcgtggagtatgaaaatatgtgatatatattgtggtggtattgttttctgatgaaatgaatattattaccccataagtggacacaggccagttgaaccaatacgaacccgatcaactacatcgatgcatcaccaacccaagcatcccaatccaaacaacttgtaatttgaaactagaggtacattatagtaccccttttctttttagggaactagactattaaggaacaccttttctctagtggggtacaagactaatataatcagtttgtgtgacccgcctgaaaactatgttctgttatcagtattttgtgccgtcacaattcagttagcagcatgcatgttcaattgttggtgtctttgttaagtttgagtagaaaagctcaatctagcatgctcttcgctctgttttactttccatgattcgttgattatctatgcagtttctgcacgattactatgagtatgtgctttcatatattgtttactcgatgacttgaatagtttacaacgtatgattattgcttaggaccctgcactactaaatcaggggactcgcttgagtcagaaaaacttaggaaccaagttttctctctaagttactgacttcattttctactgtttatagattgcgaactgaatttaaatcaaatacttcagtattggtctctagagaggaagctctgccaaccattactaataactgagaaggatttggcaatcgcttatctttgactcaataccttatgacctcggaaaggtttgaacccgtcagggactaaagatgccaaaggttgaagaagggtcacgagcaaagagggcatttactatcctttgcaatcttcaccgttggaaggtgaagcaagctagaagctcatcttgtacccgcaacaagttgatacctgcagcacgtggacaaagctagatggcgtggacaaagctagatgggaagcctagtataattgcaaagtgaatcagttagattctagtagttactaaaatttttaagtgatatttgtatgatattgccactttggctttgcttctttgtgaacacaattggcagttactgaacatgtttgctatcgagttagttagcttcttgatattttgccaaggccaaaagcaatattattgagggtttataatttgattttttaacat

SEQ ID NO: 219066 - DNA, 1284 bp, Zea Mays
gcaaatcacaacttgttcttaatattcccctatcataggcttctagcgtggagtatgaaaatatgtgatatatattgtggtggtattgttttctgatgaaatgaatattattaccccataagtggacacaggccagttgaaccaatacgaacccgatcaactacatcgatgcatcaccaacccaagcatcccaatccaaacaacttgtaatttgaaactagaggtacattatagtaccccttttctttttagggaactagactattaaggaacaccttttctctagtggggtacaagactaatataatcagtttgtgtgacccgcctgaaaactatgttctgttatcagtattttgtgccgtcacaattcagttagcagcatgcatgttcaattgttggtgtctttgttaagtttgagtagaaaagctcaatctagcatgctcttcgctctgttttactttccatgattcgttgattatctatgcagtttctgcacgattactatgagtatgtgctttcatatattgtttactcgatgacttgaatagtttacaacgtatgattattgcttaggaccctgcactactaaatcaggggactcgcttgagtcagaaaaacttaggaaccaagttttctctctaagttactgacttcattttctactgtttatagattgcgaactgaatttaaatcaaatacttcagtattggtctctagagaggaagctctgccaaccattactaataactgagaaggatttggcaatcgcttatctttgactcaataccttatgacctcggaaaggtttgaacccgtcagggactaaagatgccaaaggttgaagaagggtcacgagcaaagagggcatttactatcctttgcaatcttcaccgttggaaggattatgataactgcaatttcatttcttcttggatatgagctccacaagaggatgagacccctctcttcgccatatgtatagcaagctagaagctcatcttgtacccgcaacaagttgatacctgcagcacgtggacaaagctagatggcgtggacaaagctagatgggaagcctagtataattgcaaagtgaatcagttagattctagtagttactaaaatttttaagtgatatttgtatgatattgccactttggctttgcttctttgtgaacacaattggcagttactgaacatgtttgctatcgagttagttagcttcttgatattttgccaaggccaaaagcaatattattgagggtttataatttgattttttaacat

SEQ ID NO: 219067 - DNA, 759 bp, Zea Mays
gcaaatcacaacttgttcttaatattcccctatcataggcttctagcgtggagtatgaaaatatgtgatatatattgtggtggtattgttttctgatgaaatgaatattattaccccataagtggacacaggccagttgaaccaatacgaacccgatcaactacatcgatgcatcaccaacccaagcatcccaatccaaacaacttgtaatttgaaactagagattgcgaactgaatttaaatcaaatacttcagtattggtctctagagaggaagctctgccaaccattactaataactgagaaggatttggcaatcgcttatctttgactcaataccttatgacctcggaaaggtttgaacccgtcagggactaaagatgccaaaggttgaagaagggtcacgagcaaagagggcatttactatcctttgcaatcttcaccgttggaaggtgaagcaagctagaagctcatcttgtacccgcaacaagttgatacctgcagcacgtggacaaagctagatggcgtggacaaagctagatgggaagcctagtataattgcaaagtgaatcagttagattctagtagttactaaaatttttaagtgatatttgtatgatattgccactttggctttgcttctttgtgaacacaattggcagttactgaacatgtttgctatcgagttagttagcttcttgatattttgccaaggccaaaagcaatattattgagggtttataatttgattttttaacat

SEQ ID NO: 219068 - DNA, 575 bp, Zea Mays
caacctctcacccaaaagtttcctgcaccgcctcaacgcagattagtccgtgggcagcttttactcgctgcagtttaggtccggaccagacaatcttagtatcactactactacatcaaaactaccaaatgtgtcaaggacgtcagagtatgggggcagcttcccttgacgccctatgatgaatgggggagattagaaagaagggagattggagagttggaagaaccaaagttcctaaagaatgaagatgaggggcattagaagagaccacattgcattaccatcgccatgaagaacatgatcaaaagacagcatcgatcgtgttagatggcttggtggtaaactatcttgttctttgtcttcaaaactagaaaaacatcgttcctttatatatgtgtactttggtcttggttttgtaatcgttgttagacattcgacgttttgtgagatatattgtgtggtctgtatcgtttcttaaccttattttagttgtggttgtaatagatcaacttgtgctatgttctttctaagaaatcttagtagttggtaagcttgtcatgaatgttgacatgggc

SEQ ID NO: 219069 - DNA, 728 bp, Zea Mays
agcaggagcagctagctacagggagaagaagtgttcgttctctgagactctgacggacgggacgggatgatacacagactgacaggctcttctcaagcttgacttccaaactgtgcagctcttcaatggagcagtcttccaacctctcacccaaaagtttcctgcaccgcctcaacgcagattagtccgtgggcaggccatccgcatcagcttttactcgctgcagtttaggtccggaccagacaatcttagtatcactactactacatcaaaactaccaaatgtgtcaaggacgtcagagtatgggggcagcttcccttgacgccctatgatgaatgggggagattagaaagaagggagattggagagttggaagaaccaaagttcctaaagaatgaagatgaggggcattagaagagaccacattgcattaccatcgccatgaagaacatgatcaaaagacagcatcgatcgtgttagatggcttggtggtaaactatcttgttctttgtcttcaaaactagaaaaacatcgttcctttatatatgtgtactttggtcttggttttgtaatcgttgttagacattcgacgttttgtgagatatattgtgtggtctgtatcgtttcttaaccttattttagttgtggttgtaatagatcaacttgtgctatgttctttctaagaaatcttagtagttggtaagcttgtcatgaatgttgacatgggc

SEQ ID NO: 219070 - DNA, 2468 bp, Zea Mays
ctgttgtagagttaccttcggactccaggccctcatccgcccctcctccccaaacgaaatgctatatttgcagaaaggtcccaatccaagtccaacaaccgaaaagaagacgacactcggagggctttcctgtaagtttcgagggcggcgaagcactagggcatccacctcggcggtggcggcggcggcctccatgtcgggcagcaacgggaacggcggcggcgcctcctccgcgctctatggcttatacggtcccaacgtgaaacctgatgttgtttttaaggaggctgctttaaactctacactaaacctgcaggatgttcagggtctagttacttgggttattggtgacggcatgctgccttcttgggtgtttgttaagaacaaacctcttatacccaaagtcgtcctactatatgttcctggccttgatgcagctttatatatgtcacaaactcgacttctctcttctctgaaagaattatgtggcaatccaaaacctgttctagcttcaagctgtataccggatgataggcacacaattgatgcactcctaacctgcagagtaaagagaaagcttgatgtaaaaacatcaaatcagtcatctaaacctgacagggatggaaaactatcaagtctggatgatcttggggacataccatttcctgttacgtattacacactttcagagaaagacttggaagataatggctaccccttcaatttaccaggttttgtccctactgtttcagctccttcaggttccttgccacataaagttcttgcacttgattgtgaaatgtgcataacagaagctggatttgagcttacaagagtgacattaattgacattaaaggatcggtggtgctagatagactagttaagcctgctaatccaatcattgattacaatacaagtggaatcactgctgagatgttggctgacgtgtccacatccctgcatgaaattcaggaagagtttgttggacttgtatatacagaaacaattcttgttggtcattctttggaaaatgaccttatggcattgcagatatcccatggtttaatcatcgacacagctgttttgtacaagtataatcgaggatctcgctgtaagattgctttgcgtgtcttgacaaaaagatttctcggccgggagatccagaacacaggatctgggcatgacagtgtggaagatgctagagctgctctagaacttgctatattgaaaataagacatggtaagaactaagaaggcatttttgctatcacttttgtttggctaacatccatttctgtaaatagctaatgtggatagggagacaacatggcataagcatatcattttgttggtactttctactaacttgttaaccaggtcctgattttggttcccaaccatcgttgtcaaggcggaaattgacatctatactgcatgagagtgggaaaaaatgctcccttattgatgacatgtctattctagatcgatattcagatacttcttgcaattcaattgctgtcttttctgatgatgatgccctctccagatcaatgaaggaggtgaagaacgacaaagtggctttcatttggacccagttctcaggattgatctcttacttccgccgaagagctgaagatcccgaaaagttgaaatcatgtgtcgcagaggctattgcattaaaaacatgtgatacaaaaactgcttcaaaaaaagcaaaaagtcaaatttgtcctgaattaaaggaaattttgtgtgaattggataaaaagataaagcagttatatggtgccctacctgacaattctatgcttattgtatgcaccggccatggtgatactcctctagtacgaagattgcggaaaatgcttcaccatgaagaagaaacaatagatagccgggaaaatattgtccaagctctgggagatttacaagcccaagccgaagttgctctgtgcttctgctgtgttaagcattaactaactgcatctttggattaatgtactgatggatatggcttcagccattatagaaggggggtggcaaaagttccggctatatggtatcggaccatgttttcgattcataatatggcccttactatttacactcagggagactgttcatgcggggaagaacattggccactgcctacggaagtgcggtaaatggcaatatgacgcacgtgctcctgatcctgatgcagccagcctgacgaatcccaaatacgggcaggctattgggtttgttgaccccaagctgtccttggagagttgaattcattaatttatttatggctagaccaggatgttatggttgcttgttactttcactgaatcttcaagtgggttcgttgtataaataatactctcttcatttttttaatctgttgcggtatagtttaaaaataaactaacgagcgacaaatattgagaaccaaggtggtacacccttcgttccagaatagtaa

SEQ ID NO: 219071 - DNA, 2303 bp, Zea Mays
ctgttgtagagttaccttcggactccaggccctcatccgcccctcctccccaaacgaaatgctatatttgcagaaaggtcccaatccaagtccaacaaccgaaaagaagacgacactcggagggctttcctgtaagtttcgagggcggcgaagcactagggcatccacctcggcggtggcggcggcggcctccatgtcgggcagcaacgggaacggcggcggcgcctcctccgcgctctatggcttatacggtcccaacgtgaaacctgatgttgtttttaaggaggctgctttaaactctacactaaacctgcaggatgttcagggtctagttacttgggttattggtgacggcatgctgccttcttgggtgtttgttaagaacaaacctcttatacccaaagtcgtcctactatatgttcctggccttgatgcagctttatatatgtcacaaactcgacttctctcttctctgaaagaattatgtggcaatccaaaacctgttctagcttcaagctgtataccggatgataggcacacaattgatgcactcctaacctgcagagtaaagagaaagcttgatgtaaaaacatcaaatcagtcatctaaacctgacagggatggaaaactatcaagtctggatgatcttggggacataccatttcctgttacgtattacacactttcagagaaagacttggaagataatggctaccccttcaatttaccaggttttgtccctactgtttcagctccttcaggttccttgccacataaagttcttgcacttgattgtgaaatgtgcataacagaagctggatttgagcttacaagagtgacattaattgacattaaaggatcggtggtgctagatagactagttaagcctgctaatccaatcattgattacaatacaaggttcagtggaatcactgctgagatgttggctgacgtgtccacatccctgcatgaaattcaggaagagtttgttggacttgtatatacagaaacaattcttgttggtcattctttggaaaatgaccttatggcattgcagatatcccatggtttaatcatcgacacagctgttttgtacaagtataatcgaggatctcgctgtaagattgctttgcgtgtcttgacaaaaagatttctcggccgggagatccagaacacaggatctgggcatgacagtgtggaagatgctagagctgctctagaacttgctatattgaaaataagacatggcggaaattgacatctatactgcatgagagtgggaaaaaatgctcccttattgatgacatgtctattctagatcgatattcagatacttcttgcaattcaattgctgtcttttctgatgatgatgccctctccagatcaatgaaggaggtgaagaacgacaaagtggctttcatttggacccagttctcaggattgatctcttacttccgccgaagagctgaagatcccgaaaagttgaaatcatgtgtcgcagaggctattgcattaaaaacatgtgatacaaaaactgcttcaaaaaaagcaaaaagtcaaatttgtcctgaattaaaggaaattttgtgtgaattggataaaaagataaagcagttatatggtgccctacctgacaattctatgcttattgtatgcaccggccatggtgatactcctctagtacgaagattgcggaaaatgcttcaccatgaagaagaaacaatagatagccgggaaaatattgtccaagctctgggagatttacaagcccaagccgaagttgctctgtgcttctgctgtgttaagcattaactaactgcatctttggattaatgtactgatggatatggcttcagccattatagaaggggggtggcaaaagttccggctatatggtatcggaccatgttttcgattcataatatggcccttactatttacactcagggagactgttcatgcggggaagaacattggccactgcctacggaagtgcggtaaatggcaatatgacgcacgtgctcctgatcctgatgcagccagcctgacgaatcccaaatacgggcaggctattgggtttgttgaccccaagctgtccttggagagttgaattcattaatttatttatggctagaccaggatgttatggttgcttgttactttcactgaatcttcaagtgggttcgttgtataaataatactctcttcatttttttaatctgttgcggtatagtttaaaaataaactaacgagcgacaaatattgagaaccaaggtggtacacccttcgttccagaatagtaa

SEQ ID NO: 219072 - DNA, 3994 bp, Zea Mays
gtccctggaaccgccgccaaaccccgccatccgcgcatccccctcgatccgcactcgccgccgcacaatccggtatcccgagcctgagccctagccctcacgcggtcatgcctccccgctctgtggcgattgcgctctcgcgccccccttctgggtgctttgtcgcagttgcggctgtggccgccacattgctccttcctctcgggtatctgccctcgtgttgtcgtgtctccccgctccgctgtggtcgtgctctcacggcccctgtcgggcgctccgtcgccgccgcggctgcgtccgccacaggggaccactgaggcgctgaccaccagcactaccacagagggcgcgcgggcgtgccggaggccggacccactgtcttggcgtgcggcgtcagtgcgacgtggtcgtggtgggtgctcgcgtacgtgtcagtggccgccgatgttgacacgctgtggtggttccgctcgtgcttcgcttgtagtgggacgattctgtgtctgcatgaagggtggatatggctggagcagagaggcctgcaatgggcaacacacgttgtattggcacaatgaatgttgattcagttatttaaaattcagatctcatagtttgataaggtagtttcttgcttggagcaatacaggcatggacgtcattagattggggtggtgagctatatgatgatcttttagggagtcagcggccttgcaatccccctctgcaaccataagaaatttcgtgtgctacagatttagtactgatgaatccctctatgcagttccaaacaactgcacaaatcttaagagagaggtaggaacaacagtggtcgttgttgctgcacaaacaaaggctattgctggtaacttttacttgttatattatttaagcatattatatagactagacatttgctactttgctttctcatcatcttatgtttttgatttatttctgcatctgttcaatataaatttgagatgcatatgctctttcatttctttttacattaaatagtaaaaattatggtggcagggttgatgtctttgtgtgtgtgtgaaccagacatgaaaataaattcgaagctattgccattttaaaaaaagaactacattacacatgatacatatatttatacctaacaattttttaatacttcaatctttcagtttcgactcgtcaatttctttactttcattaggacagttgttactgatggtgcattttccaccattatgcccttcatattccatcaacgtgagataagtttcattaaaattaagcaatggtgtcgagaaaggccatttaggctctaaacagtcgcagcgatatactctttcttcatacactgactttgacgtggcgagatagtgggatatttggggccaaaattagggtgaacggttgtagacagtctcaataaatggttataagatgaaacattcaagccataaaaatcagatagcctttccttgatccttccatcctctatggtgcatttcaaatcaaataacctgatgactgctatagaaattaatctgcaacttagtgttgttttttgacaatactctgacaagatagtggtaaaaatgtccactatgtaaaaaatttgctcaaatgttctggccaccatgcactccatatccaaatgcctaagttggagtgttgaacatcccattttttttcttcatattaacatttggcttgtcgtggaaatagatttgcaaaagcaacaaactgacttggttattgaaatagaactcttttatacttaaatgtttgttggccactcaatcgtccaatggtgcacaagcgctgcttttggcaaaggagaattatgggtgaaaaagtgaattggcatgtttttgtcaagtcaattcttactctttttttggtaattgaatgttttgttagattcactaaaatggtgatcaactatgtgcacctccactagataaattcttactgtttgcgtatttcactccttcaaagatagtctattggataaagctaaaagtagtagccatttccttatacttgcacatcttagggtcaatttcatactagatatattccttcaggtactttttatttgcttgcgcctaaaaatggctaaacatcactttttgcttgatgtttagtattagattgattaacattgatgtgcatttctcgttgggttattgaaaaccacatttaatttattgtgtgcccttaatggtagggaaatagatcgtgtatgcacaactttttgcagtaaagagttctattgtagtttgtaggaattaaaatttcatttttctatatataaaaacacgatttcatgcaaatttctctctctatggtacaagatacgtgacgatgtggcatttgcaatgcacacggtgagaaaggatatggttagttggtctgtcaactctacttgatgaatgacaacaattctttcatttgttgaaattctcagcttgttcagttcatagttttgatttcatggttcatatatggatacacaccaatacatgtttgttgtgacaatatgataaaggtgtacatgttttgtcgtctccattccctatgcttatatcaactgtaataaacaagttgtatttgaaaagatttcatttcacatcactatgatacaatacataatagatgagagaacataatagatgagagaactgatctcttttgttttctttctttctgagagataaattgtatacatcttatgccaaacttccaagagcttaatagatgaaccactcgaggtttttttattcattttagatttcaactgatcgtactacttgtcactcaagtcatggacagtttgcatgcggatttgactaaatcaatgataaaaggtttagggtttggcattgttacttctcttactactattccatgtctttttccttcgtgtttctatatctcttgtatgctctagatatattatgcactaacattttattaaatgataatctatgtcccgttgcaacgcacgggtaactaactaatataacttaaatggagagactaattcttagtccctcaaactaaacatgtctaaatctgcatttggactggcgtggcgagcggttccgtttctcaaaataaactgaagaaacgctatagccacgaaacgtttctggcttgaaagtttgtggtagtaaacggcttcaagctggattcgagcgttttggtttctgatccttcgcacacactagcgattatcatttctttaattatcttgctcaggtataacaagtaaaaatgtatttacttaagttattcttcacctgtaaagttcttaaaaaatcaaagtacatttttattcatttgttttttatgaaaagggtttcttcttatgagccagaatttagggaaacgttcattaagggctcgtttgggataaagagtaatggaggggattgagggggctagaatccctcactattcaaaattaagtagtggaggattctagccccctcaatccacttcattactctttatcccaaacgagccctaagagaatccggatctaaaaacgtctctgtaaaaatctaggtatctaccaaatgtactctaagtccatagggtgaggtcttattcattttatttccaaagcaagggagttggacaaaatgaacaaggctgaaacggggaagaatccactgggtgaactgggattgagatgaattaaagtaaaaccaaaagaagtgtttggtttgaggaatcaattaattctagatgagatggtgtattatttcattatgggtcttttccatagattaatagaataaacttaattctcatattattactaattattagactataaggaatgaaatgatgatggatcaattcatttcatttcacaaaccaaacaaaaaaaaacgaccagtaacaaggtaatggaccacaccattccttagaccaaacacgttgaaattaagtcatctcttccttcgatggtcatccgcgtacggcgtac

SEQ ID NO: 219073 - DNA, 3961 bp, Zea Mays
gtccctggaaccgccgccaaaccccgccatccgcgcatccccctcgatccgcactcgccgccgcacaatccggtatcccgagcctgagccctagccctcacgcggtcatgcctccccgctctgtggcgattgcgctctcgcgccccccttctgggtgctttgtcgcagttgcggctgtggccgccacattgctccttcctctcgggtatctgccctcgtgttgtcgtgtctccccgctccgctgtggtcgtgctctcacggcccctgtcgggcgctccgtcgccgccgcggctgcgtccgccacaggggaccactgaggcgctgaccaccagcactaccacagagggcgcgcgggcgtgccggaggccggacccactgtcttggcgtgcggcgtcagtgcgacgtggtcgtggtgggtgctcgcgtacgtgtcagtggccgccgatgttgacacgctgtgtgggacgattctgtgtctgcatgaagggtggatatggctggagcagagaggcctgcaatgggcaacacacgttgtattggcacaatgaatgttgattcagttatttaaaattcagatctcatagtttgataaggtttccattctatgcttggtttaggagcaatacaggcatggacgtcattagattggggtgatcttttagggagtcagcggccttgcaatccccctctgcaaccataagaaatttcgtgtgctacagatttagtactgatgaatccctctatgcagttccaaacaactgcacaaatcttaagagagaggtaggaacaacagtggtcgttgttgctgcacaaacaaaggctattgctggtaacttttacttgttatattatttaagcatattatatagactagacatttgctactttgctttctcatcatcttatgtttttgatttatttctgcatctgttcaatataaatttgagatgcatatgctctttcatttctttttacattaaatagtaaaaattatggtggcagggttgatgtctttgtgtgtgtgtgaaccagacatgaaaataaattcgaagctattgccattttaaaaaaagaactacattacacatgatacatatatttatacctaacaattttttaatacttcaatctttcagtttcgactcgtcaatttctttactttcattaggacagttgttactgatggtgcattttccaccattatgcccttcatattccatcaacgtgagataagtttcattaaaattaagcaatggtgtcgagaaaggccatttaggctctaaacagtcgcagcgatatactctttcttcatacactgactttgacgtggcgagatagtgggatatttggggccaaaattagggtgaacggttgtagacagtctcaataaatggttataagatgaaacattcaagccataaaaatcagatagcctttccttgatccttccatcctctatggtgcatttcaaatcaaataacctgatgactgctatagaaattaatctgcaacttagtgttgttttttgacaatactctgacaagatagtggtaaaaatgtccactatgtaaaaaatttgctcaaatgttctggccaccatgcactccatatccaaatgcctaagttggagtgttgaacatcccattttttttcttcatattaacatttggcttgtcgtggaaatagatttgcaaaagcaacaaactgacttggttattgaaatagaactcttttatacttaaatgtttgttggccactcaatcgtccaatggtgcacaagcgctgcttttggcaaaggagaattatgggtgaaaaagtgaattggcatgtttttgtcaagtcaattcttactctttttttggtaattgaatgttttgttagattcactaaaatggtgatcaactatgtgcacctccactagataaattcttactgtttgcgtatttcactccttcaaagatagtctattggataaagctaaaagtagtagccatttccttatacttgcacatcttagggtcaatttcatactagatatattccttcaggtactttttatttgcttgcgcctaaaaatggctaaacatcactttttgcttgatgtttagtattagattgattaacattgatgtgcatttctcgttgggttattgaaaaccacatttaatttattgtgtgcccttaatggtagggaaatagatcgtgtatgcacaactttttgcagtaaagagttctattgtagtttgtaggaattaaaatttcatttttctatatataaaaacacgatttcatgcaaatttctctctctatggtacaagatacgtgacgatgtggcatttgcaatgcacacggtgagaaaggatatggttagttggtctgtcaactctacttgatgaatgacaacaattctttcatttgttgaaattctcagcttgttcagttcatagttttgatttcatggttcatatatggatacacaccaatacatgtttgttgtgacaatatgataaaggtgtacatgttttgtcgtctccattccctatgcttatatcaactgtaataaacaagttgtatttgaaaagatttcatttcacatcactatgatacaatacataatagatgagagaacataatagatgagagaactgatctcttttgttttctttctttctgagagataaattgtatacatcttatgccaaacttccaagagcttaatagatgaaccactcgaggtttttttattcattttagatttcaactgatcgtactacttgtcactcaagtcatggacagtttgcatgcggatttgactaaatcaatgataaaaggtttagggtttggcattgttacttctcttactactattccatgtctttttccttcgtgtttctatatctcttgtatgctctagatatattatgcactaacattttattaaatgataatctatgtcccgttgcaacgcacgggtaactaactaatataacttaaatggagagactaattcttagtccctcaaactaaacatgtctaaatctgcatttggactggcgtggcgagcggttccgtttctcaaaataaactgaagaaacgctatagccacgaaacgtttctggcttgaaagtttgtggtagtaaacggcttcaagctggattcgagcgttttggtttctgatccttcgcacacactagcgattatcatttctttaattatcttgctcaggtataacaagtaaaaatgtatttacttaagttattcttcacctgtaaagttcttaaaaaatcaaagtacatttttattcatttgttttttatgaaaagggtttcttcttatgagccagaatttagggaaacgttcattaagggctcgtttgggataaagagtaatggaggggattgagggggctagaatccctcactattcaaaattaagtagtggaggattctagccccctcaatccacttcattactctttatcccaaacgagccctaagagaatccggatctaaaaacgtctctgtaaaaatctaggtatctaccaaatgtactctaagtccatagggtgaggtcttattcattttatttccaaagcaagggagttggacaaaatgaacaaggctgaaacggggaagaatccactgggtgaactgggattgagatgaattaaagtaaaaccaaaagaagtgtttggtttgaggaatcaattaattctagatgagatggtgtattatttcattatgggtcttttccatagattaatagaataaacttaattctcatattattactaattattagactataaggaatgaaatgatgatggatcaattcatttcatttcacaaaccaaacaaaaaaaaacgaccagtaacaaggtaatggaccacaccattccttagaccaaacacgttgaaattaagtcatctcttccttcgatggtcatccgcgtacggcgtac

SEQ ID NO: 219074 - DNA, 4030 bp, Zea Mays
gcgcgcgccgtccctggaaccgccgccaaaccccgccatccgcgcatccccctcgatccgcactcgccgccgcacaatccggtatcccgagcctgagccctagccctcacgcggtcatgcctccccgctctgtggcgattgcgctctcgcgccccccttctgggtgctttgtcgcagttgcggctgtggccgccacattgctccttcctctcgggtatctgccctcgtgttgtcgtgtctccccgctccgctgtggtcgtgctctcacggcccctgtcgggcgctccgtcgccgccgcggctgcgtccgccacaggggaccactgaggcgctgaccaccagcactaccacagagggcgcgcgggcgtgccggaggccggacccactgtcttggcgtgcggcgtcagtgcgacgtggtcgtggtgggtgctcgcgtacgtgtcagtggccgccgatgttgacacgctgtggtaggtcatcaccgactacgagcacctcgccgactcaatccccaacctcatatagaggtggttccgctcgtgcttcgcttgtagtgggacgattctgtgtctgcatgaagggtggatatggctggagcagagaggcctgcaatgggcaacacacgttgtattggcacaatgaatgttgattcagttatttaaaattcagatctcatagtttgataaggagcaatacaggcatggacgtcattagattggggtgatcttttagggagtcagcggccttgcaatccccctctgcaaccataagaaatttcgtgtgctacagatttagtactgatgaatccctctatgcagttccaaacaactgcacaaatcttaagagagaggtaggaacaacagtggtcgttgttgctgcacaaacaaaggctattgctggtaacttttacttgttatattatttaagcatattatatagactagacatttgctactttgctttctcatcatcttatgtttttgatttatttctgcatctgttcaatataaatttgagatgcatatgctctttcatttctttttacattaaatagtaaaaattatggtggcagggttgatgtctttgtgtgtgtgtgaaccagacatgaaaataaattcgaagctattgccattttaaaaaaagaactacattacacatgatacatatatttatacctaacaattttttaatacttcaatctttcagtttcgactcgtcaatttctttactttcattaggacagttgttactgatggtgcattttccaccattatgcccttcatattccatcaacgtgagataagtttcattaaaattaagcaatggtgtcgagaaaggccatttaggctctaaacagtcgcagcgatatactctttcttcatacactgactttgacgtggcgagatagtgggatatttggggccaaaattagggtgaacggttgtagacagtctcaataaatggttataagatgaaacattcaagccataaaaatcagatagcctttccttgatccttccatcctctatggtgcatttcaaatcaaataacctgatgactgctatagaaattaatctgcaacttagtgttgttttttgacaatactctgacaagatagtggtaaaaatgtccactatgtaaaaaatttgctcaaatgttctggccaccatgcactccatatccaaatgcctaagttggagtgttgaacatcccattttttttcttcatattaacatttggcttgtcgtggaaatagatttgcaaaagcaacaaactgacttggttattgaaatagaactcttttatacttaaatgtttgttggccactcaatcgtccaatggtgcacaagcgctgcttttggcaaaggagaattatgggtgaaaaagtgaattggcatgtttttgtcaagtcaattcttactctttttttggtaattgaatgttttgttagattcactaaaatggtgatcaactatgtgcacctccactagataaattcttactgtttgcgtatttcactccttcaaagatagtctattggataaagctaaaagtagtagccatttccttatacttgcacatcttagggtcaatttcatactagatatattccttcaggtactttttatttgcttgcgcctaaaaatggctaaacatcactttttgcttgatgtttagtattagattgattaacattgatgtgcatttctcgttgggttattgaaaaccacatttaatttattgtgtgcccttaatggtagggaaatagatcgtgtatgcacaactttttgcagtaaagagttctattgtagtttgtaggaattaaaatttcatttttctatatataaaaacacgatttcatgcaaatttctctctctatggtacaagatacgtgacgatgtggcatttgcaatgcacacggtgagaaaggatatggttagttggtctgtcaactctacttgatgaatgacaacaattctttcatttgttgaaattctcagcttgttcagttcatagttttgatttcatggttcatatatggatacacaccaatacatgtttgttgtgacaatatgataaaggtgtacatgttttgtcgtctccattccctatgcttatatcaactgtaataaacaagttgtatttgaaaagatttcatttcacatcactatgatacaatacataatagatgagagaacataatagatgagagaactgatctcttttgttttctttctttctgagagataaattgtatacatcttatgccaaacttccaagagcttaatagatgaaccactcgaggtttttttattcattttagatttcaactgatcgtactacttgtcactcaagtcatggacagtttgcatgcggatttgactaaatcaatgataaaaggtttagggtttggcattgttacttctcttactactattccatgtctttttccttcgtgtttctatatctcttgtatgctctagatatattatgcactaacattttattaaatgataatctatgtcccgttgcaacgcacgggtaactaactaatataacttaaatggagagactaattcttagtccctcaaactaaacatgtctaaatctgcatttggactggcgtggcgagcggttccgtttctcaaaataaactgaagaaacgctatagccacgaaacgtttctggcttgaaagtttgtggtagtaaacggcttcaagctggattcgagcgttttggtttctgatccttcgcacacactagcgattatcatttctttaattatcttgctcaggtataacaagtaaaaatgtatttacttaagttattcttcacctgtaaagttcttaaaaaatcaaagtacatttttattcatttgttttttatgaaaagggtttcttcttatgagccagaatttagggaaacgttcattaagggctcgtttgggataaagagtaatggaggggattgagggggctagaatccctcactattcaaaattaagtagtggaggattctagccccctcaatccacttcattactctttatcccaaacgagccctaagagaatccggatctaaaaacgtctctgtaaaaatctaggtatctaccaaatgtactctaagtccatagggtgaggtcttattcattttatttccaaagcaagggagttggacaaaatgaacaaggctgaaacggggaagaatccactgggtgaactgggattgagatgaattaaagtaaaaccaaaagaagtgtttggtttgaggaatcaattaattctagatgagatggtgtattatttcattatgggtcttttccatagattaatagaataaacttaattctcatattattactaattattagactataaggaatgaaatgatgatggatcaattcatttcatttcacaaaccaaacaaaaaaaaacgaccagtaacaaggtaatggaccacaccattccttagaccaaacacgttgaaattaagtcatctcttccttcgatggtcatccgcgtacggcgtac

SEQ ID NO: 219075 - DNA, 4019 bp, Zea Mays
cccgcgcgcgccgtccctggaaccgccgccaaaccccgccatccgcgcatccccctcgatccgcactcgccgccgcacaatccggtatcccgagcctgagccctagccctcacgcggtcatgcctccccgctctgtggcgattgcgctctcgcgccccccttctgggtgctttgtcgcagttgcggctgtggccgccacattgctccttcctctcgggtatctgccctcgtgttgtcgtgtctccccgctccgctgtggtcgtgctctcacggcccctgtcgggcgctccgtcgccgccgcggctgcgtccgccacaggggaccactgaggcgctgaccaccagcactaccacagagggcgcgcgggcgtgccggaggccggacccactgtcttggcgtgcggcgtcagtgcgacgtggtcgtggtgggtgctcgcgtacgtgtcagtggccgccgatgttgacacgctgtggtgtctgattcaggtggttccgctcgtgcttcgcttgtagtgggacgattctgtgtctgcatgaagggtggatatggctggagcagagaggcctgcaatgggcaacacacgttgtattggcacaatgaatgttgattcagttatttaaaattcagatctcatagtttgataaggtagtttcttgcttggagcaatacaggcatggacgtcattagattggggtggtgagctatatgatgatcttttagggagtcagcggccttgcaatccccctctgcaaccataagaaatttcgtgtgctacagatttagtactgatgaatccctctatgcagttccaaacaactgcacaaatcttaagagagaggtaggaacaacagtggtcgttgttgctgcacaaacaaaggctattgctggtaacttttacttgttatattatttaagcatattatatagactagacatttgctactttgctttctcatcatcttatgtttttgatttatttctgcatctgttcaatataaatttgagatgcatatgctctttcatttctttttacattaaatagtaaaaattatggtggcagggttgatgtctttgtgtgtgtgtgaaccagacatgaaaataaattcgaagctattgccattttaaaaaaagaactacattacacatgatacatatatttatacctaacaattttttaatacttcaatctttcagtttcgactcgtcaatttctttactttcattaggacagttgttactgatggtgcattttccaccattatgcccttcatattccatcaacgtgagataagtttcattaaaattaagcaatggtgtcgagaaaggccatttaggctctaaacagtcgcagcgatatactctttcttcatacactgactttgacgtggcgagatagtgggatatttggggccaaaattagggtgaacggttgtagacagtctcaataaatggttataagatgaaacattcaagccataaaaatcagatagcctttccttgatccttccatcctctatggtgcatttcaaatcaaataacctgatgactgctatagaaattaatctgcaacttagtgttgttttttgacaatactctgacaagatagtggtaaaaatgtccactatgtaaaaaatttgctcaaatgttctggccaccatgcactccatatccaaatgcctaagttggagtgttgaacatcccattttttttcttcatattaacatttggcttgtcgtggaaatagatttgcaaaagcaacaaactgacttggttattgaaatagaactcttttatacttaaatgtttgttggccactcaatcgtccaatggtgcacaagcgctgcttttggcaaaggagaattatgggtgaaaaagtgaattggcatgtttttgtcaagtcaattcttactctttttttggtaattgaatgttttgttagattcactaaaatggtgatcaactatgtgcacctccactagataaattcttactgtttgcgtatttcactccttcaaagatagtctattggataaagctaaaagtagtagccatttccttatacttgcacatcttagggtcaatttcatactagatatattccttcaggtactttttatttgcttgcgcctaaaaatggctaaacatcactttttgcttgatgtttagtattagattgattaacattgatgtgcatttctcgttgggttattgaaaaccacatttaatttattgtgtgcccttaatggtagggaaatagatcgtgtatgcacaactttttgcagtaaagagttctattgtagtttgtaggaattaaaatttcatttttctatatataaaaacacgatttcatgcaaatttctctctctatggtacaagatacgtgacgatgtggcatttgcaatgcacacggtgagaaaggatatggttagttggtctgtcaactctacttgatgaatgacaacaattctttcatttgttgaaattctcagcttgttcagttcatagttttgatttcatggttcatatatggatacacaccaatacatgtttgttgtgacaatatgataaaggtgtacatgttttgtcgtctccattccctatgcttatatcaactgtaataaacaagttgtatttgaaaagatttcatttcacatcactatgatacaatacataatagatgagagaacataatagatgagagaactgatctcttttgttttctttctttctgagagataaattgtatacatcttatgccaaacttccaagagcttaatagatgaaccactcgaggtttttttattcattttagatttcaactgatcgtactacttgtcactcaagtcatggacagtttgcatgcggatttgactaaatcaatgataaaaggtttagggtttggcattgttacttctcttactactattccatgtctttttccttcgtgtttctatatctcttgtatgctctagatatattatgcactaacattttattaaatgataatctatgtcccgttgcaacgcacgggtaactaactaatataacttaaatggagagactaattcttagtccctcaaactaaacatgtctaaatctgcatttggactggcgtggcgagcggttccgtttctcaaaataaactgaagaaacgctatagccacgaaacgtttctggcttgaaagtttgtggtagtaaacggcttcaagctggattcgagcgttttggtttctgatccttcgcacacactagcgattatcatttctttaattatcttgctcaggtataacaagtaaaaatgtatttacttaagttattcttcacctgtaaagttcttaaaaaatcaaagtacatttttattcatttgttttttatgaaaagggtttcttcttatgagccagaatttagggaaacgttcattaagggctcgtttgggataaagagtaatggaggggattgagggggctagaatccctcactattcaaaattaagtagtggaggattctagccccctcaatccacttcattactctttatcccaaacgagccctaagagaatccggatctaaaaacgtctctgtaaaaatctaggtatctaccaaatgtactctaagtccatagggtgaggtcttattcattttatttccaaagcaagggagttggacaaaatgaacaaggctgaaacggggaagaatccactgggtgaactgggattgagatgaattaaagtaaaaccaaaagaagtgtttggtttgaggaatcaattaattctagatgagatggtgtattatttcattatgggtcttttccatagattaatagaataaacttaattctcatattattactaattattagactataaggaatgaaatgatgatggatcaattcatttcatttcacaaaccaaacaaaaaaaaacgaccagtaacaaggtaatggaccacaccattccttagaccaaacacgttgaaattaagtcatctcttccttcgatggtcatccgcgtacggcgtac

SEQ ID NO: 219076 - DNA, 2658 bp, Zea Mays
ccttagcagaactgactccctcttcttcgtcttcgcgagcagcgaggcatcacacgcgcctgcacgatctcctcctgcgagcgagatctcaccaccgcagcggcgccgtggccatggcgggaaggtactaccagggccagggcggtggcgggggcacgtccatggaggtagtcagcacgccgaaccaggagctggccctcaccaactgtgcatacgtctgccccgcggacctccgtcgcttccccaacgcgctcgccgtcgtcgccgactcctgggtcttcaccctacgtgaacacaatgctgtcgcaagcgggcgcattgccttgaatgctattcaacgtcgtcaggcaaaggtttcagctggggattctgttactgttagcagttttgtcccccctgatgatttcaagttggctttgctcactttggagctagagtatgccaaggcaagagccaaccgaaatgacgagctggatgctgttgtgcttgcccaacaactccgtaagaggtttctggatcaggtcatgaccttggggcaaagggtgccatttgaatttcatggaacaaactatgtattcaccgtcaatcaagctttgctagagggtcaagagagttctacaccattggatagaggattcttgtcaagtgatacatacatcatatttgaggctgctcctaattcaggaattaaggtgatcaaccaaaaggaagctgctagcagcaaacttttcaaacataaagagtttaacctggaaaaattggggataggtgggttaagtgctgaattcactgacatatttcgtagggcattcgcttcaagagtctttcctcctcaagttgtcagtaagttgggcatcaaacatgtaaaaggtatactgctatatggacctcctggtactggcaagactcttatggcacgacaaattggaaaattattgaacggaaaagatcccaagattgtgaatggacctgaagttctgagcaagtttgttggagaaaccgagaagaatgtgagagatttgtttgctgatgctgaaaatgagcagaggacacgaggtgatcagagtgacctccatgtaattatatttgatgaaattgatgccatctgcaagtctagaggatctacccgcgatggtacaggtgtacatgatagcattgtaaaccagctccttacaaagatggtgttgaggcgttgaataacgtattgcttattggaatgaccaatcgtaaagatttgcttgacgaagctttattgagacctggacgattggaagttcacatcgagataaacctgcctgatgaaaatggtcgtttccaaattcttcagattcatacaaataagatgaaagagaattctttcctatctccagatattaatcttcttgagctagccgcaaggacaaagaactacagtggagcagagttggaaggtgttgtcaaaagtgctgtctcgtatgctttgaaccggcagataaccatggatgacctcactaaacctttggatgaggaaagcattaaggttactatggatgactttgtgaatgcacttcatgaaattactcctgcatttggtgcttccaccgatgatctcgaaagatgcagattgcgaggtattgttgactgtggtaaggcacataagcacatttaccagagagctatgctccttgtagagcaagttaaagttagcaaaggtagtccacttgtgacttgcctgttggaaggtcctgctggaagtggtaaaacagctatggcagcaagtgttggcattgacagtgattttgcatatgtgaaaattatatcagcagaaacaatgattggtttcagtgaaagcagtaaatgtgcacagatttgcaaggtttttgaagatgcatacaagtctcagttcagcatcatagttcttgatgatatcgaaaggttactggagtatgtagccattggaccacgtttttcaaacttgatctctcaaactcttctggtcctcctcaagagggttcctcctaagggaaaaaacctgcttgtgattggaacaacaagcgaggttggcttcctagaatctgttggaatgtgtgacgtgttctctgtgacataccatgtccccaagctgaaaaaggaggatgcgaaaaaggtattgcatcatcttgatgtgttcgatgacggggaccttgatgcagcagcagaagcactggatgatatgccaatcaagaagctgtacacgcttgttgagatggctgcacaggggccaaccggaggaagtgcagaagcaatttatgccggagaagacaagatagatatcaaccatttcttcagcatcttaagtgatattatccgttactgagcccgcatggatcctaggtatccagtgggaggttatttgcacctgtgcttcatcaccccttgtggcatccttacagcgtgttaagagtggtttgatgtgttgtttttgtttggtgcgcctactagagctgttggatttgaccagaggcgaattccacgatatagcgttttttgtattgtatgacgatgtttctacagttgataataggatccagctatagacctcagaaaagaaatgaatttcattctccttttacatatggttccagctcttctgtgctcatttttagaatacgaacaatctgttttaaggctgcaaggacg

SEQ ID NO: 219077 - DNA, 2654 bp, Zea Mays
cttagcagaactgactccctcttcttcgtcttcgcgagcagcgaggcatcacacgcgcctgcacgatctcctcctgcgagcgagatctcaccaccgcagcggcgccgtggccatggcgggaaggtactaccagggccagggcggtggcgggggcacgtccatggaggtagtcagcacgccgaaccaggagctggccctcaccaactgtgcatacgtctgccccgcggacctccgtcgcttccccaacgcgctcgccgtcgtcgccgactcctgggtcttcaccctacgtgaacacaatgctgtcgcaagcgggcgcattgccttgaatgctattcaacgtcgtcaggcaaaggtttcagctggggattctgttactgttagcagttttgtcccccctgatgatttcaagttggctttgctcactttggagctagagtatgccaaggcaagagccaaccgaaatgacgagctggatgctgttgtgcttgcccaacaactccgtaagaggtttctggatcaggtcatgaccttggggcaaagggtgccatttgaatttcatggaacaaactatgtattcaccgtcaatcaagctttgctagagggtcaagagagttctacaccattggatagaggattcttgtcaagtgatacatacatcatatttgaggctgctcctaattcaggaattaaggtgatcaaccaaaaggaagctgctagcagcaaacttttcaaacataaagagtttaacctggaaaaattggggataggtgggttaagtgctgaattcactgacatatttcgtagggcattcgcttcaagagtctttcctcctcaagttgtcagtaagttgggcatcaaacatgtaaaaggtatactgctatatggacctcctggtactggcaagactcttatggcacgacaaattggaaaattattgaacggaaaagatcccaagattgtgaatggacctgaagttctgagcaagtttgttggagaaaccgagaagaatgtgagagatttgtttgctgatgctgaaaatgagcagaggacacgaggtgatcagagtgacctccatgtaattatatttgatgaaattgatgccatctgcaagtctagaggatctacccgcgatggtacaggtgtacatgatagcattgtaaaccagctccttacaaagatagatggtgttgaggcgttgaataacgtattgcttattggaatgaccaatcgtaaagatttgcttgacgaagctttattgagacctggacgattggaagttcacatcgagataaacctgcctgatgaaaatggtcgtttccaaattcttcagattcatacaaataagatgaaagagaattctttcctatctccagatattaatcttcttgagctaggacaaagaactacagtggagcagagttggaaggtgttgtcaaaagtgctgtctcgtatgctttgaaccggcagataaccatggatgacctcactaaacctttggatgaggaaagcattaaggttactatggatgactttgtgaatgcacttcatgaaattactcctgcatttggtgcttccaccgatgatctcgaaagatgcagattgcgaggtattgttgactgtggtaaggcacataagcacatttaccagagagctatgctccttgtagagcaagttaaagttagcaaaggtagtccacttgtgacttgcctgttggaaggtcctgctggaagtggtaaaacagctatggcagcaagtgttggcattgacagtgattttgcatatgtgaaaattatatcagcagaaacaatgattggtttcagtgaaagcagtaaatgtgcacagatttgcaaggtttttgaagatgcatacaagtctcagttcagcatcatagttcttgatgatatcgaaaggttactggagtatgtagccattggaccacgtttttcaaacttgatctctcaaactcttctggtcctcctcaagagggttcctcctaagggaaaaaacctgcttgtgattggaacaacaagcgaggttggcttcctagaatctgttggaatgtgtgacgtgttctctgtgacataccatgtccccaagctgaaaaaggaggatgcgaaaaaggtattgcatcatcttgatgtgttcgatgacggggaccttgatgcagcagcagaagcactggatgatatgccaatcaagaagctgtacacgcttgttgagatggctgcacaggggccaaccggaggaagtgcagaagcaatttatgccggagaagacaagatagatatcaaccatttcttcagcatcttaagtgatattatccgttactgagcccgcatggatcctaggtatccagtgggaggttatttgcacctgtgcttcatcaccccttgtggcatccttacagcgtgttaagagtggtttgatgtgttgtttttgtttggtgcgcctactagagctgttggatttgaccagaggcgaattccacgatatagcgttttttgtattgtatgacgatgtttctacagttgataataggatccagctatagacctcagaaaagaaatgaatttcattctccttttacatatggttccagctcttctgtgctcatttttagaatacgaacaatctgttttaaggctgcaaggacg

SEQ ID NO: 219078 - DNA, 2657 bp, Zea Mays
cttagcagaactgactccctcttcttcgtcttcgcgagcagcgaggcatcacacgcgcctgcacgatctcctcctgcgagcgagatctcaccaccgcagcggcgccgtggccatggcgggaaggtactaccagggccagggcggtggcgggggcacgtccatggaggtagtcagcacgccgaaccaggagctggccctcaccaactgtgcatacgtctgccccgcggacctccgtcgcttccccaacgcgctcgccgtcgtcgccgactcctgggtcttcaccctacgtgaacacaatgctgtcgcaagcgggcgcattgccttgaatgctattcaacgtcgtcaggcaaaggtttcagctggggattctgttactgttagcagttttgtcccccctgatgatttcaagttggctttgctcactttggagctagagtatgccaaggcaagagccaaccgaaatgacgagctggatgctgttgtgcttgcccaacaactccgtaagaggtttctggatcaggtcatgaccttggggcaaagggtgccatttgaatttcatggaacaaactatgtattcaccgtcaatcaagctttgctagagggtcaagagagttctacaccattggatagaggattcttgtcaagtgatacatacatcatatttgaggctgctcctaattcaggaattaaggtgatcaaccaaaaggaagctgctagcagcaaacttttcaaacataaagagtttaacctggaaaaattggggataggtgggttaagtgctgaattcactgacatatttcgtagggcattcgcttcaagagtctttcctcctcaagttgtcagttgggcatcaaacatgtaaaaggtatactgctatatggacctcctggtactggcaagactcttatggcacgacaaattggaaaattattgaacggaaaagatcccaagattgtgaatggacctgaagttctgagcaagtttgttggagaaaccgagaagaatgtgagagatttgtttgctgatgctgaaaatgagcagaggacacgaggtgatcagagtgacctccatgtaattatatttgatgaaattgatgccatctgcaagtctagaggatctacccgcgatggtacaggtgtacatgatagcattgtaaaccagctccttacaaagatagatggtgttgaggcgttgaataacgtattgcttattggaatgaccaatcgtaaagatttgcttgacgaagctttattgagacctggacgattggaagttcacatcgagataaacctgcctgatgaaaatggtcgtttccaaattcttcagattcatacaaataagatgaaagagaattctttcctatctccagatattaatcttcttgagctagccgcaaggacaaagaactacagtggagcagagttggaaggtgttgtcaaaagtgctgtctcgtatgctttgaaccggcagataaccatggatgacctcactaaacctttggatgaggaaagcattaaggttactatggatgactttgtgaatgcacttcatgaaattactcctgcatttggtgcttccaccgatgatctcgaaagatgcagattgcgaggtattgttgactgtggtaaggcacataagcacatttaccagagagctatgctccttgtagagcaagttaaagttagcaaaggtagtccacttgtgacttgcctgttggaaggtcctgctggaagtggtaaaacagctatggcagcaagtgttggcattgacagtgattttgcatatgtgaaaattatatcagcagaaacaatgattggtttcagtgaaagcagtaaatgtgcacagatttgcaaggtttttgaagatgcatacaagtctcagttcagcatcatagttcttgatgatatcgaaaggttactggagtatgtagccattggaccacgtttttcaaacttgatctctcaaactcttctggtcctcctcaagagggttcctcctaagggaaaaaacctgcttgtgattggaacaacaagcgaggttggcttcctagaatctgttggaatgtgtgacgtgttctctgtgacataccatgtccccaagctgaaaaaggaggatgcgaaaaaggtattgcatcatcttgatgtgttcgatgacggggaccttgatgcagcagcagaagcactggatgatatgccaatcaagaagctgtacacgcttgttgagatggctgcacaggggccaaccggaggaagtgcagaagcaatttatgccggagaagacaagatagatatcaaccatttcttcagcatcttaagtgatattatccgttactgagcccgcatggatcctaggtatccagtgggaggttatttgcacctgtgcttcatcaccccttgtggcatccttacagcgtgttaagagtggtttgatgtgttgtttttgtttggtgcgcctactagagctgttggatttgaccagaggcgaattccacgatatagcgttttttgtattgtatgacgatgtttctacagttgataataggatccagctatagacctcagaaaagaaatgaatttcattctccttttacatatggttccagctcttctgtgctcatttttagaatacgaacaatctgttttaaggctgcaaggacg

SEQ ID NO: 219079 - DNA, 1584 bp, Zea Mays
tgttcttaccggtttagattttggtggagtctccatggtctagaggatctacccgcgatggtacaggtgtacatgatagcattgtaaaccagctccttacaaagatggtgttgaggcgttgaataacgtattgcttattggaatgaccaatcgtaaagatttgcttgacgaagctttattgagacctggacgattggaagttcacatcgagataaacctgcctgatgaaaatggtcgtttccaaattcttcagattcatacaaataagatgaaagagaattctttcctatctccagatattaatcttcttgagctagccgcaaggacaaagaactacagtggagcagagttggaaggtgttgtcaaaagtgctgtctcgtatgctttgaaccggcagataaccatggatgacctcactaaacctttggatgaggaaagcattaaggttactatggatgactttgtgaatgcacttcatgaaattactcctgcatttggtgcttccaccgatgatctcgaaagatgcagattgcgaggtattgttgactgtggtaaggcacataagcacatttaccagagagctatgctccttgtagagcaagttaaagttagcaaaggtagtccacttgtgacttgcctgttggaaggtcctgctggaagtggtaaaacagctatggcagcaagtgttggcattgacagtgattttgcatatgtgaaaattatatcagcagaaacaatgattggtttcagtgaaagcagtaaatgtgcacagatttgcaaggtttttgaagatgcatacaagtctcagttcagcatcatagttcttgatgatatcgaaaggttactggagtatgtagccattggaccacgtttttcaaacttgatctctcaaactcttctggtcctcctcaagagggttcctcctaagggaaaaaacctgcttgtgattggaacaacaagcgaggttggcttcctagaatctgttggaatgtgtgacgtgttctctgtgacataccatgtccccaagctgaaaaaggaggatgcgaaaaaggtattgcatcatcttgatgtgttcgatgacggggaccttgatgcagcagcagaagcactggatgatatgccaatcaagaagctgtacacgcttgttgagatggctgcacaggggccaaccggaggaagtgcagaagcaatttatgccggagaagacaagatagatatcaaccatttcttcagcatcttaagtgatattatccgttactgagcccgcatggatcctaggtatccagtgggaggttatttgcacctgtgcttcatcaccccttgtggcatccttacagcgtgttaagagtggtttgatgtgttgtttttgtttggtgcgcctactagagctgttggatttgaccagaggcgaattccacgatatagcgttttttgtattgtatgacgatgtttctacagttgataataggatccagctatagacctcagaaaagaaatgaatttcattctccttttacatatggttccagctcttctgtgctcatttttagaatacgaacaatctgttttaaggctgcaaggacg

SEQ ID NO: 219080 - DNA, 3349 bp, Zea Mays
ctcgctttgaccctttcactctgcgcgcgctatctctctagtggcgtcgtgggcgactgccgcgcctccgtcaggtgccgaggtcttcgtcgggcctttcgccggcgacgagcacctaccagttgtgggatttctcaccgcttgctcgcgatgctgcaatggacgggtggttcgaggaggaaggtgtacgcctccaggaagtcaacacagagcaggcaaaggcagtacttcgaacaaaagcgacggcaacagcagcagccagagctgcagtaccaggatgatgtggcaggagatacagatggtgccatttcacaagtggattgcattctttcagatgcttctcctaaagaggcgataaagaatatcacttctttatgcaatatcaacatgaaggaagcaggtgagggtgccatttctgtacaaacagtcaagttctcagccaaggtcagtatatccacacagtatggtgagagtgtgcctgcatttggcctgttttatgaatgccagtattgtggattggcagattgtcttcaccctttggtcatcaagatgttgcagaacctgttaatcgtcatgaagatcctcttggttgtaaagtgtcttcatccataaactgtagcaccaggcagaaaaatcaaaatctggaactccaaagtgaaatttcacttattgatttggtcagttacgagggatcaaagaataggttgaccgcacaatctgcccatgaacctcatgtttcattttctgttaaaggccttggtcatatcaagatggaaacacctccccattcaccgcgacgagccaaaagggttttacctttacctccaaagcccatgcggtttatacataaagcaaagcggtctataccatttgatgtcacaaaggcattggattctattaccagtatcaatatgctgaaggagcaaagaccatcagccaaaatgtgcagtatattggatgaagcaggctatgaaaggagagaacagtttaactgttatttaccggattcatctaagagcctcaatgctgacctctatgttgaggacgaggacatgttttatgaacctcaagctgaaaaagattggcaatcaaagcatagtagatcagatggcaatcttgctgatgagaattatgatggactctggaggatggatgaatttaattcagaggatcatctttttactcaaagagacaaacatgttgatataagtggctatggatttaaagacggatactctccagagcgaagaaactcaacaagacctgtcacagtatttgagaatacaggaattcaatcctcacatgatctcttttctgatcattcattgatggatgatgaggacactgaacttttcaagtgggaaagtcacccaccaagtaagaaaaaatccaactcaaatagcaattttggtccttctgcttggccttatgacatggtcgatggttcagagaaaaggagtccaataagtgaagaatcatgctcatctgctgcagcgatgaaggatagaacgtgcaagaaacaatcaccatcaatgaagaatgatatgaacgagaatgacgagtttcatataagattggataagctggatattccaaacatggatgcacctcttcatgggaggtcactgtttaacaatccagaaaagttggataggaaagaaacagcacctcggaagaaacttgagacaaattggttgcaaagtgttactgggcagccaagaactcaagaaccaagctgtcggttatcacttaacgagaaattttctaattgggattctcctactttccgttcaaagagtactactggactaactgataaatcgagttgcaccatgttgcataaggataaatcttctttcgatgccgctccagatttggacatgtatcaaactgtggagtcaactcaaaagaggcctgtttcaaaagttcattctatttatcagaggcctgagaaacctatttttgaagacgaaattcacatgcagcatactgtttcagatatgtttcatgataaaattgaattatcgaacccatatcagaacaagaatctccagagtgacattgatatgagcactttcattgggcagaaggtggagaagcaagaagatgaatttccatgcttcagcagttcaagtgcagacaccttccgtgcagagaaagcagcgcgttctgtaagacaaactgttgatcgacacagtacatgctcacagccttctggcagggattcattcaggcacgggttcagtcctggtttcaatttccaggagtcagaaccaaacacgttttgggcagatagctatgtttgcaatggtacttttcaggcgggtcttgagttcagtggtgtggttgcaagaaaagacagtgataagaatgaagtcaagattgaggcatctgagaaaccagatactaagatattgacaggaacatgttggctctctgcagataacaggaatgtgattaatgggactgaaacatgttctgatggctcagaagcgttcaattgttctgaagcacagaaggaaacttcagcagtagtgacacaaattcctgcgaacttgagctctcttcgggaaacctcagcagaactgttccaagttcgtaatcacgtcatacctgtaaagagggaaaagatagataatcctggtgttgacttcgatgctgtgatgcattcaaaaagcaagatccacgatgttagagatcattctaaactaaatactacgtttcgatctcctttcattggagaggtggtggggattgagaagaagattgtagcgaacgtgtcacccgacaactctgatgttcagtatcagtttatgcttgaacaacgtgttcttcggcggctttgtgttcagaagatagtggtgcctacaccgatgaaggacaggctagacaaggatacaaacttcacgatagcggaggatggatctcttcatgtccttccaaaaagcgtctaacagattcacatcaggggaaggaaatgacaatgtagggaaggaactcatttcatgcccgcgaaatgcaggagcaagcccatacacacgtctgagttcctctgtgctcatattctcatttaagggcacctcgctcgtttgtagtgtctgtttggaaatagtaatctttccttcactcattagtcctagtgttgattttcaccataatatcgcttcaatgtatgcgtgtggaaatatggatttctgaattgtttgttgttacttaagtagtgtttggttccggaatatggtgggacgaagctgtttcactctcaatttattgttgtttggattggttctgtgtagaatagagtggctataaaaaaattatgctcaaatgttaaatcattcgatttctt

SEQ ID NO: 219081 - DNA, 270 bp, Zea Mays
atttccctacatcaggataacctccacaaagttgatgggactgaaggcttgtcatgatcgtaatatcacccaccgggatatcaaacctgagaacatgatcatttgctttgaggacatcgagactggaaagtgtctaagagaggttccatctgaagcaaagcaaaataagctgaacatgcgtctgattgacttcggcagtgccattgatgattagacgttgaagaatctttatggtccagggcctactcggtgtgtgatattttgcttccc

SEQ ID NO: 219082 - DNA, 2280 bp, Zea Mays
gtgccacctctgcaaattaaatctgcgaggccaatcaaaactgtaggtgcagttagtgacgaaacaatggaccgaaggaaggtgataatgcaacgaattgaaggtgctctgtggacccaagagcccgtaagggttgctcaagaaggcaaaataactgtcagtgctctgtggtttgatgtaggtggaatcatattttcctctacaggggatgtccaagaatttatgttgttatatgtgaatcttaagtgcgacataacttcttagatgttttcccttacactcaaaatgcaagaaatatgcaaagcttggttgagaggtaccagagcatcacagcaacaggtcaaatggaaagcaaaaatctacgaagccagtctacctttctctttggatattttgagcaaaaaatctacaaagtcatatctatgaatctattagagatgttatactacctcttcaagtgaatgcatcacattgaaatgtaaccaactaaccaaggatagcatgagtgtgtaatttgagcatgagtaaggggcgtgagtaaacagattaaacctttttaagtaaaaacatatcccaacctctgatctaatactaaaataaatatttttatgcttaacaggtaatggaacattgggtttccttgttaaaggaagagatatgtctactgcggcatgatttaatttaaggtaaggtttcatgttcaagatgacaaccccatgaatgaattgcatcttgcttgctaatctatatcatgaattcagcaaaaaaaaaaaacttcagcaaatgttcatcctgcttgctaatctatcatgaattcacagtgaggccctccccggtgtacatttcattccaaaaatatctatcatgaactatctaagtacaactccaacacggcatgacaaacatgcgaagtaatacattacatacaaaatgctgacaaagctgtatgaagcctttaattgtggcactttgttttcaatctctcaattgctgcacaaataattgaaacagaaaaaccttagaactgactgttaggtatatagggccttactggtatactactgtctactattgcagtcaagtgtttcaatgggcaataaaagagttttgaaacacttcctacatggtaaagccaagtagactactcccttcgtcttaatatataatgtgaaaccgcttttataatacaagggatactctctctgtctctagatgtcggtaaatcgatgcagtagtactagtgttgagagaggaaattaaatatgttccttggtaattgaatcagaggtggttacgccttatatatcaggaccaagggagtagtaaacatcaccaagatactcaacaacaggaagttaatactagcaaaacagaaataacatccacacttgtgtattagctctaactgttagaacaatcacgaaacttcctattctaataatcaagaaacttttgaattaaaatacgatttaatgaggcatttagactaccagacatgatgaaccatctaacatataaaaaaactgacacatgaatcaaagcagatccactggagggggaacagaggacatgagactggagagaatgcatgtgcttgagaaaggtcttgaattgtggtattaccggacatgttccacaaaggcaagacaactgtatcccccttcttatttctaaactcgttcagattacacaacaaactaatgtgagacatcttttaccagatgcagatcatgcagcaagaaattcactttcttaaaaataaggtcagtatcaatgtctcataatcttccttgataacaaaaagggggtctgtgacagaagtaaaatagaagataacaatacattttcttgatgtgcaggaaagcatacttaaatcagcaaataaaattcttcaacagaaggtattttgcaatatttctcggaaatgaaattctcaacttacataatagcataaactgcaggcacaaatttaaaaaacagatttaggcaggaaatatgttaactacattaaattattaaaaggcaatttcaaaatcccgagctttattttggtatcttggggtccttttggacctttatctccttcttaatatattttcgcgcagctctcttgcgctttcgagaaaaaaatcccgagctttcaatgtcaggtaatattttttatgtatacaggaatgcatcctgaaagcagcaaacgaagttctccaacagaaggaaaatgagcacaatgaatttataaacaacagattggtcttttctggtttcatctccattggctag

SEQ ID NO: 219083 - DNA, 2366 bp, Zea Mays
ctccatattatgctccacaggcagaggcaaattgttctatcccggttctttgtgtagccagaaacgttgcatgcaatgttaggggtggtttcttcaaagacttcgatgaaggactcttaccaaggattagtaatgttcattatgaagatgaagtaaatgatatctcatctgcgccagatgttggcaattatttgataacagaggatgagaatgtcgcattagtgaatggaaatagagattcattgccttttgatggtatgtcagatgcagagattgaacggagaatgaaggaagccaatgctcaagcattccatcaaacagcgactaactttgtcatgccagtagcccctgctcagaattttgtttcgtcttcagttgcaccattagcgccacctcttagcatgatgccgcctccattcagccagccagttgttcagccaggtttttcagatccactgcaaggttctccagctagagaagagggtgaagttcctgagtctgagttggatccagacacaaggagaaggcttctcatattgcagcatggtcaagacacaagagatcctacacctccacacccagcgataccaccagtgcaagttccagttcctccagtgcaacctcatgggaattggtttcccacagaggatgggataaacccaagtaacctgagtagaggttcagcaggtttcaccgttgaatccgattctatgccctatgagaaaaaacaaccacctcatccttcattctttcatggtggggatagtcctatgtcgtctgatagatttggctatcagaaccagaggtttccctctcagctaccgcacaccgaggatcaccacatgcttcagaaccatgcacctccaaaatacagatccttttctggtgaggagctagcaactcggcatgttccctcaagccaaagaaaccatatagaatcaggaagacacttttcacaatatgctgggacctctgctggcgtattagagggcattgctgtgaaatgcggatctaaggtggagtacaggtcaacattatgtgataccgcagaactacaattctctattgaggtttggattgttggagaaaagtttggtgaaggaattggtaggacaaggagagaagcacagcgccaagctgcagaaatgtctttaagaaacttggccaataaatacttgtcatctgatccaaataagttgactgatatgaaacaagatgctttcggtagcaacagaaacatctttggttactctggaaatactagggatgatatgttgccactttcaagtacttctgaggaatctcgctttatgaaaatggaggagaacaattccaggaaaacaggagattctgtcactgctctcaaggaacttgtacaaattggtaggcaaattctaggcaaaggagttgggttaacatgggaagaggccaagctccaggctgctgatgaggctcttggaactttaagatccatgctaggtcaacttggtcatagacgatctggctctccaaggtcattggcaccgaattttaacaagcggttcaagccagattttccaaggaccgtgcaaagagttccttatggaacatattctagaatcgaaggccatgctccttagatgcctgcatgaatgatgtgcctgggcactacattttgaaagtggacgaagctttgaactgtgaggtctccacaaattgaatacaagccctggattcttggcttcttgtgggcttccaaggctctcacaggccaccactggccatgagagtaccgacgaatatatttatggaagggccaagaaactgtgaagtatgaatggtggccatgacttcatacagaatttcactgccgttgaccagtcgccagtgttaccccatgctgtcaacttggcataattgttgacctggaagttttatggttgaaccagggattgatgcaggcttgcggctccatttcatttctgggtgtatgccaggaatccatggatcaaagggcagcgctgtagttggacacttttttttcccgtgctctggttcagttgaaagttggaccccagtaggttggagccttagcatgtagccagttttattagtgctaagtttttaggcaagttataagttatagcacagaattgagtacttgacagtgttaccgttacattgtttatgtagtcatcttcattagcagcctaggcaggcaacatgaatccagtagctgacagcattcatttactatatatataattatagtatgttgtagtcatcttgtaatagaatatgcccccgtttcttgggaatctgtgcctctaattctgttgtcccttttctggttgtgtcccactcgctctgaatgtgcatgcatttgt

SEQ ID NO: 219084 - DNA, 596 bp, Zea Mays
ccagcttctatcgccgcttcactccagtgcacttcccacaaagccaccctgcaacggtccgatagaagcgggcaaaacaccgcttccgtagaaaagctgggctagttgggcatcagcgcagccctctcgcgcgtgctagggtttccccggtccatgtcgcctcgaactgctcctgtctcgcctcccaggcggagctaggattcttctcgacgacgacgatgagactccaagttcttctcgacgattcgtaaactgaacaaggcttctactactcacgatggatgcaaatgatataccatgtctgatcgataacacaacctcaacatcaatatttaaagggacaatatttttagacgctataaaatatgaacgataattttaatgtgtaatcgcatgcaataatagccatgctgtaaactttggtagagctattgccatcctccaaatgataccaggttgtccattaaagaagtgttcacgtttccagatgcaacttactcttctcaccttaaaagatattcgttgtagcgattattatgttataactgcatgtgaggatgttgttgaatacctccatatcactgtattagatggac

SEQ ID NO: 219085 - DNA, 2765 bp, Zea Mays
gcgcgcgtgggcgggtgcgggatgacctcgctgcccttccttccctgtccccggtgtacacgagggccgctggtacaagagcgtgggtgggcgcgggcgcacgagccacttcacttgtgctctctgttcggaaagaagcccggccgggtcggaaggggagcagttctcgccttctcggggaggtcgccagcgggttgggcagaggctttgcagcttttgggtcagacgcagtgttctccaaggctcactaaatggagtctcacaatggcgaggctgatgatttgcctccaccaccccctttggctgctggtgttgaaccacttaaagccgatgaaacaaagatgccattgaaacctaggagtctggtccagaggaatggctttggcagaaaggggcagcagataaagctgataacaaaccacttcaaagtttctctcatgaaggctgaagattttttctatcattactatgtcaatttgaagtatgaagatgatacaccggttgatcggaaagggtcgggaagaaaagtgatcgaaaaactgcagcaaacttatgctgctgaacttgcaaataaagattttgcatatgatggtgagaagagcctgtttacaattggtgcccttcctcaagttaaaatggaattcactgttgtggatgaagacgtttcaactggaaagactcctgcaaatggcagtccaggcaatgatagtcctcctggaagtgacaggaaaagggtccgaaggccttacaatacaaagacatataaggttgaactatcttttgcggcaaaaatccctatgagtgcaatctcacaggctttgaggggtcaggagtcagagcacactcaggaagcaattcgagtgattgacattattctgaggcagcactcagctaagcagggttgcctattagtaaggcaatcgttcttccacaataatccttccaattttgttgacctgggtggtggtgtagtgggatgtagagggttccattctagttttcgtgcaacccagagtggactttcactcaatatcgatgtgtccaccacaatgatagtgaaacctggtcctgtcattgactttctgattgccaatcagaaagttaatgatccaagcatgattgattgggcaaaggccaagcgctcactgaagaacttaaggataaaaacaagtccggcgaaccaagaacagaagattgttggtctcagcgacaggccttgccgtgagcaattattcacactgaaacataaaaatggtgaatctgaagagatcactgtttttgattactttgtaaagaaccgtggcataaagctggaatattctggtgatcttccttgtatcaatgtgggaaaaccaaagcgtccaacttattttccagttgagttatgcagtcttcttcctttgcaacggtacactaaagcattgagcacacttcaaagatcatcactcgttgagaaatctaggcagaaaccacaagaaaggatgtctgttttgtctgatgtgctgcaaagaagcaactatgatgcagaacccatgctgaaggcttgtgggattacaattgctagaaatttcatagaagttgatggtagggtactgcagccccctaagcttaaagctgggaacggagaagacatttttacgcgcaatggcagatggaatttcaataataagaagctcattagagctagcagtgtcgagaaatgggcagtagtaaacttttctgcacgatgcaatgtccgggatcttgtccgtgatctcatcaagtgtggaggcatgaagggcattatggttgatgcaccatttgctgtatttgatgagaatccttcaatgagacggtcacctgctgtaagaagggttgaagacatgtttgaacaagtgaaaactaagcttcctggagcacccaagtttcttttgtgtgttctagcggaaagaaagaattccgatatttatgggccttggaagaagaaatgccttgctgaatttgggatcgttacacagtgtgtggcaccaactagagtcaatgatcagtatcttacaaatgtcttgttaaagattaacgcaaagttgggtggcttgaattcgttgctccaaattgaaacatccccagcaattcctctcgtatccaaggtcccaactataatcttgggtatggacgtatcacacggatctcctggacattctgatataccgtctgttgctgctgttgttagttctcgtgaatggcctcttatctcaaaatacagagcatctgtccgcacccaatcaccaaaaatggaaatgattgactcgttgtttaagccacgggaaactgatgacgatggtctgattcgggagtgtctgattgacttctacaccagttcagggaagagaaagcccgaccaagtcatcatcttcagggacggtgttagtgaaagtcagtttaatcaggtgctgaacattgagttgcaacaaatcattgaggcttgcaaatttcttgatgagaaatggaatcccaagttcacattgatcattgcccagaagaatcaccacactaaatttttcattcctggaaagccagataatgttccagctggcactgttgttgacaacaaagtctgtcatccaaggaacttcgatttctacatgtgttcacatgctggaatgattggaactaccaggccaactcactatcacatcctgcatgacgagataggcttcaatcctgatgacctgcaggagctggtgcactcgctctcttatgtgggttttctggcacttcaatttcag

SEQ ID NO: 219086 - DNA, 2708 bp, Zea Mays
gagccacttcacttgtgctctctgttcggaaagaagcccggccgggtcggaaggggagcagttctcgccttctcggggaggtcgccagcgggttgggcagaggctttgcagcttttgggtcagacgcagtgttctccaaggctcactaaatggagtctcacaatggcgaggctgatgatttgcctccaccaccccctttggctgctggtgttgaaccacttaaagccgatgaaacaaagatgccattgaaacctaggagtctggtccagaggaatggctttggcagaaaggggcagcagataaagctgataacaaaccacttcaaagtttctctcatgaaggctgaagattttttctatcattactatgtcaatttgaagtatgaagatgatacaccggttgatcggaaagggtcgggaagaaaagtgatcgaaaaactgcagcaaacttatgctgctgaacttgcaaataaagattttgcatatgatggtgagaagagcctgtttacaattggtgcccttcctcaagttaaaatggaattcactgttgtggatgaagacgtttcaactggaaagactcctgcaaatggcagtccaggcaatgatagtcctcctggaagtgacaggaaaagggtccgaaggccttacaatacaaagacatataaggttgaactatcttttgcggcaaaaatccctatgagtgcaatctcacaggctttgaggggtcaggagtcagagcacactcaggaagcaattcgagtgattgacattattctgaggcagcactcagctaagcagggttgcctattagtaaggcaatcgttcttccacaataatccttccaattttgttgacctgggtggtggtgtagtgggatgtagagggttccattctagttttcgtgcaacccagagtggactttcactcaatatcgatgtgtccaccacaatgatagtgaaacctggtcctgtcattgactttctgattgccaatcagaaagttaatgatccaagcatgattgattgggcaaaggccaagcgctcactgaagaacttaaggataaaaacaagtccggcgaaccaagaacagaagattgttggtctcagcgacaggccttgccgtgagcaattattcacactgaaacataaaaatggtgaatctgaagagatcactgtttttgattactttgtaaagaaccgtggcataaagctggaatattctggtgatcttccttgtatcaatgtgggaaaaccaaagcgtccaacttattttccagttgagttatgcagtcttcttcctttgcaacggtacactaaagcattgagcacacttcaaagatcatcactcgttgagaaatctaggcagaaaccacaagaaaggatgtctgttttgtctgatgtgctgcaaagaagcaactatgatgcagaacccatgctgaaggcttgtgggattacaattgctagaaatttcatagaagttgatggtagggtactgcagccccctaagcttaaagctgggaacggagaagacattctgatataccgtctgttgctgctgttgttagttctcgtgaatggcctcttatctcaaaatacagagcatctgtccgcacccaatcaccaaaaatggaaatgattgactcgttgtttaagccacgggaaactgatgacgatggtctgattcgggagtgtctgattgacttctacaccagttcagggaagagaaagcccgaccaagtcatcatcttcagggacggtgttagtgaaagtcagtttaatcaggtgctgaacattgagttgcaacaaatcattgaggcttgcaaatttcttgatgagaaatggaatcccaagttcacattgatcattgcccagaagaatcaccacactaaatttttcattcctggaaagccagataatgttccagctggcactgttgttgacaacaaagtctgtcatccaaggaacttcgatttctacatgtgttcacatgctggaatgattggaactaccaggccaactcactatcacatcctgcatgacgagataggcttcaatcctgatgacctgcaggagctggtgcactcgctctcttatgtgtaccaaaggagcacaacagccatatcagttgttgctcccatctgctacgcccaccttgcagccgcccaggttgggcagttcataaagttcgacgagatgtcggagacttcatctagccatggggggcatacctcggcgggcagcgtccctgtacaggagctgccccgtctgcatgagaaagtgaggagctccatgttcttctgctgagcagcagggaatgtgtcccttggttttacctttttgggtgtatggtcgggggttctgaacccatgaacttgttgcctcacttggttccagcctcaggaagaactttgtaggatgctgaatggtaggatttttaagcatcgttgcagttgtgctgggtggcacgctgcaaccattttggctagcttgttgcagcacttggtgccttcctgagaggaagtagacttggaacctggtagcacgtccttaaaccatccttttaagcgttgctggttcggcctctgagctgtgtttgtcgtgctttgttggctgtgcttgtgggtgatttttgttttattgcaagggtagcgtgcaatgccttttccgttagactacttgcgctctggttgtgcgtgcaaggatggagagc

SEQ ID NO: 219087 - DNA, 3306 bp, Zea Mays
ggaaaaaccctcgtcccctccccccctcctctcacccggtccctgctggtcgaaatctagggttttggcggggtttggatcgcctgttctttgaccggaggttgttcgtgccggtgccgcgcggacttaaggagggtttctgcgggttgggcagaggctttgcagcttttgggtcagacgcagtgttctccaaggctcactaaatggagtctcacaatggcgaggctgatgatttgcctccaccaccccctttggctgctggtgttgaaccacttaaagccgatgaaacaaagatgccattgaaacctaggagtctggtccagaggaatggctttggcagaaaggggcagcagataaagctgataacaaaccacttcaaagtttctctcatgaaggctgaagattttttctatcattactatgtcaatttgaagtatgaagatgatacaccggttgatcggaaagggtcgggaagaaaagtgatcgaaaaactgcagcaaacttatgctgctgaacttgcaaataaagattttgcatatgatggtgagaagagcctgtttacaattggtgcccttcctcaagttaaaatggaattcactgttgtggatgaagacgtttcaactggaaagactcctgcaaatggcagtccaggcaatgatagtcctcctggaagtgacaggaaaagggtccgaaggccttacaatacaaagacatataaggttgaactatcttttgcggcaaaaatccctatgagtgcaatctcacaggctttgaggggtcaggagtcagagcacactcaggaagcaattcgagtgattgacattattctgaggcagcactcagctaagcagggttgcctattagtaaggcaatcgttcttccacaataatccttccaattttgttgacctgggtggtggtgtagtgggatgtagagggttccattctagttttcgtgcaacccagagtggactttcactcaatatcgatgtgtccaccacaatgatagtgaaacctggtcctgtcattgactttctgattgccaatcagaaagttaatgatccaagcatgattgattgggcaaaggccaagcgctcactgaagaacttaaggataaaaacaagtccggcgaaccaagaacagaagattgttggtctcagcgacaggccttgccgtgagcaattattcacactgaaacataaaaatggtgaatctgaagagatcactgtttttgattactttgtaaagaaccgtggcataaagctggaatattctggtgatcttccttgtatcaatgtgggaaaaccaaagcgtccaacttattttccagttgagttatgcagtcttcttcctttgcaacggtacactaaagcattgagcacacttcaaagatcatcactcgttgagaaatctaggcagaaaccacaagaaaggatgtctgttttgtctgatgtgctgcaaagaagcaactatgatgcagaacccatgctgaaggcttgtgggattacaattgctagaaatttcatagaagttgatggtagggtactgcagccccctaagcttaaagctgggaacggagaagacatttttacgcgcaatggcagatggaatttcaataataagaagctcattagagctagcagtgtcgagaaatgggcagtagtaaacttttctgcacgatgcaatgtccgggatcttgtccgtgatctcatcaagtgtggaggcatgaagggcattatggttgatgcaccatttgctgtatttgatgagaatccttcaatgagacggtcacctgctgtaagaagggttgaagacatgtttgaacaagtgaaaactaagcttcctggagcacccaagtttcttttgtgtgttctagcggaaagaaagaattccgatatttatgggccttggaagaagaaatgccttgctgaatttgggatcgttacacagtgtgtggcaccaactagagtcaatgatcagtatcttacaaatgtcttgttaaagattaacgcaaagttgggtggcttgaattcgttgctccaaattgaaacatccccagcaattcctctcgtatccaaggtcccaactataatcttgggtatggacgtatcacacggatctcctggacattctgatataccgtctgttgctgctgttgttagttctcgtgaatggcctcttatctcaaaatacagagcatctgtccgcacccaatcaccaaaaatggaaatgattgactcgttgtttaagccacgggaaactgatgacgatggtctgattcgggagtgtctgattgacttctacaccagttcagggaagagaaagcccgaccaagtcatcatcttcagggacggtgttagtgaaagtcagtttaatcaggtgctgaacattgagttgcaacaaatcattgaggcttgcaaatttcttgatgagaaatggaatcccaagttcacattgatcattgcccagaagaatcaccacactaaatttttcattcctggaaagccagataatgttccagctggcactgttgttgacaacaaagtctgtcatccaaggaacttcgatttctacatgtgttcacatgctggaatgattggaactaccaggccaactcactatcacatcctgcatgacgagataggcttcaatcctgatgacctgcaggagctggtgcactcgctctcttatgtgtaccaaaggagcacaacagccatatcagttgttgctcccatctgctacgcccaccttgcagccgcccaggttgggcagttcataaagttcgacgagatgtcggagacttcatctagccatggggggcatacctcggcgggcagcgtccctgtacaggagctgccccgtctgcatgagaaagtgaggagctccatgttcttctgctgagcagcagggaatgtgtcccttggttttacctttttgggtgtatggtcgggggttctgaacccatgaacttgttgcctcacttggttccagcctcaggaagaactttgtaggatgctgaatggtaggatttttaagcatcgttgcagttgtgctgggtggcacgctgcaaccattttggctagcttgttgcagcacttggtgccttcctgagaggaagtagacttggaacctggtagcacgtccttaaaccatccttttaagcgttgctggttcggcctctgagctgtgtttgtcgtgctttgttggctgtgcttgtgggtgatttttgttttattgcaagggtagcgtgcaatgccttttccgttagactacttgcgctctggttgtgcgtgcaaggatggagagc

SEQ ID NO: 219088 - DNA, 3195 bp, Zea Mays
agtcctgctgcgccctcgtgtggtctgttctacggttgggcagaggctttgcagcttttgggtcagacgcagtgttctccaaggctcactaaatggagtctcacaatggcgaggctgatgatttgcctccaccaccccctttggctgctggtgttgaaccacttaaagccgatgaaacaaagatgccattgaaacctaggagtctggtccagaggaatggctttggcagaaaggggcagcagataaagctgataacaaaccacttcaaagtttctctcatgaaggctgaagattttttctatcattactatgtcaatttgaagtatgaagatgatacaccggttgatcggaaagggtcgggaagaaaagtgatcgaaaaactgcagcaaacttatgctgctgaacttgcaaataaagattttgcatatgatggtgagaagagcctgtttacaattggtgcccttcctcaagttaaaatggaattcactgttgtggatgaagacgtttcaactggaaagactcctgcaaatggcagtccaggcaatgatagtcctcctggaagtgacaggaaaagggtccgaaggccttacaatacaaagacatataaggttgaactatcttttgcggcaaaaatccctatgagtgcaatctcacaggctttgaggggtcaggagtcagagcacactcaggaagcaattcgagtgattgacattattctgaggcagcactcagctaagcagggttgcctattagtaaggcaatcgttcttccacaataatccttccaattttgttgacctgggtggtggtgtagtgggatgtagagggttccattctagttttcgtgcaacccagagtggactttcactcaatatcgatgtgtccaccacaatgatagtgaaacctggtcctgtcattgactttctgattgccaatcagaaagttaatgatccaagcatgattgattgggcaaaggccaagcgctcactgaagaacttaaggataaaaacaagtccggcgaaccaagaacagaagattgttggtctcagcgacaggccttgccgtgagcaattattcacactgaaacataaaaatggtgaatctgaagagatcactgtttttgattactttgtaaagaaccgtggcataaagctggaatattctggtgatcttccttgtatcaatgtgggaaaaccaaagcgtccaacttattttccagttgagttatgcagtcttcttcctttgcaacggtacactaaagcattgagcacacttcaaagatcatcactcgttgagaaatctaggcagaaaccacaagaaaggatgtctgttttgtctgatgtgctgcaaagaagcaactatgatgcagaacccatgctgaaggcttgtgggattacaattgctagaaatttcatagaagttgatggtagggtactgcagccccctaagcttaaagctgggaacggagaagacatttttacgcgcaatggcagatggaatttcaataataagaagctcattagagctagcagtgtcgagaaatgggcagtagtaaacttttctgcacgatgcaatgtccgggatcttgtccgtgatctcatcaagtgtggaggcatgaagggcattatggttgatgcaccatttgctgtatttgatgagaatccttcaatgagacggtcacctgctgtaagaagggttgaagacatgtttgaacaagtgaaaactaagcttcctggagcacccaagtttcttttgtgtgttctagcggaaagaaagaattccgatatttatgggccttggaagaagaaatgccttgctgaatttgggatcgttacacagtgtgtggcaccaactagagtcaatgatcagtatcttacaaatgtcttgttaaagattaacgcaaagttgggtggcttgaattcgttgctccaaattgaaacatccccagcaattcctctcgtatccaaggtcccaactataatcttgggtatggacgtatcacacggatctcctggacattctgatataccgtctgttgctgctgttgttagttctcgtgaatggcctcttatctcaaaatacagagcatctgtccgcacccaatcaccaaaaatggaaatgattgactcgttgtttaagccacgggaaactgatgacgatggtctgattcgggagtgtctgattgacttctacaccagttcagggaagagaaagcccgaccaagtcatcatcttcagggacggtgttagtgaaagtcagtttaatcaggtgctgaacattgagttgcaacaaatcattgaggcttgcaaatttcttgatgagaaatggaatcccaagttcacattgatcattgcccagaagaatcaccacactaaatttttcattcctggaaagccagataatgttccagctggcactgttgttgacaacaaagtctgtcatccaaggaacttcgatttctacatgtgttcacatgctggaatgattggaactaccaggccaactcactatcacatcctgcatgacgagataggcttcaatcctgatgacctgcaggagctggtgcactcgctctcttatgtgtaccaaaggagcacaacagccatatcagttgttgctcccatctgctacgcccaccttgcagccgcccaggttgggcagttcataaagttcgacgagatgtcggagacttcatctagccatggggggcatacctcggcgggcagcgtccctgtacaggagctgccccgtctgcatgagaaagtgaggagctccatgttcttctgctgagcagcagggaatgtgtcccttggttttacctttttgggtgtatggtcgggggttctgaacccatgaacttgttgcctcacttggttccagcctcaggaagaactttgtaggatgctgaatggtaggatttttaagcatcgttgcagttgtgctgggtggcacgctgcaaccattttggctagcttgttgcagcacttggtgccttcctgagaggaagtagacttggaacctggtagcacgtccttaaaccatccttttaagcgttgctggttcggcctctgagctgtgtttgtcgtgctttgttggctgtgcttgtgggtgatttttgttttattgcaagggtagcgtgcaatgccttttccgttagactacttgcgctctggttgtgcgtgcaaggatggagagc

SEQ ID NO: 219089 - DNA, 3218 bp, Zea Mays
ctggaatctggaaggttcgtccaataaggatttcagtgcggcgttgttaatttgggggttgggcagaggctttgcagcttttgggtcagacgcagtgttctccaaggctcactaaatggagtctcacaatggcgaggctgatgatttgcctccaccaccccctttggctgctggtgttgaaccacttaaagccgatgaaacaaagatgccattgaaacctaggagtctggtccagaggaatggctttggcagaaaggggcagcagataaagctgataacaaaccacttcaaagtttctctcatgaaggctgaagattttttctatcattactatgtcaatttgaagtatgaagatgatacaccggttgatcggaaagggtcgggaagaaaagtgatcgaaaaactgcagcaaacttatgctgctgaacttgcaaataaagattttgcatatgatggtgagaagagcctgtttacaattggtgcccttcctcaagttaaaatggaattcactgttgtggatgaagacgtttcaactggaaagactcctgcaaatggcagtccaggcaatgatagtcctcctggaagtgacaggaaaagggtccgaaggccttacaatacaaagacatataaggttgaactatcttttgcggcaaaaatccctatgagtgcaatctcacaggctttgaggggtcaggagtcagagcacactcaggaagcaattcgagtgattgacattattctgaggcagcactcagctaagcagggttgcctattagtaaggcaatcgttcttccacaataatccttccaattttgttgacctgggtggtggtgtagtgggatgtagagggttccattctagttttcgtgcaacccagagtggactttcactcaatatcgatgtgtccaccacaatgatagtgaaacctggtcctgtcattgactttctgattgccaatcagaaagttaatgatccaagcatgattgattgggcaaaggccaagcgctcactgaagaacttaaggataaaaacaagtccggcgaaccaagaacagaagattgttggtctcagcgacaggccttgccgtgagcaattattcacactgaaacataaaaatggtgaatctgaagagatcactgtttttgattactttgtaaagaaccgtggcataaagctggaatattctggtgatcttccttgtatcaatgtgggaaaaccaaagcgtccaacttattttccagttgagttatgcagtcttcttcctttgcaacggtacactaaagcattgagcacacttcaaagatcatcactcgttgagaaatctaggcagaaaccacaagaaaggatgtctgttttgtctgatgtgctgcaaagaagcaactatgatgcagaacccatgctgaaggcttgtgggattacaattgctagaaatttcatagaagttgatggtagggtactgcagccccctaagcttaaagctgggaacggagaagacatttttacgcgcaatggcagatggaatttcaataataagaagctcattagagctagcagtgtcgagaaatgggcagtagtaaacttttctgcacgatgcaatgtccgggatcttgtccgtgatctcatcaagtgtggaggcatgaagggcattatggttgatgcaccatttgctgtatttgatgagaatccttcaatgagacggtcacctgctgtaagaagggttgaagacatgtttgaacaagtgaaaactaagcttcctggagcacccaagtttcttttgtgtgttctagcggaaagaaagaattccgatatttatgggccttggaagaagaaatgccttgctgaatttgggatcgttacacagtgtgtggcaccaactagagtcaatgatcagtatcttacaaatgtcttgttaaagattaacgcaaagttgggtggcttgaattcgttgctccaaattgaaacatccccagcaattcctctcgtatccaaggtcccaactataatcttgggtatggacgtatcacacggatctcctggacattctgatataccgtctgttgctgctgttgttagttctcgtgaatggcctcttatctcaaaatacagagcatctgtccgcacccaatcaccaaaaatggaaatgattgactcgttgtttaagccacgggaaactgatgacgatggtctgattcgggagtgtctgattgacttctacaccagttcagggaagagaaagcccgaccaagtcatcatcttcagggacggtgttagtgaaagtcagtttaatcaggtgctgaacattgagttgcaacaaatcattgaggcttgcaaatttcttgatgagaaatggaatcccaagttcacattgatcattgcccagaagaatcaccacactaaatttttcattcctggaaagccagataatgttccagctggcactgttgttgacaacaaagtctgtcatccaaggaacttcgatttctacatgtgttcacatgctggaatgattggaactaccaggccaactcactatcacatcctgcatgacgagataggcttcaatcctgatgacctgcaggagctggtgcactcgctctcttatgtgtaccaaaggagcacaacagccatatcagttgttgctcccatctgctacgcccaccttgcagccgcccaggttgggcagttcataaagttcgacgagatgtcggagacttcatctagccatggggggcatacctcggcgggcagcgtccctgtacaggagctgccccgtctgcatgagaaagtgaggagctccatgttcttctgctgagcagcagggaatgtgtcccttggttttacctttttgggtgtatggtcgggggttctgaacccatgaacttgttgcctcacttggttccagcctcaggaagaactttgtaggatgctgaatggtaggatttttaagcatcgttgcagttgtgctgggtggcacgctgcaaccattttggctagcttgttgcagcacttggtgccttcctgagaggaagtagacttggaacctggtagcacgtccttaaaccatccttttaagcgttgctggttcggcctctgagctgtgtttgtcgtgctttgttggctgtgcttgtgggtgatttttgttttattgcaagggtagcgtgcaatgccttttccgttagactacttgcgctctggttgtgcgtgcaaggatggagagc

SEQ ID NO: 219090 - DNA, 553 bp, Zea Mays
cgcgagttacttcctctcccgagtcccgacctctcgtatctctcgctcgcctccctcgtccgcggtccgccgccgctccagatccagccgtgggagcggggacggggcagggcttgagcacgctctctgcagcttcaggctctgctcgtcggggtggaaggagaactcgagtgctcccaggctctcaacctccacgctctgaaccgctggtacccgagatgacatgtccttgggcttgggcttgagctgggcgcagaacgagcccgtcgtcggaagggacgatgtggacaacctcgtccctggctccatgttgaggccatagagcttgaaccccgaggcggagcccttctgccagagcgcggccccgcggttgaactgctcgacgaatgcgccgaattgctccctcccggaattggagcggacgacggagtgagagaacttcttgttcctgttgtatggtttatgatgtgcgtgagtgataaaatctatgtatttgattcttctgagtgtctctgtgttaataacaagttgtcttgttcctgttaaaaaaata

SEQ ID NO: 219091 - DNA, 528 bp, Zea Mays
ttagcagtattgcaatagccaactgtcttcttccacgggagcgcaaaaagcaagagtaccaggatgctttgaaggagcggtacaagcatctcccagaagtcaagcggattgtaaggcatagacatctaccgaagccaatctacaaggcagccaacctacggcgtacgatgatcgaagctgaaagccgtaaagaggaaaggaggcgaaagcacagtgctcccgggagcatgcctgtgcagcccttcaggaagcggagaatcatcagagaagttgagtagacatgcggtttgcattgcatggtcgtggtacacgtttgtgtttctgaggcgatggagttgagagaatacatgatgtttcctttgggagttgagctccagttttgcctttcgtactacatatatgtgctccatcaatcagtttgtttgactagttattattgtgtatttgaaataccacacaaaatattcatatcgtgccattgcattgcaagaccgtgagcaatccgaattgaaggtaggacgttttctc

SEQ ID NO: 219092 - DNA, 547 bp, Zea Mays
cagctttgcctcacatgtcactactaattgcacaatattgctacttgcaaaaggatcgtgtcccaccttcagtgaacagaacagttgggagttaccacgaaatcagaagtttcttaaaagtgacaagggagcaaaagcagagtcttgtggaccttgacaggcttgattctgccaggaagaggctccaggagaattaccaagaagcacaaaatgccaaaaagcagaggacaatccaagtgatggacatcaatgacataccaaagccgaagagcagaaacgctttcatccgcaagagcggcagcggtgggctcccggcgaggcaccgatagcctaacctccttcgtcggctggatatctgcgacacttgcgaagttgtgccctagaaccgcaacgggaaagaaaaagaagcaaacggtttcttgttctttttttccctgtaccttgactgcctaggtttacctccagtgtaatattgtcaggtacataagggtgaaatgatatgatgtttctcgaggaaaaagaaagaaattagtcactgtttttgcta

SEQ ID NO: 219093 - DNA, 658 bp, Zea Mays
agattgtgcagtgtcagtagctattatatatggtttcggggtttcagtattctccaagcccacagaggtttaatggttcaacttcagagatggctaacaatgggtttgagtcaacaatggatgcgaagcgtagggccagccctgtaccagcacatcataactccaggcagatgaacaacaatcatcattctactactattaccaccagcacgtcatctgctccagctaaagtgacaagggagcaaaagcagagtcttgtggaccttgacaggcttgattctgccaggaagaggctccaggagaattaccaagaagcacaaaatgccaaaaagcagaggacaatccaagtgatggacatcaatgacataccaaagccgaagagcagaaacgctttcatccgcaagagcggcagcggtgggctcccggcgaggcaccgatagcctaacctccttcgtcggctggatatctgcgacacttgcgaagttgtgccctagaaccgcaacgggaaagaaaaagaagcaaacggtttcttgttctttttttccctgtaccttgactgcctaggtttacctccagtgtaatattgtcaggtacataagggtgaaatgatatgatgtttctcgaggaaaaagaaagaaattagtcactgtttttgcta

SEQ ID NO: 219094 - DNA, 704 bp, Zea Mays
ctcatgctgggtaaactaagcagtaacataaaacagattgtgcagtgtcagtagctattatatatggtttcggggtttcagtattctccaagcccacagaggtttaatggttcaacttcagagatggctaacaatgggtttgagtcaacaatggatgcgaagcgtagggccagccctgtaccagcacatcataactccaggcagatgaacaacaatcatcattctactactattaccaccagcacgtcatctgctccagctttctcggtgcagaaagtgacaagggagcaaaagcagagtcttgtggaccttgacaggcttgattctgccaggaagaggctccaggagaattaccaagaagcacaaaatgccaaaaagcagaggacaatccaagtgatggacatcaatgacataccaaagccgaagagcagaaacgctttcatccgcaagagcggcagcggtgggctcccggcgaggcaccgatagcctaacctccttcgtcggctggatatctgcgacacttgcgaagttgtgccctagaaccgcaacgggaaagaaaaagaagcaaacggtttcttgttctttttttccctgtaccttgactgcctaggtttacctccagtgtaatattgtcaggtacataagggtgaaatgatatgatgtttctcgaggaaaaagaaagaaattagtcactgtttttgcta

SEQ ID NO: 219095 - DNA, 680 bp, Zea Mays
ccctcctatgttattcccctgttagtttgccaaccaatcacagctcttaaaggggtttcggggtttcagtattctccaagcccacagaggtttaatggttcaacttcagagatggctaacaatgggtttgagtcaacaatggatgcgaagcgtagggccagccctgtaccagcacatcataactccaggcagatgaacaacaatcatcattctactactattaccaccagcacgtcatctgctccagctaaagtgacaagggagcaaaagcagagtcttgtggaccttgacaggcttgattctgccaggaagaggctccaggagaattaccaagaagcacaaaatgccaaaaagcagaggacaatccaagtgatggacatcaatgacataccaaagccgaagagcagaaacgctttcatccgcaagagcggcagcggtgggctcccggcgaggcaccgatagcctaacctccttcgtcggctggatatctgcgacacttgcgaagttgtgccctagaaccgcaacgggaaagaaaaagaagcaaacggtttcttgttctttttttccctgtaccttgactgcctaggtttacctccagtgtaatattgtcaggtacataagggtgaaatgatatgatgtttctcgaggaaaaagaaagaaattagtcactgtttttgcta

SEQ ID NO: 219096 - DNA, 1593 bp, Zea Mays
cgaagctgattgacgctgagcgcagccaaatccagccagcgataggaatatcgccaagaattctaccgtctgcgtctgcccgtcttcctctctctctctctctcctctccctcattctggatccaccgccgcagccttagctgggtccgtcgctgtcgctccgcctcccgctcgcttgccgggcccgacacgcccgccaccgcctccgctttgtctctccggcgatccgacgccccacccggcgtctgtgcagagcagtcgtgaggagttctctgttgtgggctgcccggcgatggaccggggcgagcgtctcggccgcgcgctggacgccttcgggggcaacctgtgggcgctggttgacgcagcgctggacgcggccgctcgcgaccgccccgacgagcttcgcgcgcgccgcgatagcatcgtcgagcgcctctacgctgccgccgcgggctgtagcaactgcgccgggcgtccgccgtctgttgccgctttagcggccgcggggctggaggaagaggacggcgaggaggcggctccggcttctccgtgggcggaggctgacgcgcaagccggtggcgcggaggcacagaccgaggtgctcggcgccggcgagcctgatctcgagagcaagatcgtggccatcagggacttcttggaggaccctaatcagcccgagaacgagctggtgagcttgctgcagaacctggcagacatggatgttacctacaacgcactccaggagactgacatcgggcggcaggttaatggtctgcgcaagcatccttcggccgaggtcaggcggctggtgaagcagctcatcaggaagtggaaggagatagtggacgactgggtgcgcctggacaattccggcggtgacggcagtgcctctgttatgacagctgatggtgactccccacataaaatccaaggcagaagccaccaaagccctcgggtttcggggtttcagtattctccaagcccacagaggtttaatggttcaacttcagagatggctaacaatgggtttgagtcaacaatggatgcgaagcgtagggccagccctgtaccagcacatcataactccaggcagatgaacaacaatcatcattctactactattaccaccagcacgtcatctgctccagctttctcggtgcagaaagtgacaagggagcaaaagcagagtcttgtggaccttgacaggcttgattctgccaggaagaggctccaggagaattaccaagaagcacaaaatgccaaaaagcagaggacaatccaagtgatggacatcaatgacataccaaagccgaagagcagaaacgctttcatccgcaagagcggcagcggtgggctcccggcgaggcaccgatagcctaacctccttcgtcggctggatatctgcgacacttgcgaagttgtgccctagaaccgcaacgggaaagaaaaagaagcaaacggtttcttgttctttttttccctgtaccttgactgcctaggtttacctccagtgtaatattgtcaggtacataagggtgaaatgatatgatgtttctcgaggaaaaagaaagaaattagtcactgtttttgcta

SEQ ID NO: 219097 - DNA, 1600 bp, Zea Mays
caacaccacccgaagctgattgacgctgagcgcagccaaatccagccagcgataggaatatcgccaagaattctaccgtctgcgtctgcccgtcttcctctctctctctctctcctctccctcattctggatccaccgccgcagccttagctgggtccgtcgctgtcgctccgcctcccgctcgcttgccgggcccgacacgcccgccaccgcctccgctttgtctctccggcgatccgacgccccacccggcgtctgtgcagagcagtcgtgaggagttctctgttgtgggctgcccggcgatggaccggggcgagcgtctcggccgcgcgctggacgccttcgggggcaacctgtgggcgctggttgacgcagcgctggacgcggccgctcgcgaccgccccgacgagcttcgcgcgcgccgcgatagcatcgtcgagcgcctctacgctgccgccgcgggctgtagcaactgcgccgggcgtccgccgtctgttgccgctttagcggccgcggggctggaggaagaggacggcgaggaggcggctccggcttctccgtgggcggaggctgacgcgcaagccggtggcgcggaggcacagaccgaggtgctcggcgccggcgagcctgatctcgagagcaagatcgtggccatcagggacttcttggaggaccctaatcagcccgagaacgagctggtgagcttgctgcagaacctggcagacatggatgttacctacaacgcactccaggagactgacatcgggcggcaggttaatggtctgcgcaagcatccttcggccgaggtcaggcggctggtgaagcagctcatcaggaagtggaaggagatagtggacgactgggtgcgcctggacaattccggcggtgacggcagtgcctctgttatgactgatggtgactccccacataaaatccaaggcagaagccaccaaagccctcgggtttcggggtttcagtattctccaagcccacagaggtttaatggttcaacttcagagatggctaacaatgggtttgagtcaacaatggatgcgaagcgtagggccagccctgtaccagcacatcataactccaggcagatgaacaacaatcatcattctactactattaccaccagcacgtcatctgctccagctttctcggtgcagaaagtgacaagggagcaaaagcagagtcttgtggaccttgacaggcttgattctgccaggaagaggctccaggagaattaccaagaagcacaaaatgccaaaaagcagaggacaatccaagtgatggacatcaatgacataccaaagccgaagagcagaaacgctttcatccgcaagagcggcagcggtgggctcccggcgaggcaccgatagcctaacctccttcgtcggctggatatctgcgacacttgcgaagttgtgccctagaaccgcaacgggaaagaaaaagaagcaaacggtttcttgttctttttttccctgtaccttgactgcctaggtttacctccagtgtaatattgtcaggtacataagggtgaaatgatatgatgtttctcgaggaaaaagaaagaaattagtcactgtttttgcta

SEQ ID NO: 219098 - DNA, 1586 bp, Zea Mays
caacaccacccgaagctgattgacgctgagcgcagccaaatccagccagcgataggaatatcgccaagaattctaccgtctgcgtctgcccgtcttcctctctctctctctctcctctccctcattctggatccaccgccgcagccttagctgggtccgtcgctgtcgctccgcctcccgctcgcttgccgggcccgacacgcccgccaccgcctccgctttgtctctccggcgatccgacgccccacccggcgtctgtgcagagcagtcgtgaggagttctctgttgtgggctgcccggcgatggaccggggcgagcgtctcggccgcgcgctggacgccttcgggggcaacctgtgggcgctggttgacgcagcgctggacgcggccgctcgcgaccgccccgacgagcttcgcgcgcgccgcgatagcatcgtcgagcgcctctacgctgccgccgcgggctgtagcaactgcgccgggcgtccgccgtctgttgccgctttagcggccgcggggctggaggaagaggacggcgaggaggcggctccggcttctccgtgggcggaggctgacgcgcaagccggtggcgcggaggcacagaccgaggtgctcggcgccggcgagcctgatctcgagagcaagatcgtggccatcagggacttcttggaggaccctaatcagcccgagaacgagctggtgagcttgctgcagaacctggcagacatggatgttacctacaacgcactccaggagactgacatcgggcggcaggttaatggtctgcgcaagcatccttcggccgaggtcaggcggctggtgaagcagctcatcaggaagtggaaggagatagtggacgactgggtgcgcctggacaattccggcggtgacggcagtgcctctgttatgacagctgatggtgactccccacataaaatccaaggcagaagccaccaaagccctcgggtttcggggtttcagtattctccaagcccacagagatggttcaacttcagagatggctaacaatgggtttgagtcaacaatggatgcgaagcgtagggccagccctgtaccagcacatcataactccaggcagatgaacaacaatcatcattctactactattaccaccagcacgtcatctgctccagctaaagtgacaagggagcaaaagcagagtcttgtggaccttgacaggcttgattctgccaggaagaggctccaggagaattaccaagaagcacaaaatgccaaaaagcagaggacaatccaagtgatggacatcaatgacataccaaagccgaagagcagaaacgctttcatccgcaagagcggcagcggtgggctcccggcgaggcaccgatagcctaacctccttcgtcggctggatatctgcgacacttgcgaagttgtgccctagaaccgcaacgggaaagaaaaagaagcaaacggtttcttgttctttttttccctgtaccttgactgcctaggtttacctccagtgtaatattgtcaggtacataagggtgaaatgatatgatgtttctcgaggaaaaagaaagaaattagtcactgtttttgcta

SEQ ID NO: 219099 - DNA, 675 bp, Zea Mays
attaacatgatctttggtttagtaaacttaaatcattaaatggatgcaggcaatggaaattgatcctgataattcaaccttgtatgcaaagaggagcctttgctttctgtacacaggctatgaaggaaaggctttggaggatgctactacctacagagatatgcaaccagctcttgctctggtcaaggagtattgcatgacatgcgaagcactcttgcctggcttgaactcggatttttaagcaaaccaactgacgaagcgttcggggaaggacaatccgtgaagaaaggttattagtgtacagggaagaaagaaggttgttactgcacaggaaaaacagaggttcctagctgttactgacaggcaagaacggagattctagttcttagttgttgattcgattagatgccacagtggcacgggcaagataatgatgcatgagcatccgttcaaaaacctagagtgctgtgttttgcttttttctaaactgtggaacttgttcatgttttgaacggcagttgtgtgttagtacaaatgtacgcgtcatgagctataaatgcggtccaatgctgggcccaacatttagacttgatcaaacagttctggaataaaccagatggtaataatggtaacactgagggggtgtttgggagtgaagttttttcacagttttgg

SEQ ID NO: 219100 - DNA, 2820 bp, Zea Mays
ggtttatcccttctccagaacccactcatgtggtcaaaactcatattgggacgatgacacacatagcatgcagctctcatttggagttgatgagtttttgataattgctccgctgagtgccagtggtgtgatcctcgatgatccagaatcaactaagcttttgagttctgtagcaattgctctttctaattgtggcagcaattggccagcgtttgtaccagttcacgacccttcacggaaagcctatatagggattcaaaatctgggaactgtatttactcgaagatttgaagctgaccgaattggtagtcaagtgccaataagactcatgcatctggaggggttacatgagctatttctgtcaaaatttgtcctatcctcgtcagattttccagctagggtaaaggttcacttctcaatgaagcttagctacaagaccccagaatatgatcatgataatgaaactttagattctgaagctactgagccattgactgaaaatgaagttgtgaaccaccctagaaaactatgggacgatgattgcccttgggcagagtggtactctgctgaggatcctgttaaaggttttgagttgactgccatctggggagagaggacatttgaagagacccttgagatggctgaagtggaaaatgcctcgtcctttgatgctgatagctggttccttcacccagttgtatctcgatacatggtagatgattctattggaaaatttgttgggtttgcatcccagctacatcttctagtaaatgcatatgaatcatcagtggaggcacaatttctagaagactttgttgcaggtagcagatacttcaggccaggataatgcaaaatctactgctactgtgcctccaccatcagttattgatcgtgttatgaaagatcttttcagtgatgagactggcaactatatggaagcagaaaacaagtatagtcgtgctatgcgaggtgcacctgcagattcactttttggccagttctgtttgcatgcactgtggtttggcaactgcaatatatgcgcaattgctacactatggattgattttgtgcgggaaattcgttggtgctgggaggaatcagaaagattgcctaggatgaaaagcacttcaagcattgatctctcttcttgtcttatccaccaaaagttacaaatgctcacgatatgcattgagaggaagagatcactgaaccgtgagaaaggtactggctacaaagatgagacttcaaatagtacggcagtgaacaagtctaggaaaggatcagctggtgttgtgcctaaaatgatgctcctgaatacgtttcaggaaatgcatgctccatatactcagttccttaggatgcacctttgatgaccgaagatatgcatgaagaaaggctccatgcagctgaagcttttggcaatgccattggtctatctggacagctggaaagggatatattatgttccgatatgtctgcttttaaagctgcaaacccagatgctgtctttgaagattttattcggtggcattcacctggtgaatggttgagcgaggacaaaacagatggtaatgcaggctggcctcccaaaggaaagctttctcaccgtatgtcccaacatgggaatgtgtggcgcaaaatctggaatgatgctctgccattgcctgtttctgaacagaagtctttgcttgaccctgttcgggaaggagaaaaggtgcttcattaccttgaaactttaaggccacagcagctccttgaacaaatggtgtgtacagctttcaaatcatcagctgatatcctgaataagaccatgtatggtggcttcaaggaaatgaagacaaaaatggatcgactatatgtcaccatggcgtcaacactgaaatcttttctagggaattctgatgtcaatgatttggttggaggcctgaaacggctttgtcaagtttttgagcacatcgagaagttactgattcttgctgcttccatcaatcggaagcttattgatgctccacgactagctcaagcaatattttacgactactacaacttctaccttccaaaaatgggaactagcctggaaagcatttgctatgagaaggagttcacaactaaggaaaaggtcgggatgtatgagagagatgctgtgtcgaacctgtttcctccccctactgctaatcagtcttggaggaaagttttgagcatgggaaatcttctgaacggccatgaaccgatgcaaagggaaatcatattctcagtccaggagagaataagcaacggtcattattcgagcccaaccccattatgtaccaacaatgagaagatccagacacataggatgtatatatctgggacatctaatgacctttgggttgcattgtctgtaacgtcctgggattgagctgcacgatgtatgagaggagcaattggtgttttaattagcttagaatcccgttggtgcagataaactatcattgtattttttttttgttggatgtaccagaagtccagaaggggccaccaggacatggctagtgacgcactgaggacaagcatccatttttgacatcagatcaaagtattgattatttacgtcttgtagcagtcagaactcagaaatgctaatatattcttggcttcctctagagaaatggttgtagacaagctctatttggctgacgtttttggtctgttaggtggtgggctggtgagttgcaacacacacactggggttgatgtacgtaaacatcttgtatgacttttgcaatgagctaggctttgttcaatactcgagtccatgaaattttcaatatttgatatctg

SEQ ID NO: 219101 - DNA, 2802 bp, Zea Mays
tggtttatcccttctccagaacccactcatgtggtcaaaactcatattgggacgatgacacacatagcatgcagctctcatttggagttgatgagtttttgataattgctccgctgagtgccagtggtgtgatcctcgatgatccagaatcaactaagcttttgagttctgtagcaattgctctttctaattgtggcagcgtttgtaccagttcacgacccttcacggaaagcctatatagggattcaaaatctgggaactgtatttactcgaagatttgaagctgaccgaattggtagtcaagtgccaataagactcatgcatctggaggggttacatgagctatttctgtcaaaatttgtcctatcctcgtcagattttccagctagggtaaaggttcacttctcaatgaagcttagctacaagaccccagaatatgatcatgataatgaaactttagattctgaagctactgagccattgactgaaaatgaagttgtgaaccaccctagaaaactatgggacgatgattgcccttgggcagagtggtactctgctgaggatcctgttaaaggttttgagttgactgccatctggggagagaggacatttgaagagacccttgagatggctgaagtggaaaatgcctcgtcctttgatgctgatagctggttccttcacccagttgtatctcgatacatggtagatgattctattggaaaatttgttgggtttgcatcccagctacatcttctagtaaatgcatatgaatcatcagtggaggcacaatttctagaagactttgttgcaggtagcagatacttcaggccaggataatgcaaaatctactgctactgtgcctccaccatcagttattgatcgtgttatgaaagatcttttcagtgatgagactggcaactatatggaagcagaaaacaagtatagtcgtgctatgcgaggtgcacctgcagattcactttttggccagttctgtttgcatgcactgtggtttggcaactgcaatatatgcgcaattgctacactatggattgattttgtgcgggaaattcgttggtgctgggaggaatcagaaagattgcctaggatgaaaagcacttcaagcattgatctctcttcttgtcttatccaccaaaagttacaaatgctcacgatatgcattgagaggaagagatcactgaaccgtgagaaaggtactggctacaaagatgagacttcaaatagtacggcagtgaacaagtctaggaaaggatcagctggtgttgtgcctaaaatgatgctcctgaatacgtttcaggaaatgcatgctccatatactcaggatgcacctttgatgaccgaagatatgcatgaagaaaggctccatgcagctgaagcttttggcaatgccattggtctatctggacagctggaaagggatatattatgttccgatatgtctgcttttaaagctgcaaacccagatgctgtctttgaagattttattcggtggcattcacctggtgaatggttgagcgaggacaaaacagatggtaatgcaggctggcctcccaaaggaaagctttctcaccgtatgtcccaacatgggaatgtgtggcgcaaaatctggaatgatgctctgccattgcctgtttctgaacagaagtctttgcttgaccctgttcgggaaggagaaaaggtgcttcattaccttgaaactttaaggccacagcagctccttgaacaaatggtgtgtacagctttcaaatcatcagctgatatcctgaataagaccatgtatggtggcttcaaggaaatgaagacaaaaatggatcgactatatgtcaccatggcgtcaacactgaaatcttttctagggaattctgatgtcaatgatttggttggaggcctgaaacggctttgtcaagtttttgagcacatcgagaagttactgattcttgctgcttccatcaatcggaagcttattgatgctccacgactagctcaagcaatattttacgactactacaacttctaccttccaaaaatgggaactagcctggaaagcatttgctatgagaaggagttcacaactaaggaaaaggtcgggatgtatgagagagatgctgtgtcgaacctgtttcctccccctactgctaatcagtcttggaggaaagttttgagcatgggaaatcttctgaacggccatgaaccgatgcaaagggaaatcatattctcagtccaggagagaataagcaacggtcattattcgagcccaaccccattatgtaccaacaatgagaagatccagacacataggatgtatatatctgggacatctaatgacctttgggttgcattgtctgtaacgtcctgggattgagctgcacgatgtatgagaggagcaattggtgttttaattagcttagaatcccgttggtgcagataaactatcattgtattttttttttgttggatgtaccagaagtccagaaggggccaccaggacatggctagtgacgcactgaggacaagcatccatttttgacatcagatcaaagtattgattatttacgtcttgtagcagtcagaactcagaaatgctaatatattcttggcttcctctagagaaatggttgtagacaagctctatttggctgacgtttttggtctgttaggtggtgggctggtgagttgcaacacacacactggggttgatgtacgtaaacatcttgtatgacttttgcaatgagctaggctttgttcaatactcgagtccatgaaattttcaatatttgatatctg

SEQ ID NO: 219102 - DNA, 2925 bp, Zea Mays
ttaaactataatactttcagcaagcttgtagaagggcagacctggtgatgtagaagggcagaccatttcatgaaatcgaagcagcctcttcacatttgcggagggaagacttgccttggtttatcccttctccagaacccactcatgtggtcaaaactcatattgggacgatgacacacatagcatgcagctctcatttggagttgatgagtttttgataattgctccgctgagtgccagtggtgtgatcctcgatgatccagaatcaactaagcttttgagttctgtagcaattgctctttctaattgtggcagcaattggccagcgtttgtaccagttcacgacccttcacggaaagcctatatagggattcaaaatctgggaactgtatttactcgaagatttgaagctgaccgaattggtagtcaagtgccaataagactcatgcatctggaggggttacatgagctatttctgtcaaaatttgtcctatcctcgtcagattttccagctagggtaaaggttcacttctcaatgaagcttagctacaagaccccagaatatgatcatgataatgaaactttagattctgaagctactgagccattgactgaaaatgaagttgtgaaccaccctagaaaactatgggacgatgattgcccttgggcagagtggtactctgctgaggatcctgttaaaggttttgagttgactgccatctggggagagaggacatttgaagagacccttgagatggctgaagtggaaaatgcctcgtcctttgatgctgatagctggttccttcacccagttgtatctcgatacatggtagatgattctattggaaaatttgttgggtttgcatcccagctacatcttctagtaaatgcatatgaatcatcagtggaggcacaatttctagaagactttgttgcagcagatacttcaggccaggataatgcaaaatctactgctactgtgcctccaccatcagttattgatcgtgttatgaaagatcttttcagtgatgagactggcaactatatggaagcagaaaacaagtatagtcgtgctatgcgaggtgcacctgcagattcactttttggccagttctgtttgcatgcactgtggtttggcaactgcaatatatgcgcaattgctacactatggattgattttgtgcgggaaattcgttggtgctgggaggaatcagaaagattgcctaggatgaaaagcacttcaagcattgatctctcttcttgtcttatccaccaaaagttacaaatgctcacgatatgcattgagaggaagagatcactgaaccgtgagaaaggtactggctacaaagatgagacttcaaatagtacggcagtgaacaagtctaggaaaggatcagctggtgttgtgcctaaaatgatgctcctgaatacgtttcaggaaatgcatgctccatatactcaggatgcacctttgatgaccgaagatatgcatgaagaaaggctccatgcagctgaagcttttggcaatgccattggtctatctggacagctggaaagggatatattatgttccgatatgtctgcttttaaagctgcaaacccagatgctgtctttgaagattttattcggtggcattcacctggtgaatggttgagcgaggacaaaacagatggtaatgcaggctggcctcccaaaggaaagctttctcaccgtatgtcccaacatgggaatgtgtggcgcaaaatctggaatgatgctctgccattgcctgtttctgaacagaagtctttgcttgaccctgttcgggaaggagaaaaggtgcttcattaccttgaaactttaaggccacagcagctccttgaacaaatggtgtgtacagctttcaaatcatcagctgatatcctgaataagaccatgtatggtggcttcaaggaaatgaagacaaaaatggatcgactatatgtcaccatggcgtcaacactgaaatcttttctagggaattctgatgtcaatgatttggttggaggcctgaaacggctttgtcaagtttttgagcacatcgagaagttactgattcttgctgcttccatcaatcggaagcttattgatgctccacgactagctcaagcaatattttacgactactacaacttctaccttccaaaaatgggaactagcctggaaagcatttgctatgagaaggagttcacaactaaggaaaaggtcgggatgtatgagagagatgctgtgtcgaacctgtttcctccccctactgctaatcagtcttggaggaaagttttgagcatgggaaatcttctgaacggccatgaaccgatgcaaagggaaatcatattctcagtccaggagagaataagcaacggtcattattcgagcccaaccccattatgtaccaacaatgagaagatccagacacataggatgtatatatctgggacatctaatgacctttgggttgcattgtctgtaacgtcctgggattgagctgcacgatgtatgagaggagcaattggtgttttaattagcttagaatcccgttggtgcagataaactatcattgtattttttttttgttggatgtaccagaagtccagaaggggccaccaggacatggctagtgacgcactgaggacaagcatccatttttgacatcagatcaaagtattgattatttacgtcttgtagcagtcagaactcagaaatgctaatatattcttggcttcctctagagaaatggttgtagacaagctctatttggctgacgtttttggtctgttaggtggtgggctggtgagttgcaacacacacactggggttgatgtacgtaaacatcttgtatgacttttgcaatgagctaggctttgttcaatactcgagtccatgaaattttcaatatttgatatctg

SEQ ID NO: 219103 - DNA, 3292 bp, Zea Mays
tcggaccgtcggtcgacgaggcatcggccatcgacgcaacactctcctccgcttcccttctcctcagtcgcggctcaccccctcccccttgccgatctaacgggaacgcgtctcacagcttccacgcgactgcaccgtgccacccgaggctcgcccccgctgagccagcggagcgaatctccatggcctccacatcctcctccaggtacgcgaaacatcgtcggatcggagaggacgatgagttggaggaggttgaggaggaggccgaagaggagcttccatgccttgttgggtaccatttgccacactgtttcgattgggagcatcaaaaaggtgcagagggtgttcctccttttgaaaacttatatatgatcaagcgtgaattgaagcatgggaaaagagtctattctatggagtaccatttcatgaaatctgcaaaaggtcaaaactcatattgggacgatgacacacatagcatgcagctctcatttggagttgatgagtttttgataattgctccgctgagtgccagtggtgtgatcctcgatgatccagaatcaactaagcttttgagttctgtagcaattgctctttctaattgtggcagcaattggccagcgtttgtaccagttcacgacccttcacggaaagcctatatagggattcaaaatctgggaactgtatttactcgaagatttgaagctgaccgaattggtagtcaagtgccaataagactcatgcatctggaggggttacatgagctatttctgtcaaaatttgtcctatcctcgtcagattttccagctagggtaaaggttcacttctcaatgaagcttagctacaagaccccagaatatgatcatgataatgaaactttagattctgaagctactgagccattgactgaaaatgaagttgtgaaccaccctagaaaactatgggacgatgattgcccttgggcagagtggtactctgctgaggatcctgttaaaggttttgagttgactgccatctggggagagaggacatttgaagagacccttgagatggctgaagtggaaaatgcctcgtcctttgatgctgatagctggttccttcacccagttgtatctcgatacatggtagatgattctattggaaaatttgttgggtttgcatcccagctacatcttctagtaaatgcatatgaatcatcagtggaggcacaatttctagaagactttgttgcagcagatacttcaggccaggataatgcaaaatctactgctactgtgcctccaccatcagttattgatcgtgttatgaaagatcttttcagtgatgagactggcaactatatggaagcagaaaacaagtatagtcgtgctatgcgaggtgcacctgcagattcactttttggccagttctgtttgcatgcactgtggtttggcaactgcaatatatgcgcaattgctacactatggattgattttgtgcgggaaattcgttggtgctgggaggaatcagaaagattgcctaggatgaaaagcacttcaagcattgatctctcttcttgtcttatccaccaaaagttacaaatgctcacgatatgcattgagaggaagagatcactgaaccgtgagaaaggtactggctacaaagatgagacttcaaatagtacggcagtgaacaagtctaggaaaggatcagctggtgttgtgcctaaaatgatgctcctgaatacgtttcaggaaatgcatgctccatatactcaggttctgtttgcccttttcttcaggtttaatattgtgatccacatgcacccccttatgtttccattagttccttaggatgcacctttgatgaccgaagatatgcatgaagaaaggctccatgcagctgaagcttttggcaatgccattggtctatctggacagctggaaagggatatattatgttccgatatgtctgcttttaaagctgcaaacccagatgctgtctttgaagattttattcggtggcattcacctggtgaatggttgagcgaggacaaaacagatggtaatgcaggctggcctcccaaaggaaagctttctcaccgtatgtcccaacatgggaatgtgtggcgcaaaatctggaatgatgctctgccattgcctgtttctgaacagaagtctttgcttgaccctgttcgggaaggagaaaaggtgcttcattaccttgaaactttaaggccacagcagctccttgaacaaatggtgtgtacagctttcaaatcatcagctgatatcctgaataagaccatgtatggtggcttcaaggaaatgaagacaaaaatggatcgactatatgtcaccatggcgtcaacactgaaatcttttctagggaattctgatgtcaatgatttggttggaggcctgaaacggctttgtcaagtttttgagcacatcgagaagttactgattcttgctgcttccatcaatcggaagcttattgatgctccacgactagctcaagcaatattttacgactactacaacttctaccttccaaaaatgggaactagcctggaaagcatttgctatgagaaggagttcacaactaaggaaaaggtcgggatgtatgagagagatgctgtgtcgaacctgtttcctccccctactgctaatcagtcttggaggaaagttttgagcatgggaaatcttctgaacggccatgaaccgatgcaaagggaaatcatattctcagtccaggagagaataagcaacggtcattattcgagcccaaccccattatgtaccaacaatgagaagatccagacacataggatgtatatatctgggacatctaatgacctttgggttgcattgtctgtaacgtcctgggattgagctgcacgatgtatgagaggagcaattggtgttttaattagcttagaatcccgttggtgcagataaactatcattgtattttttttttgttggatgtaccagaagtccagaaggggccaccaggacatggctagtgacgcactgaggacaagcatccatttttgacatcagatcaaagtattgattatttacgtcttgtagcagtcagaactcagaaatgctaatatattcttggcttcctctagagaaatggttgtagacaagctctatttggctgacgtttttggtctgttaggtggtgggctggtgagttgcaacacacacactggggttgatgtacgtaaacatcttgtatgacttttgcaatgagctaggctttgttcaatactcgagtccatgaaattttcaatatttgatatctg

SEQ ID NO: 219104 - DNA, 3297 bp, Zea Mays
caatcaccgtcaccagaagcacgaacagagaactcggaccgtcggtcgacgaggcatcggccatcgacgcaacactctcctccgcttcccttctcctcagtcgcggctcaccccctcccccttgccgatctaacgggaacgcgtctcacagcttccacgcgactgcaccgtgccacccgaggctcgcccccgctgagccagcggagcgaatctccatggcctccacatcctcctccaggtacgcgaaacatcgtcggatcggagaggacgatgagttggaggaggttgaggaggaggccgaagaggagcttgagcggttcgatgatttcaccattgcttcgtcatgggaaaagtttatatctgagatagaggctatttgccgtcaatggcttgcagatggcgcaaagatcttaatggtgcagagggtgttcctccttttgaaaacttatatatgatcaagcgtgaattgaagcatgggaaaagagtctattctatggagtaccatttcatgaaatctgcaaaaggtcaaaactcatattgggacgatgacacacatagcatgcagctctcatttggagttgatgagtttttgataattgctccgctgagtgccagtggtgtgatcctcgatgatccagaatcaactaagcttttgagttctgtagcaattgctctttctaattgtggcagcaattggccagcgtttgtaccagttcacgacccttcacggaaagcctatatagggattcaaaatctgggaactgtatttactcgaagatttgaagctgaccgaattggtagtcaagtgccaataagactcatgcatctggaggggttacatgagctatttctgtcaaaatttgtcctatcctcgtcagattttccagctagggtaaaggttcacttctcaatgaagcttagctacaagaccccagaatatgatcatgataatgaaactttagattctgaagctactgagccattgactgaaaatgaagttgtgaaccaccctagaaaactatgggacgatgattgcccttgggcagagtggtactctgctgaggatcctgttaaaggttttgagttgactgccatctggggagagaggacatttgaagagacccttgagatggctgaagtggaaaatgcctcgtcctttgatgctgatagctggttccttcacccagttgtatctcgatacatggtagatgattctattggaaaatttgttgggtttgcatcccagctacatcttctagtaaatgcatatgaatcatcagtggaggcacaatttctagaagactttgttgcagatacttcaggccaggataatgcaaaatctactgctactgtgcctccaccatcagttattgatcgtgttatgaaagatcttttcagtgatgagactggcaactatatggaagcagaaaacaagtatagtcgtgctatgcgaggtgcacctgcagattcactttttggccagttctgtttgcatgcactgtggtttggcaactgcaatatatgcgcaattgctacactatggattgattttgtgcgggaaattcgttggtgctgggaggaatcagaaagattgcctaggatgaaaagcacttcaagcattgatctctcttcttgtcttatccaccaaaagttacaaatgctcacgatatgcattgagaggaagagatcactgaaccgtgagaaaggtactggctacaaagatgagacttcaaatagtacggcagtgaacaagtctaggaaaggatcagctggtgttgtgcctaaaatgatgctcctgaatacgtttcaggaaatgcatgctccatatactcaggatgcacctttgatgaccgaagatatgcatgaagaaaggctccatgcagctgaagcttttggcaatgccattggtctatctggacagctggaaagggatatattatgttccgatatgtctgcttttaaagctgcaaacccagatgctgtctttgaagattttattcggtggcattcacctggtgaatggttgagcgaggacaaaacagatggtaatgcaggctggcctcccaaaggaaagctttctcaccgtatgtcccaacatgggaatgtgtggcgcaaaatctggaatgatgctctgccattgcctgtttctgaacagaagtctttgcttgaccctgttcgggaaggagaaaaggtgcttcattaccttgaaactttaaggccacagcagctccttgaacaaatggtgtgtacagctttcaaatcatcagctgatatcctgaataagaccatgtatggtggcttcaaggaaatgaagacaaaaatggatcgactatatgtcaccatggcgtcaacactgaaatcttttctagggaattctgatgtcaatgatttggttggaggcctgaaacggctttgtcaagtttttgagcacatcgagaagttactgattcttgctgcttccatcaatcggaagcttattgatgctccacgactagctcaagcaatattttacgactactacaacttctaccttccaaaaatgggaactagcctggaaagcatttgctatgagaaggagttcacaactaaggaaaaggtcgggatgtatgagagagatgctgtgtcgaacctgtttcctccccctactgctaatcagtcttggaggaaagttttgagcatgggaaatcttctgaacggccatgaaccgatgcaaagggaaatcatattctcagtccaggagagaataagcaacggtcattattcgagcccaaccccattatgtaccaacaatgagaagatccagacacataggatgtatatatctgggacatctaatgacctttgggttgcattgtctgtaacgtcctgggattgagctgcacgatgtatgagaggagcaattggtgttttaattagcttagaatcccgttggtgcagataaactatcattgtattttttttttgttggatgtaccagaagtccagaaggggccaccaggacatggctagtgacgcactgaggacaagcatccatttttgacatcagatcaaagtattgattatttacgtcttgtagcagtcagaactcagaaatgctaatatattcttggcttcctctagagaaatggttgtagacaagctctatttggctgacgtttttggtctgttaggtggtgggctggtgagttgcaacacacacactggggttgatgtacgtaaacatcttgtatgacttttgcaatgagctaggctttgttcaatactcgagtccatgaaattttcaatatttgatatctg

SEQ ID NO: 219105 - DNA, 3470 bp, Zea Mays
ccacaatcaccgtcaccagaagcacgaacagagaactcggaccgtcggtcgacgaggcatcggccatcgacgcaacactctcctccgcttcccttctcctcagtcgcggctcaccccctcccccttgccgatctaacgggaacgcgtctcacagcttccacgcgactgcaccgtgccacccgaggctcgcccccgctgagccagcggagcgaatctccatggcctccacatcctcctccaggtacgcgaaacatcgtcggatcggagaggacgatgagttggaggaggttgaggaggaggccgaagaggagcttgagcggttcgatgatttcaccattgcttcgtcatgggaaaagtttatatctgagatagaggctatttgccgtcaatggcttgcagatggcgcaaagatcttaatgcaaaaaggtgcagagggtgttcctccttttgaaaacttatatatgatcaagcgtgaattgaagcatgggaaaagagtctattctatggagtaccatttcatgaaatctgcaaaaggtgagtttatttggttaaactataatactttcagcaagcttgtagaagggcagacctggtgatgtagaagggcagaccatttcatgaaatcgaagcagcctcttcacatttgcggagggaagacttgccttggtttatcccttctccagaacccactcatgtggtcaaaactcatattgggacgatgacacacatagcatgcagctctcatttggagttgatgagtttttgataattgctccgctgagtgccagtggtgtgatcctcgatgatccagaatcaactaagcttttgagttctgtagcaattgctctttctaattgtggcagcaattggccagcgtttgtaccagttcacgacccttcacggaaagcctatatagggattcaaaatctgggaactgtatttactcgaagatttgaagctgaccgaattggtagtcaagtgccaataagactcatgcatctggaggggttacatgagctatttctgtcaaaatttgtcctatcctcgtcagattttccagctagggtaaaggttcacttctcaatgaagcttagctacaagaccccagaatatgatcatgataatgaaactttagattctgaagctactgagccattgactgaaaatgaagttgtgaaccaccctagaaaactatgggacgatgattgcccttgggcagagtggtactctgctgaggatcctgttaaaggttttgagttgactgccatctggggagagaggacatttgaagagacccttgagatggctgaagtggaaaatgcctcgtcctttgatgctgatagctggttccttcacccagttgtatctcgatacatggtagatgattctattggaaaatttgttgggtttgcatcccagctacatcttctagtaaatgcatatgaatcatcagtggaggcacaatttctagaagactttgttgcagatacttcaggccaggataatgcaaaatctactgctactgtgcctccaccatcagttattgatcgtgttatgaaagatcttttcagtgatgagactggcaactatatggaagcagaaaacaagtatagtcgtgctatgcgaggtgcacctgcagattcactttttggccagttctgtttgcatgcactgtggtttggcaactgcaatatatgcgcaattgctacactatggattgattttgtgcgggaaattcgttggtgctgggaggaatcagaaagattgcctaggatgaaaagcacttcaagcattgatctctcttcttgtcttatccaccaaaagttacaaatgctcacgatatgcattgagaggaagagatcactgaaccgtgagaaaggtactggctacaaagatgagacttcaaatagtacggcagtgaacaagtctaggaaaggatcagctggtgttgtgcctaaaatgatgctcctgaatacgtttcaggaaatgcatgctccatatactcaggatgcacctttgatgaccgaagatatgcatgaagaaaggctccatgcagctgaagcttttggcaatgccattggtctatctggacagctggaaagggatatattatgttccgatatgtctgcttttaaagctgcaaacccagatgctgtctttgaagattttattcggtggcattcacctggtgaatggttgagcgaggacaaaacagatggtaatgcaggctggcctcccaaaggaaagctttctcaccgtatgtcccaacatgggaatgtgtggcgcaaaatctggaatgatgctctgccattgcctgtttctgaacagaagtctttgcttgaccctgttcgggaaggagaaaaggtgcttcattaccttgaaactttaaggccacagcagctccttgaacaaatggtgtgtacagctttcaaatcatcagctgatatcctgaataagaccatgtatggtggcttcaaggaaatgaagacaaaaatggatcgactatatgtcaccatggcgtcaacactgaaatcttttctagggaattctgatgtcaatgatttggttggaggcctgaaacggctttgtcaagtttttgagcacatcgagaagttactgattcttgctgcttccatcaatcggaagcttattgatgctccacgactagctcaagcaatattttacgactactacaacttctaccttccaaaaatgggaactagcctggaaagcatttgctatgagaaggagttcacaactaaggaaaaggtcgggatgtatgagagagatgctgtgtcgaacctgtttcctccccctactgctaatcagtcttggaggaaagttttgagcatgggaaatcttctgaacggccatgaaccgatgcaaagggaaatcatattctcagtccaggagagaataagcaacggtcattattcgagcccaaccccattatgtaccaacaatgagaagatccagacacataggatgtatatatctgggacatctaatgacctttgggttgcattgtctgtaacgtcctgggattgagctgcacgatgtatgagaggagcaattggtgttttaattagcttagaatcccgttggtgcagataaactatcattgtattttttttttgttggatgtaccagaagtccagaaggggccaccaggacatggctagtgacgcactgaggacaagcatccatttttgacatcagatcaaagtattgattatttacgtcttgtagcagtcagaactcagaaatgctaatatattcttggcttcctctagagaaatggttgtagacaagctctatttggctgacgtttttggtctgttaggtggtgggctggtgagttgcaacacacacactggggttgatgtacgtaaacatcttgtatgacttttgcaatgagctaggctttgttcaatactcgagtccatgaaattttcaatatttgatatctg

SEQ ID NO: 219106 - DNA, 3593 bp, Zea Mays
ccacaatcaccgtcaccagaagcacgaacagagaactcggaccgtcggtcgacgaggcatcggccatcgacgcaacactctcctccgcttcccttctcctcagtcgcggctcaccccctcccccttgccgatctaacgggaacgcgtctcacagcttccacgcgactgcaccgtgccacccgaggctcgcccccgctgagccagcggagcgaatctccatggcctccacatcctcctccaggtacgcgaaacatcgtcggatcggagaggacgatgagttggaggaggttgaggaggaggccgaagaggagcttgagcggttcgatgatttcaccattgcttcgtcatgggaaaagtttatatctgagatagaggctatttgccgtcaatggcttgcagatggcgcaaagatcttaatgcaaaaaggtgcagagggtgttcctccttttgaaaacttatatatgatcaagcgtgaattgaagcatgggaaaagagtctattctatggagtaccatttcatgaaatctgcaaaaggtcaaaactcatattgggacgatgacacacatagcatgcagctctcatttggagttgatgagtttttgataattgctccgctgagtgccagtggtgtgatcctcgatgatccagaatcaactaagcttttgagttctgtagcaattgctctttctaattgtggcagcaattggccagcgtttgtaccagttcacgacccttcacggaaagcctatatagggattcaaaatctgggaactgtatttactcgaagatttgaagctgaccgaattggtagtcaagtgccaataagactcatgcatctggaggggttacatgagctatttctgtcaaaatttgtcctatcctcgtcagattttccagctagggtaaaggttcacttctcaatgaagcttagctacaagaccccagaatatgatcatgataatgaaactttagattctgaagctactgagccattgactgaaaatgaagttgtgaaccaccctagaaaactatgggacgatgattgcccttgggcagagtggtactctgctgaggatcctgttaaaggttttgagttgactgccatctggggagagaggacatttgaagagacccttgagatggctgaagtggaaaatgcctcgtcctttgatgctgatagctggttccttcacccagttgtatctcgatacatggtagatgattctattggaaaatttgttgggtttgcatcccagctacatcttctagtaaatgcatatgaatcatcagtggaggcacaatttctagaagactttgttgcagatacttcaggccaggataatgcaaaatctactgctactgtgcctccaccatcagttattgatcgtgttatgaaagatcttttcagtgatgagactggcaactatatggaagcagaaaacaagtatagtcgtgctatgcgaggtgcacctgcagattcactttttggccagttctgtttgcatgcactgtggtttggcaactgcaatatatgcgcaattgctacactatggattgattttgtgcgggaaattcgttggtgctgggaggaatcagaaagattgcctaggatgaaaagcacttcaagcattgatctctcttcttgtcttatccaccaaaagttacaaatgctcacgatatgcattgagaggaagagatcactgaaccgtgagaaaggtactggctacaaagatgagacttcaaatagtacggcagtgaacaagtctaggaaaggatcagctggtgttgtgcctaaaatgatgctcctgaatacgtttcaggaaatgcatgctccatatactcaggttctgtttgcccttttcttcaggtttaatattgtgatccacatgcacccccttatgtttccattagttccttaggatgcacctttgatgaccgaagatatgcatgaagaaaggctccatgcagctgaagcttttggcaatgccattggtctatctggacagctggaaagggatatattatgttccggtaagattttgtgggaacaacatgacatttcacttgttacataacttgttaatgtttctcgagtctatcttcaggaattttcttttacttcatctaatttatgagcaatgaccaaagcttttgaagaagttattctacttttcctctttgttgcatgtattgtggaactttttcatttgctactaattaggaagctctgctccttgattagatatgtctgcttttaaagctgcaaacccagatgctgtctttgaagattttattcggtggcattcacctggtgaatggttgagcgaggacaaaacagatggtaatgcaggctggcctcccaaaggaaagctttctcaccgtatgtcccaacatgggaatgtgtggcgcaaaatctggaatgatgctctgccattgcctgtttctgaacagaagtctttgcttgaccctgttcgggaaggagaaaaggtgcttcattaccttgaaactttaaggccacagcagctccttgaacaaatggtgtgtacagctttcaaatcatcagctgatatcctgaataagaccatgtatggtggcttcaaggaaatgaagacaaaaatggatcgactatatgtcaccatggcgtcaacactgaaatcttttctagggaattctgatgtcaatgatttggttggaggcctgaaacggctttgtcaagtttttgagcacatcgagaagttactgattcttgctgcttccatcaatcggaagcttattgatgctccacgactagctcaagcaatattttacgactactacaacttctaccttccaaaaatgggaactagcctggaaagcatttgctatgagaaggagttcacaactaaggaaaaggtcgggatgtatgagagagatgctgtgtcgaacctgtttcctccccctactgctaatcagtcttggaggaaagttttgagcatgggaaatcttctgaacggccatgaaccgatgcaaagggaaatcatattctcagtccaggagagaataagcaacggtcattattcgagcccaaccccattatgtaccaacaatgagaagatccagacacataggatgtatatatctgggacatctaatgacctttgggttgcattgtctgtaacgtcctgggattgagctgcacgatgtatgagaggagcaattggtgttttaattagcttagaatcccgttggtgcagataaactatcattgtattttttttttgttggatgtaccagaagtccagaaggggccaccaggacatggctagtgacgcactgaggacaagcatccatttttgacatcagatcaaagtattgattatttacgtcttgtagcagtcagaactcagaaatgctaatatattcttggcttcctctagagaaatggttgtagacaagctctatttggctgacgtttttggtctgttaggtggtgggctggtgagttgcaacacacacactggggttgatgtacgtaaacatcttgtatgacttttgcaatgagctaggctttgttcaatactcgagtccatgaaattttcaatatttgatatctg

SEQ ID NO: 219107 - DNA, 7162 bp, Zea Mays
atggagatttctggaagggctgcggcggcggaggcggaggcgctgattgcgggcgggatgcgggacggggtgcggctgcggcagcggcagaacaatgaggtatcgataggggcctacattcgaatcactggaaatcaacgacaattgttcagttacttgcccaaacaacgaacgacttattgccacagagctaaggatgacagtgtgagtatcccctgctgtgtcgataggtcaagtaggcgctgcagcctgcatgtcattcatgtccacggattctcaacagcttctctgccaggacatgcagaaaaactgttcatatcaacagaaaacccattatttactgctgatgatgttgtgcaagatactgtggatagcagttactcgtctccgacggacatggactggactgtctcaagcttcgaagcccacgaaccctatgactatgagcacagaacaggaaccacaggatcgagggaaccattcaaagctgtcctttgtgcacatctgggaatcaaatctccccactcttccacaaaggctcgggttttctcttttaagctggagctgtggagcatggcagctgctgcacaagatggacggacggacggaccacacaagaatccaatccagccctcgcgtggctgtactgtactatcggttcgccccgtcgagaagggtgagcagagaattgtccaacggtgggcggcggcggcgagggtatgccggtatgccatcttggccgtccttgcacgtcctccgttgtctccacctccacctgaacggaatctggaatcgccatcacctgccacgcgcgtcgcctccctcgccctcggcgcagggagcacatgctactgataagtagcggcggctggtttcctcatctattctatacttctggaactgatcggcggtgatcgcgacggatttgaagaaatagactgcgggcttgactaattggtaatctgggattggttcttcccccataccctctgctgagcatttaacctgtcttgagtagcgagaatggtgattggcataattgttgttgctgtcccaaaacacccttggattttttaatgacttgctttctctgcagagggcatgggattcatctgggaggatgcagttccttttatatattttttatttattctctgcatttaggatccaggaaattcattgtgctgtaactcagttcatctgatgtaaattaggttcataaatttcaataatgcttggtctctgaagcacatactcagttttctgtcggttgtgttgcagacgaacgacttattgccacagagctaaggccgtttgcagcagtctacccaaagtttatccaaaagcactattctgcattgttatacactgtagactacactgttcgcagagtgaagtttgaatataactatgagatgggtaagctgctggagatagcctaaagatgtcagtataagtatcccagcataaggatgtcagtataagtatcccctgatgtgtcgataggtcaagtaggcgctgcagcctgcagtgagtccatggccaggatgaatagcatgggcaatagttggtctccttgccagactcctgatctaccaaatcctgtctctcaaatttgaagactatactccccaacaaatttgtgtttgatccaactgccctcatcttacagctttgtcatcaggagttcaagtgcagctgtacgttccttggaaggtacaatgtcaggagcctataattgccatatgtcttgtagatcttatggattttttttttgttcttcctgaagtgtcattcatgtccacggattctcaacagcttctctgccaggacatgcagaaaaaactgttcatatcaacagaaacccattacttacacagtcagatagtccgctcttctactgtcttgactgctgatgatgttgtgcttgtgcaagatactgtggatagcagctactcgtctccgatggacatggactggactgtctcaagcttcgaagcccacggaccctatgagcacagaacaggaaccacatgaccgaggctcgggttttctcttttaagctggagctgtggagcatggcagctgctgcacaagatggacggacggacggaccacacaagaatccaatccagccctcgcgtggctgtactgtactgtacgtgcgctgcgcagaaagcactgtacgccggtgaggaaacgctgtcgccctgtgtgttactctgacttttttccaactttagtttttggtttacgtgcttcttactgttgcaattactttatggtctgctaggatagtttgtattatgtttttttgttttgtttcctgcggtacatgctataatgggtgtatccatgggtcagctgtagatgggtgcaagggcatatctatctacctagacgctttagtctgggcttttcatgggcacgctcatgtggccacggacagtgggccgtattccaagattttagaaatgatggtaacttgatgcgtttatcaatagcggggtccagttggagagaaatccctttgcagcaacagaaatggtggctgcaggcttgtgcagaggcagagagagagagagagagagagagagagagagagagagagagagagagagagagagagagagagagagagagagagagagagagagagagagagagagagagagagagagagagagagagagagagagagagagagagagagagagagagagagagagagagagagagagagagagagagagagagggctgtgtctagattgggacaaaagggtgctctgcatagagagagagagagagagagagagagagagagagagagagagagagagagagagagttggttgtgctcgagtacgtgctagatcgatcagcaccagcagcaagtcagcagctatcctcactccgtcaaagacgctttgggttgtcctccgtgtgcaactctatcaactagaggaggctttcagacaatgacacgaggggaactggggaggtgtgtgtgaaagcgagagagagagagagagattgagcgggagatgcagccatttaatctagctagcttagctagttggctgctgaagaaatgccgtacgctttttgtaagaatatcgcagttcacacttcacagcagtgcgtcagtcttttggagcacgctgttcattttattttattttctctctctcgtctgctcctgcatctagtataagttgctggcttcctctgttaccgttagagagagagagagagagacagagaggggaggaagggattgaactgaatgaggagggcctcagactgagaggctgcaaagctgaaaaagcaaaaaaggcaaagaggaacactttggccaaagcatatggaacgaggatcctgttttgactgactccacatttcgcagaggacaccttcccccattttttttcgtttaggtttcagcaatctggcacactgtagattattaagtagggactagggagtactttgttatttgtttcagctttcaagttcaggctagtcctgaacctatcctactttctgcttccgatctctctttttttttaaaaaaaaaaatctaccagccattaacgcttaaccgaagtcgttcccttgcactacaatttagtgatcttaagtaatttatttaatagttggttatcgtattaaaaacgtatatgtacatgtgtcctggtaagcattcagtttggcatttcgtcgtatcgtcgttttacaaatatatagtaaacatacagattgttggatggcctaatgatacagttatttctaaaatcattatggaaattatgatgagggcataaatcatgactcaagtaccacattgtcgtgaagaccaatacgaatgcttcagcaatgaaaaaaaaaggggaaggtgtagggattcccatttctggagataagggaagggcatgcgtgtccaatatggcctttatagctaatctagaccctgaaacctgctttgctctgacattaggctgacacatgtactctgtgcaaccaatgatctcatgcttaatgcccctaacctcatagatagactggcataagtgcctccttgtgctgtttcaagtctgaacacaatgctctatggatttctctacaacagctgtaataataaagccttttagtcctaaacaaggctaaatctttaggtatatttcattttttttttcaagtcttcctttaccgtctcttttcataataactttagccttccatggtctctcttactgttattatcacgtcttaggatgtcactatgtgctggcgcctttggaggtcttgttgcacacactctatggaatttttttctctaacttgttaatttgcttggtggggctaagtaacagtcagctgcacagattgcagggctagcagtacccatgttcttattcttggtcaagtctgctctcaactcaagaagattggacttgtcttgggagaagggagcaaatgtgcacaacaactagccttgtactttttttcttgattgaattaatcaatctaggcactagtctaatcacacattgcgcccatgcttaggaggccttgtcccaagtggtggtggtcattattatatttaaaaactgaccgtctttttccacccactcgtgcaacatccttctatgacagtgggaccatggatccaggtctgccatatacacctgactttttaggcacgtagatgtagcattcagtatatagttttttttttttgcattatacacatgaatctagcgtgtgtgcaattgtaaaagacaacaaaagttgtatgcctggccatgatttgggggaggcggtatgtgtcctgttggtagcatgatatttgaactcatgatcagccaacatgtacttgttggaacagagagaccaatggctgatctgctccaactcaggcctacttttatctaaggtgccgtacacccgtgggaatcatggataaactaagcggaaatgatggggctctgttggtaaccctggtcgtaatctcttggttccaggattatgacgctaattgttaactatgtgtggttcagacggactggtcgcttctgctaaggccgccgtcctgccgtctgagcagacgatcattgaaaatggatgccacgtgattggcacaaaggttctgctgtcctcttcctcaagggatagcgatgcaagatccagcaggctggccggagagggagagaccagtctctcctcgagcccaagtacgaaagcgtatcaaaagaagaaaggaacaaggtgggggaaaaaaactaggggggccgtatcatatatctggtgccgaaaaacgcccttggaacggagaaaagcaaggtcgcggtgaagtgtgagcagcctctcctctagtggttctgctgggacgacaccaccagcactgcagtaccactactagttatatcaatgtggctgtccctcctcttttccgctgatggagttgagatgttctgcactacttttccaccccgaatccggatggcacccgtaccgtagtgcttgtatgccttctttccctttcttctacttgtacctacatgctactacaggtgtactacgtattttgctccccccacttggttttgcaagcaagaccagcgtaaaagcagaggagactgtcagattcctctttcgctttattctcccgcccagcctcacacacacgtagttagtgttgggctactcacacatgacacaacttcgcctccctccaaatacccagagttttgaagcagggaggaaggaagacagagcagaagcagagcgctctccgtctccggtccagtatctccgctcgccctcctccctcctcctcctccttcgcttcaggttcaggagccagttagaacattggtgttagcgcgcgctctttcctccaagcagaatcaagattttgttcccatcctcaaggaaaaaaaaacaaacaaacaaacagttgtctctgcgcccgcccgcccgccttggcttcttctacctacatcagctgtccatttcgcagcacgcagcagcagtctctacgctacggctgcatgagtgttagctagcagcaaggatgagagatggcagcaacaccaccaagaagagcaagctgtcgtggtccaagagcttggtgaggaagtggttcaacatcaggagcaaggcccacgacttccacgccgacgatgtggccgcgattggtaggacagttgcaggagggggcgatgacgagtggaggaggggcagcagcttcacccgtagggagccgagcacagtgaagaagagcaagacagagaggtcctcgaggaggagcaatgggcactcgaggcggggaaagattgaccttgatgccgccgaagccacagtgacattggactataggatatttgttgctacatggaatgtgggcggccgttccccgccaaataacatgagcctcgaggactggctccacgctgcacctcctgctgacatctatgtcctcgggtttcaagaaattgttccactcaatgccggtaacgtccttgggacagaggacaatgttccagcgaagaggtgggtgtcactggtcaggaggacactgaacaatttgccaggtactagtggcaacgggagcttccggacaccatctccggctcctaaccctgtggtggagatcgacgatgattttgagggtttgtcatcgaagcagaacagtgcaagtttcttccatcgccggtctttccaggctgggcttagtcggagtttgaggatggagggtgacattcttgctcctcagccaaggctggaacgtcggtacagtgtctgtgaccgagcaatctatggccgtaggcctagcgactatgagaacaactaccgatggggtggatcgtcagatgatgagaataatactggagagtcaccgagcactgtgtattcaccagtgtcgtacggttacggcaatgcatcatctctggaagatggtcaaagacggcctggccaaactagatactgtctggtggcaagcaagcaaatggtagggttgtttctgatgatttgggctcggaaggacataagagatgacataagaaatctgaaagtttcttgtgttgggagaggactgatgggctaccttgggaataaggttagtcatagcgtgtctttttttttgtcgtttttcc

SEQ ID NO: 219108 - DNA, 3367 bp, Zea Mays
atggagatttctggaagggctgcggcggcggaggcggaggcgctgattgcgggcgggatgcgggacggggtgcggctgcggcagcggcagaacaatgagggagcacatgctactgataagtagcggcggctggtttcctcatctattctatacttctggaactgatcggcggtgatcgcgacggatttgaagaaatagactgcgggcttgactaattgacgaacgacttattgccacagagctaaggccgtttgcagcagtctacccaaagtttatccaaaagcactattctgcattgttatacactgtagactacactgttcgcagagtgaagtttgaatataactatgagatgggtaagctgctggagatagcctaaagatgtcagtataagtatcccagcataaggatgtcagtataagtatcccctgatgtgtcgataggtcaagtaggcgctgcagcctgcagtgagtccatggccaggatgaatagcatgggcaatagttggtctccttgccagactcctgatctaccaaatcctgtctctcaaatttgaagactatactccccaacaaatttgtgtttgatccaactgccctcatcttacagctttgtcatcaggagttcaagtgcagctgtacgttccttggaaggggacaaattagtgtgcggtgtgccatagaagcttgttatattagaaagtacgtttttttgcaggtacaatgtcaggagcctataattgccatatgtcttgtagatcttatggattttttttttgttcttcctgaagtgtcattcatgtccacggattctcaacagcttctctgccaggacatgcagaaaaaactgttcatatcaacagaaacccattacttacacagtcagatagtccgctcttctactgtcttgactgctgatgatgttgtgcttgtgcaagatactgtggatagcagctactcgtctccgatggacatggactggactgtctcaagcttcgaagcccacggaccctatgagcacagaacaggaaccacatgaccgaggctcgggttttctcttttaagctggagctgtggagcatggcagctgctgcacaagatggacggacggacggaccacacaagaatccaatccagccctcgcgtggctgtactgtactgtacgtgcgctgcgcagaaagcactgtacgccgacggactggtcgcttctgctaaggccgccgtcctgccgtctgagcagacgatcattgaaaatggatgccacgtgattggcacaaaggttctgctgtcctcttcctcaagggatagcgatgcaagatccagcaggctggccggagagggagagaccagtctctcctcgagcccaagtacgaaagcgtatcaaaagaagaaaggaacaaggtgggggaaaaaaactaggggggccgtatcatatatctggtgccgaaaaacgcccttggaacggagaaaagcaaggtcgcggtgaagtgtgagcagcctctcctctagtggttctgctgggacgacaccaccagcactgcagtaccactactagttatatcaatgtggctgtccctcctcttttccgctgatggagttgagatgttctgcactacttttccaccccgaatccggatggcacccgtaccgtagtgcttgtatgccttctttccctttcttctacttgtacctacatgctactacaggtgtactacgtattttgctccccccacttggttttgcaagcaagaccagcgtaaaagcagaggagactgtcagattcctctttcgctttattctcccgcccagcctcacacacacgtagttagtgttgggctactcacacatgacacaacttcgcctccctccaaatacccagagttttgaagcagggaggaaggaagacagagcagaagcagagcgctctccgtctccggtccagtatctccgctcgccctcctccctcctcctcctccttcgcttcaggttcaggagccagttagaacattggtgttagcgcgcgctctttcctccaagcagaatcaagattttgttcccatcctcaagtacttactcctcctctcccccactctccagccgtcctctctccttctccatcaaatcacaggctttgtttatagggaaaaaaaaacaaacaaacaaacagttgtctctgcgcccgcccgcccgccttggcttcttctacctacatcagctgtccatttcgcagcacgcagcagcagtctctacgctacggctgcatgagtgttagctagcagcaaggatgagagatggcagcaacaccaccaagaagagcaagctgtcgtggtccaagagcttggtgaggaagtggttcaacatcaggagcaaggcccacgacttccacgccgacgatgtggccgcgattggtaggacagttgcaggagggggcgatgacgagtggaggaggggcagcagcttcacccgtagggagccgagcacagtgaagaagagcaagacagagaggtcctcgaggaggagcaatgggcactcgaggcggggaaagattgaccttgatgccgccgaagccacagtgacattggactataggatatttgttgctacatggaatgtgggcggccgttccccgccaaataacatgagcctcgaggactggctccacgctgcacctcctgctgacatctatgtcctcgggtttcaagaaattgttccactcaatgccggtaacgtccttgggacagaggacaatgttccagcgaagaggtgggtgtcactggtcaggaggacactgaacaatttgccaggtactagtggcaacgggagcttccggacaccatctccggctcctaaccctgtggtggagatcgacgatgattttgagggtttgtcatcgaagcagaacagtgcaagtttcttccatcgccggtctttccaggctgggcttagtcggagtttgaggatggagggtgacattcttgctcctcagccaaggctggaacgtcggtacagtgtctgtgaccgagcaatctatggccgtaggcctagcgactatgagaacaactaccgatggggtggatcgtcagatgatgagaataatactggagagtcaccgagcactgtgtattcaccagtgtcgtacggttacggcaatgcatcatctctggaagatggtcaaagacggcctggccaaactagatactgtctggtggcaagcaagcaaatggtagggttgtttctgatgatttgggctcggaaggacataagagatgacataagaaatctgaaagtttcttgtgttgggagaggactgatgggctaccttgggaataaggttagtcatagcgtgtctttttttttgtcgtttttcc

SEQ ID NO: 219109 - DNA, 4192 bp, Zea Mays
atggagatttctggaagggctgcggcggcggaggcggaggcgctgattgcgggcgggatgcgggacggggtgcggctgcggcagcggcagaacaatgagttactcgtctccgacggacatggactggactgtctcaagcttcgaagcccacgaaccctatgactatgagcacagaacaggaaccacaggatcgagggaaccattcaaagctgtcctttgtgcacatctgggaatcaaatctccccactcttccacaaaggctcgggttttctcttttaagctggagctgtggagcatggcagctgctgcacaagatggacggacggacggaccacacaagaatccaatccagccctcgcgtggctgtactgtactatcggttcgccccgtcgagaagggtgagcagagaattgtccaacggtgggcggcggcggcgagggtatgccggtatgccatcttggccgtccttgcacgtcctccgttgtctccacctccacctgaacggaatctggaatcgccatcacctgccacgcgcgtcgcctccctcgccctcggcgcagggagcacatgctactgataagtagcggcggctggtttcctcatctattctatacttctggaactgatcggcggtgatcgcgacggatttgaagaaatagactgcgggcttgactaattggtaatctgggattggttcttcccccataccctctgctgagcatttaacctgtcttgagtagcgagaatggtgattggcataattgttgttgctgtcccaaaacacccttggattttttaatgacttgctttctctgcagagggcatgggattcatctgggaggatgcagttccttttatatattttttatttattctctgcatttaggatccaggaaattcattgtgctgtaactcagttcatctgatgtaaattaggttcataaatttcaataatgcttggtctctgaagcacatactcagttttctgtcggttgtgttgcagacgaacgacttattgccacagagctaaggccgtttgcagcagtctacccaaagtttatccaaaagcactattctgcattgttatacactgtagactacactgttcgcagagtgaagtttgaatataactatgagatgggtaagctgctggagatagcctaaagatgtcagtataagtatcccagcataaggatgtcagtataagtatcccctgatgtgtcgataggtcaagtaggcgctgcagcctgcagtgagtccatggccaggatgaatagcatgggcaatagttggtctccttgccagactcctgatctaccaaatcctgtctctcaaatttgaagactatactccccaacaaatttgtgtttgatccaactgccctcatcttacagctttgtcatcaggagttcaagtgcagctgtacgttccttggaaggtaccctggtgttcgctttctagttccaacaagcttgcacccatcatatattggtgaatggttggttacacatgccaacaacaactgatcatgtgggcaggttgctctgtgacaggggacaaattagtgtgcggtgtgccatagaagcttgttatattagaaagtacgtttttttgcaggtacaatgtcaggagcctataattgccatatgtcttgtagatcttatggattttttttttgttcttcctgaagtgtcattcatgtccacggattctcaacagcttctctgccaggacatgcagaaaaaactgttcatatcaacagaaacccattacttacacagtcagatagtccgctcttctactgtcttgactgctgatgatgttgtgcttgtgcaagatactgtggatagcagctactcgtctccgatggacatggactggactgtctcaagcttcgaagcccacggaccctatgagcacagaacaggaaccacatgaccgaggctcgggttttctcttttaagctggagctgtggagcatggcagctgctgcacaagatggacggacggacggaccacacaagaatccaatccagccctcgcgtggctgtactgtactgtacgtgcgctgcgcagaaagcactgtacgccgacggactggtcgcttctgctaaggccgccgtcctgccgtctgagcagacgatcattgaaaatggatgccacgtgattggcacaaaggttctgctgtcctcttcctcaagggatagcgatgcaagatccagcaggctggccggagagggagagaccagtctctcctcgagcccaagtacgaaagcgtatcaaaagaagaaaggaacaaggtgggggaaaaaaactaggggggccgtatcatatatctggtgccgaaaaacgcccttggaacggagaaaagcaaggtcgcggtgaagtgtgagcagcctctcctctagtggttctgctgggacgacaccaccagcactgcagtaccactactagttatatcaatgtggctgtccctcctcttttccgctgatggagttgagatgttctgcactacttttccaccccgaatccggatggcacccgtaccgtagtgcttgtatgccttctttccctttcttctacttgtacctacatgctactacaggtgtactacgtattttgctccccccacttggttttgcaagcaagaccagcgtaaaagcagaggagactgtcagattcctctttcgctttattctcccgcccagcctcacacacacgtagttagtgttgggctactcacacatgacacaacttcgcctccctccaaatacccagagttttgaagcagggaggaaggaagacagagcagaagcagagcgctctccgtctccggtccagtatctccgctcgccctcctccctcctcctcctccttcgcttcaggttcaggagccagttagaacattggtgttagcgcgcgctctttcctccaagcagaatcaagattttgttcccatcctcaaggaaaaaaaaacaaacaaacaaacagttgtctctgcgcccgcccgcccgccttggcttcttctacctacatcagctgtccatttcgcagcacgcagcagcagtctctacgctacggctgcatgagtgttagctagcagcaaggatgagagatggcagcaacaccaccaagaagagcaagctgtcgtggtccaagagcttggtgaggaagtggttcaacatcaggagcaaggcccacgacttccacgccgacgatgtggccgcgattggtaggacagttgcaggagggggcgatgacgagtggaggaggggcagcagcttcacccgtagggagccgagcacagtgaagaagagcaagacagagaggtcctcgaggaggagcaatgggcactcgaggcggggaaagattgaccttgatgccgccgaagccacagtgacattggactataggatatttgttgctacatggaatgtgggcggccgttccccgccaaataacatgagcctcgaggactggctccacgctgcacctcctgctgacatctatgtcctcgggtttcaagaaattgttccactcaatgccggtaacgtccttgggacagaggacaatgttccagcgaagaggtgggtgtcactggtcaggaggacactgaacaatttgccaggtactagtggcaacgggagcttccggacaccatctccggctcctaaccctgtggtggagatcgacgatgattttgagggtttgtcatcgaagcagaacagtgcaagtttcttccatcgccggtctttccaggctgggcttagtcggagtttgaggatggagggtgacattcttgctcctcagccaaggctggaacgtcggtacagtgtctgtgaccgagcaatctatggccgtaggcctagcgactatgagaacaactaccgatggggtggatcgtcagatgatgagaataatactggagagtcaccgagcactgtgtattcaccagtgtcgtacggttacggcaatgcatcatctctggaagatggtcaaagacggcctggccaaactagatactgtctggtggcaagcaagcaaatggtagggttgtttctgatgatttgggctcggaaggacataagagatgacataagaaatctgaaagtttcttgtgttgggagaggactgatgggctaccttgggaataaggttagtcatagcgtgtctttttttttgtcgtttttcc

SEQ ID NO: 219110 - DNA, 1565 bp, Zea Mays
caccttcccccagccccactatacgacgaccgccgcggtcgaaccaaaacagcttcctcctcccggcgtcgcctccgcgacgatcctttccgccgccccatagggttctgctgctcccgatccgggcgccagatctcgcgtggcgacgcgcggatctcggatttctctagaggcggcggcggcggcggccggagcaggaggagatggcgctctcggggatgcgggggctctcggtcttcatcagcgacgtacgcaactgccacaacaaggagcaggagcgcctccgcgtcgacaaggagctcggcaacatccgtacgcggttcaaaaacgagaagggcttgtcaccatacgagaagaaaaaatatgtatggaaaatgctttacatttatatgctgggttatgatgttgattttgggcatatggaaactgtctcgttgatatctgcaccaaagtatcctgagaagcaggttggttatattgtgacatcttgcttactgaatgagaataacgatttcttaagaatggtaataaatacagtaaggaatgacataatcggacgaaatgagaccttccagtgcttagcattgacaatggtaggtaacattggtgggaaagaattttctgagtcactagccccagatgttcagaaacttcttatttcaagcagttgccgtcctgttgtcagaaagaaggctgctctatgccttctgcggctttataggaagaatcctgatgttgtgaatattgatggctgggctgatcgaatggcacaacttctagatgagcgtgatctaggtgtgctgacatctgtcatgagtctttttgtttcactagtatccaacaattctgaagcatattggaattgtcttccaaaatgtgtaagaatattggagagattagcaagaaatcaagatattccacaagagtacacttattatggaattccatctccttggcttcaggttaagacaatgagagctcttcagtacttccctaccattgaagatcccaacgcaagacgggctttgtttgaggttttacagcgtattttgatgggtactgatgttgttaaaaatgttaacaagaacaatgcctcacatgctgttctctttgaagctcttgctctggtcatgcatctggatgctgagaaggagatgatgtcacagtgtgtggctcttcttgggaagtttattgcagtccgggagccaaacattcggtacctcggtctggaaaacatgactaggatgctgttagtaacagatgtgcaggatatcattagaaggcaccaggcccagatcattacatctttgaaggatccagatatcagcattagacggagggctcttgatttattatatggcatgtgtgatgttacaaacgcgaaagaaattgttgaggagttgttgcagtaccttgatacagctgaatttgcaatgcgtgaagagttgtctctgaaggcagctattcttgcagaaaaatttgctccacaactattgtgggtgagacttccaccttgccttgccctcgcgtgtaaggcgtctgctgaggcgtggggcgtcctcggg

SEQ ID NO: 219111 - DNA, 1410 bp, Zea Mays
aaactccaaagccaacaaacagagctccaactcagaaagcatccgtcccttggcagcagcaacaagctactagctatgtgtgtttagagcgagcgagggaaaaaaaagaaaacatctaagatatactccatcatcttcgtttgattaacccgcccagtaaagccatgggtactaatgatagagcggtcatttctctggtactcctcgtgtgcatcgctagccgctcgtccttgggtgccgctgaaactgacgttgagcagaagcgcttgtcagtcccgttgatgtttgtgttcggtgattcgctggtcgatgtcggaaacaataacttcctgccgccgcctgcaccccgtgctgcatctccgtacggcatcgacttccatgctggcaccgccggcgccgtctcaggacggttcacgaatggctacaaccttgccgatttagtcgcgcgacgtctggggttcaagatgagtccacctgcttacctctcgttgacaccggtatcaaagtttgacctgttcacgtgccgaattggtgccaattacgcgtctggcggatctggcattctcaacaccacgggaaacgggacactcacgctgcagaaacaaatcacgctgttctccaaaactcaagcaagaatgtcgtgggcccgctgcaagctcaggtctatggtatcgaggtccttgttccttgtcagcgccggcggcaatgacttctccgccttcagtgaaatgggcatgggcgaacaagacgccccagcctacatcagtagcatggtctcaacctatgtccagcatatcgacgcgttgtacaagttgggagcacggaggttggggatcctagacgtgccagctatcggctgtaccccaggctccagagtccccatggccaacggcggatgcaacgacgctgccaactctatggcgcagaacttcaacagactcctaaggctcgagggctccgggtggtcgacagggcatgctgcggatcgggaaaactgaacgcggcggtcatgtgcgcccagccaaacacgacttactgttcggatcgcgacgactacatgttctgggacatgctacatcctacgcaggcaacaaatgaacgtggggtggtcgccatcttctacggcccgcaggagtacgcggatcccatcaactttgcacagttggccgctgccacagcaaatgatgatgatgatataaatactgctatgaccgcaggcgtctatgccgccatatgataaacactatttatgtctattggcatgcagctgcgacatgtcactacctgagtactatatacgtaattcagttggaataatgtacgttgtgtgcatcatcagtctctctctatatatgctggaaataaaatgaagacaagagaccacaatgttagtatcactaccggaatcag

SEQ ID NO: 219112 - DNA, 2440 bp, Zea Mays
ccggggctgcaacgatcgatgacgcaccggaacagtgcaggtgcagcgaaagaggagcgcgccgtcgctgtcgacggccgtgccgagcgccagcagacaagcggcgacgctacaaaacaacgcgccaaccaaccgccccactgctgaccctttccaacctccaagctccctgccttctgccggccggtcggcagcggtggtagcggccaccaccccagggtatggccgcccgctccctcctcctctacgcgctgctgctcctggccctcgccaccgccgcaccgtcccacggcctcactcaagcggatgttgcgaagcgattgaaggaggtgctgtcggagaggaaccgagggcatgagatgctcgattcgtggaatggggatggggacccgtgttctccgtctacctgggaaggcttctcttgcgaacccaaggatggtgcccaggtcgtcgtcaagttgaacttttcttcgaagaaactgcaagggccgattcctgcagagattgctaacttgacggagctaaatgaaatacatctgcagtataataacttcactggatttattccggcatccttttctgctttcagacacctgctgaagctgtcggtgatttgcaaccccttgttgaacaataagcagcctgatggattttctagtggcgtaaatttcagctatggaggatgtgccacccaagagtactatagctcaccagctgaagagtaccaaagcccacctgcagttgccagtcagaaagtatatgttattggtggtgtcgccggaggatctttggcatgtactgttgcactcggatcattctttgtttgttttaacaaacgtgaacggcgttctccaaaaaaggattgctcttctacaacaaatcctgtttttcaagaatgcagcatccataacactacaaatcctgcagtacaacagttgtccctcaaagcaatccagactgcaacaagcaactacaaaactatgataggagagggtgggtttggagcagtttatcgaggtgcattagcaaatgggcaagaagttgcagtaaaagtccgctcaagttcatcgacacagggaacacttaagacttctttctgctgtgtggcatgagaatttagtcccacttatcggctattgctgtgaaaaagatcaacagatattggtctatccgttcatgtccaatggctcactacaagatcgtctttacggtgaggcatcaaaaaggaaagttcttgattggcccacaagactatctgtttgcattggtgctgctagagggctagtatatctgcacaattttgcagggcgttgtatcatacacagagatattaaatcgagcaacatacttctggatcacagcatgtgtggcaaggtagccgactttgggttttccaagtacgcaccacaggaaggtgacagcaatccatcaatggaagtgaggggaactgctggatatttggaccctgaatactattccactcaggtgttatcaaccagaagcgatgtcttcagtttcggagtagtcctgttagaaattgtgacaggaagagaacctcttgatgtcaaaaggcctcgtcatgaatggagcttagttgagtgggcaaaaccatacatcagggagtacaagatcgaggagatggtggaccctggcataaaagggcagtattgctcagaggccatgtggagagtgctcgaggtcgcatctgtgtgcaccgagcccttctcaaccttcaggccgaccatggaggacgtcctgagggagctggaggacgctctgatcatcgagaacaacgcgtccgagtacatgaggtccatcgagagcactgggactctgggctccaaccgctatctgtccatcgacaggaagatgttcgcgtcagggtcagcgcgaatcgagtcgatgaaggggaatctgcaagcaatgccctcgcttccgcggtaactagacgccgcattgtgatttcgtagcgggcgtcgtcagggtgtgatccatgctcaaggcacatctaaccacgctgaggcctgactgagcacctgagatgggcatagacatgaagggatagtctgtactctgtaccatgtacagagcccattcagtggtgagagcacagatcagcgatacctacactgggaaatgccttctgaagccaatgtgctagttttgcctgttgaatttcccaaaagcaggcgaatgtgtgggcacaaactattctttggaccattataaacacgtaaaatgtgtcgagggaatccctcaagaaatcgaatattcagatctgtaccgtcacttcattatgtgaactattgctcgcttgttgtaattgtcattcttgcctaataaaccgatcaacagatgaattttctccaaacaagtaatctagtccgtctcaaaatattagtcgttttagcccttgaattttatctatattcaaatagat

SEQ ID NO: 219113 - DNA, 579 bp, Zea Mays
atttaacctctcgccgcctcgtccagccaaggaaaagactcagatacgcacgtacgctccggcggtttcgatcgagcgaggtgggcggaaggagaaggcatggcgaggctcctggtgatgatcttgctcgctctgtttctcctcgccgtcgcgcccgctcaagcggctcgcttcacaaatcacgcagggggcttgagagcgaggatcggcgaggctccggcgctagaggctgcgcaagtttcagcagagcgaacgacacaggaggggcagatctggcggtctttgcttcgaatcgtcggtgttgacgcctctgttttcttccggatgccggtgaagaagaccggcatgggagcggccggtgaatttacctacgcttcattggagaagaccgacgtgggtttggagggaggcatcgcgcgctccgtcggtggacgagggggcgggcacggcggtgggatgggtggggtgcgggtgagatttgctggggaggctggcgcaagggggcagggctggggctgcgggtgcggggcgggggcaagcgggggcacggagctatggacaacctccttagcttcttaa

SEQ ID NO: 219114 - DNA, 2281 bp, Zea Mays
atggtcgacgatgaatatgaagatcatgcgggttcgtaccgatgggcccggagcagcgaaggacgagcgttgggtcttgatcgagtcaggtcccgtgccaagaatgcagcagctgggacggttgggtcgccggcgaacggcggcgacagctcgaagcagacatcagagtcgggcggcctgcaagatcaaggtgcatggtcgtcgaaggatggcgacggcgtatcctcgtcctcgttcgggcaaggcgaatcaggcaggcatctatttggaggtccagtaagctcgttcgaggagaagcagagagatgatgccgttcatgagaaggatgatgatgacccacgtgctggagttgctgctcttcctcccttgtcatcagacatcatgcaggaatcaggaggaggtcttgaagatctggaactgcaggtgcagaatgctattgcagcagcagcagctgcagctccacccaaggaaagcaatagtgtcagcagcaacgatcctggcagctcgtcctctgagatttttccgtctggtccaggaccagctgatcaagtccctgttcctgctacctctccagaaattgagcccctttttgcaaaccaaattcctgctgcttcttcggaggttaaggccgcccctccatttcatttggatccacctgtcgctgacgctgaggccaagcaaacagcgccgctgcgggagtggaagccgctgtgcgacctgacgtcgaaccgtcgcatcgactggtgcgagctggagggcgacgtccgcgtggtcggcggctccaacggcagcgtcaccctggtggcagcccctggcgcggacgagcgcagctttcacgaggagtcgtggagcatcaagccgtacccgcgcaaggcggacccgaacgccatgcgcagcgtgcgcgcgctggcggtgcggtcggtggccacggcgccgccggtggcctgcacggactggcacggcgtgccggcgctggtgttctcggcgcgcgggtacacggggaactacttccacgcgtacacggacgtgatcctgccgctgttcctgacggcgcggcagtacgcgggcgaggtgctgctgctggtgaccggcttccaggcgtggtgggtgggcaagtacctgccggtgttccggagcctgtccaactacgagccggtggacctggaccgggaccgggacccgcgcgtgcgctgcttccgccgcgtccaggtggggctcaccagccacgacgacttcagcatcgacccgcgccgcgcgcccaacggctactccatgctggacttcacccggttcatgcgcgccacctacgggctcccgcgcgacgccgtgccgcggcgggggcgggggcggccaaggccgcggctcctggtgatcgcgcgcgcgcgcacgcggcggttcctcaacgcggaggacatcgtgcgcggcgcgcggaaggtggggttcgaggtggtggtgtcggaggtggcgcaggaggtggcggcgttcgcggagctggtgaacacgtgcgacgcggtggtgggcgtgcacggagcggggctgaccaacatggtgttcctgcccccgggcggggtggtcatccaggtgctgccgctgggcccgctggagttcgtggccagctacttccggggcccggccagggacatggggctcagctacctcgagtaccgcatctcgccggaggagagcacgctgctggaccagtacccgcgggaccaccccgtgctcacggatcccatgagcgtccaggccaaggactgggtgtccttcatgggggtctacctcttcaagcaggacgtccgcctcgacatgaagcgattccgccctgtcctcaagaaggcactcgcgcgacttagagccaaacccaggaataacaacaacaaatgatcgatcgatgatcacatcatcgtccgtcccagtgtaattttggtacctcctgcttcctctgatctgtaggtaactcgatctttattttgaaccgagagctttcactcttctaattaatatatatagtctccgtcattgagccgatcaaggtacacgcacattttgtacaccgtctctgccacgttgccatagcagatcgttatatatatatgcacatgataggtcaactacctacatgctatacgttgtactattttatgcggcaaacttccaatataatggacctcgaaagcggagaaatatgtgcaggcacacacattattaaaagatattgtcgctctcgatgatttgcatgcattaattgccacggcaagatgactgcaaaggaacatggaat

SEQ ID NO: 219115 - DNA, 848 bp, Zea Mays
atgcggtggctcctccctctcctctcgctgacgggcctgcagagcaccgtgggcgcgctgtggttcgtgaggcagaacatgtcgagccctcggcacgccgccagcacctaccccgacgcctcaagctccaccgtcgggagctccagctcgcccccccaatgcacgggcatatacctattctctactattctatatgagcctaacgagggcgtccacaactacaccgtggccccgcccccgtcaaccacgcgcgtcatgcctccgcccacgctctcccgcgatcttcgccgccgcgtcttcaccacccaagcccgtgatctccgtcgccgtccgcacttgggtcaggtcagatctgcatttggtggcccatcctcatcctcatctgcacgcccccgcccatgctcgccacggatctccgccgccgtgtcttaaccatcctcgcccgtgatctccaccgctgtacgcacttgggtcaggtcagatctgcgtttggtggcccgtccccatcctcatactcttctgcacgcccacgcctgcttcttcatccccgcccactcctgcggtacgatgtggtggtgtgcctggacatactacttcatccctgtccacttcatcaagaggaggccactgcacttgggtagtacgatgtgctggtgtccctggatttttatttgtgtgtggtcgagctgttcccaggcccgttcaaggccatgcgtgcctatctgtgtgccgagggtaacatggaggacaccgtccgccaggctggctggcaagtcgtccccgtagcttcatctccattaaggggattgggaacaagaggaggccactgcacttgggacttcgaatag

SEQ ID NO: 219116 - DNA, 623 bp, Zea Mays
caggttataagtttgttctgttgtggatggtgctaagtgccggtgggctcggccttcttatataagatatccctaccacgactccaaggaagacgaggactacgcgcgtgacggagagcgaggacgactgcaaagcctctcaacgtgctgccaggtccagtggagttcagagtcaagttcagtcatctacctctgttaaactatctggatttcacaagagagttatagccaattcaagctacgcagagattcctgtactgctggacacataggatgcttggaaacctcggaccacaacaccgttcatttcaacccagatcatcacactacataccacttgaagactattcgacgttcgttgattcaaattccaaggcgtcgtttcatcgacagatttcttgagaacagacgggcacatttcgcaactgtgatatcggattgagacatgtgttctagcttgttatagtagatactttgttagttatgtattagatgaaacttaggaataatgatttgtgctctatttgtattagtcgtgtgtctggtcttaatggtgactgctttgtataaaactatgtgacatctctgtgagctaataaataagttcaccatcattagttttc

SEQ ID NO: 219117 - DNA, 980 bp, Zea Mays
atgggatgtgctgcttccaggttagaagatgaggaggctatcaagatgtgccgggacagaagggacttgatgaagcaggcactggagcagcacaaccgatttgcatcttcaccgtgggacttcttctggaacccattctcatcactggacagctttacatatccccgccctcggagtagctatgacaatgtggtcactgatgatgaactcgtgaggttacaacggcaagaaacaaagggatttgaatccaaaggtattcagtgtactgaagcaccagaaccttgcgagacagtagaacttgagataaaggcacacaagaaagagttgatgagaaacagagtagcaaatgcagaagaaactcctggtttcacagtatatctgaatcgaaggccagcaagcttggttgaggccatgaaggatatcgactgtcagttctcggggatatgtgacgctgctcggaaaatctcagtaatgttggagcgaagatgctgaacccagttgcatttttgcgttctgcgtcatcccgttcatcatcatctcgtttccttcttgctccctctagctcaatagatgatctctttgacaatgagactagcagctgctactctgaagaatcttgcagtaccatgtctggaagtcaccactctaccttggatagactctatacatgggagaagaaattatacaaagaagtaaaggcaggtgagcggttaagaatcgagtatgagaagaggctgacacatttgaggaaccaagatgtgaaaggcgaagaacctacctctgttgataagatttgtgcagcattgagaagcttgcatactcggctgaaggtgtcaatacacacagttcagtcggtatcaaggaggattgaaattctaagggatgaggagctgcatcctcagcttatggagttgattctggacacggagacgatcagcaagcacgacgtgatcagggattttccttcgcatctcctgtag

SEQ ID NO: 219118 - DNA, 2242 bp, Zea Mays
gtctatctcaccgtctctcacacgctctcatcccctccacgccgccgccacccgacccgcgccgccggaccgcgtcgacgctccctcgccgctggggttaaggcgatcatcgatcgatcgagtttctgtgcacaatcgtggcgctgctgtacttcaccttcggcgaggtggacctctgccacatctcgctcccgtccttacccgtctccggctcgtcccccttccgcgcggctgccgtggcggcgcccttcgtggagcggcgcggggcttctttctattatctagcatgccctccgccacatcgagtttcagtgaagatttgttctcaagttgatctgtgcaatccagaccaacgctggaaaggcggtgcagtgtctttacacactcgctcaactcggacggcttgtactgcgtgtagtgagcaagcgtggagttctacttccagatgtaacgagtgtcgtcagccaccaagacagcatcattctcatcaggcaacaactgctacacaaagaagatatgatgccaacctacccaaggatacttcgttggctggagtacaaatctcgccaagaaaatagctgaggcagcgattagtgatggagagtaagacagaagactgtactccagcagggatagctcagcgatgtaattggccaggaactccagatgcagagcaggatcctgtacaaacaaagagtaggggcattatcacagaatccctgcctgccacatatacatgtaattcctggcagcagtacctcatcacacgcctgcatccgtgtccaagactccaactatcatacgcctgcatcctgtacaaaaaaattgttggatacttgaatacttgaatccaagctgccaagttggatacttgaatccaagctgtattcttacacctgcaaaagactccaactatcattcttgtgtcaaaaaaattgttgaaccggacacccatgtccacatccaagcagcactggtttagcatccttgtcctctacaactccatttggacaacattcatttatgggatgatggttcgtttcattatgatcaagatttatttaacagcaaaattacagtatattgaatgaagttgatatcaagcggcgccaagaggatgacataaatagggtttcaactgttctttcaatttccaaaccagaggcatgtgtcttctccgcaactataactggagtgttagtaaggtgcatgacgaatggtttgctgatgaagagcgtgttcggaaggtggttggtttaccagagaagcatattgaaatgccaaatgacagagaagtattcccatgcttcattagtttcacttgttcttccagttgcctaagcatgtttgctctagagatagaatcacagctcctaattcgaatctataatcctagtatataagttataagttgtggtgatctgctggagatgaatacagtattatcatcctcaaacttgtttctttcaatatcctcaccccacttataggatgggtattggatgatggaaaaaagcccgtctgtatagtacatcagtaccacagtgcataaaatatagacacatgtattgcatttgtagacctgtagtcactcatattatttgacccatgcgtatttttagtggacaatcattaaattagcaacaatctatgtctggacaatcattcgtttatttcagaatatgcaccagggctatcccaaagaaacactggtgcatttccttaaggctagagagtggaatgtagcaaaggctcataaaatgattgtagaatgtttgaattggaggattcaaaatgaaattgatagtgtgctggagaggcctatagccccagtagatttatacagatcaatatgtgattcacaacttattggcctgtcaggatacacaaaggaggattccggctctcatcaagtgactccccctcacgttgactttgcggatgtctcaattctagtggtggagctacgaacaacaatccgatgtcctgatcgagagcgatggagttaatgtttgaacttgtgtgtttgaacttgtgaactaaaaatgtgaactatgtatgtgaacttgtgtgaatttgtgaacttatgtatttggacttatgtgaatttgtgaacttatatatttggacttgtgtgagtttgtgatatgaacatatatcaatgtgtttgaaatctgtattgtatgtgatatattgtgttgcatgtgatattatgtgtctaatttttcatttttgtattttt

SEQ ID NO: 219119 - DNA, 1353 bp, Zea Mays
ggaagacatatattagtactaacggaccaacgctggaaaggcggtgcagtgtctttacacactcgctcaactcggacggcttgtactgcgtgtagtgagcaagcgtggagttctacttccagatgtaacgagtgtcgtcagccaccaagacagcatcattctcatcaggcaacaactgctacacaaagaagatatgatgccaacctacccaaggatacttcgttggctggagtacaaatctcgccaagaaaatagctgaggcagcgattagtgatggagagtaagacagaagactgtactccagcagggatagctcagcgatgtaattggccaggaactccagatgcagagcaggatcctgtacaaacaaagagtaggggcattatcacagaatccctgcctgccacatatacatgtaattcctggcagcagtacctcatcacacgcctgcatccgtgtccaagactccaactatcatacgcctgcatcctgtacaaaaaaattgttggatacttgaatacttgaatccaagctgccaagttggatacttgaatccaagctgtattcttacacctgcaaaagactccaactatcattcttgtgtcaaaaaaattgttgaaccggacacccatgtccacatccaagcagcactggtttagcatccttgtcctctacaactccatttggacaacattcatttatgggatgatggttcgtttcattatgatcaagatttatttaacagcaaaattacagtatattgaatgaagttgatatcaagcggcgccaagaggatgacataaatagggtttcaactgttctttcaatttccaaaccagaggcatgtgtcttctccgcaactataactggagtgttagtaaggtgcatgacgaatggtttgctgatgaagagcgtgttcggaaggtggttggtttaccagagaagcatattgaaatgccaaatgacagagaaaatatgcaccagggctatcccaaagaaacactggtgcatttccttaaggctagagagtggaatgtagcaaaggctcataaaatgattgtagaatgtttgaattggaggattcaaaatgaaattgatagtgtgctggagaggcctatagccccagtagatttatacagatcaatatgtgattcacaacttattggcctgtcaggatacacaaaggagggtctcccaatttttggcattggtgttgggcatagcacatatgacaaagcttcggtaattactctgatgcttgctatttgtttggtaggctacaactacagccaaaatcataaaagtgtctggtttgaagctatcagcactaagccaaataaaggtacatgctat

SEQ ID NO: 219120 - DNA, 2283 bp, Zea Mays
cttcagcatcaacgcctccgctgccgtcgctccggactcaccgctaggtttttcctcctgccgccgcctcccagaccgtctcctccgccccagccgggatgccgacggtgagcgtcggccgggatcgtctcttggctgccattggtcgaacctacacacaggaggagttcgaggcgctctgcttcgagttcggcatcgagctggacgatgtgacgacggagaaggctattatcaggaaggagaagcacctcgaggacgacagtgaggtggacgaagatgacgaggtcatctacaagatagaggttgccgccaacagatatgatttgctatgtcttgaaggactagcaagagctcttcgtgttttcactgggactgaagcaagccctgtattccaagtttcatcaatccctcggggttcaatgcttcagatgcatgttaaaccagagacttcaaaaattagaccgtacatagtttgtgctgtcctaagaggggtaacttttgatgaagcaagatacaacagcttcattgatcttcaagacaaactccaccaaaatatctgccggaagaggacactcgttgctattggcacccatgatctggacactctgcaaggacccttctcatatgaggctctaccaccgaatgaaatcaattttgtcccattaaagcaggagaaaagcttcagagccgataaactgatggaattctataaatcagacatgaaactgaagaaattcttgcatataattgagaattctccagtgtacccagttatctatgatagcaacaggactgtattatcattacctcctatcattaatggcgcacattcagctatcacccttgcaacaaggaatgtctttattgaatgtacagctactgaccttaccaaagcaaatatagttctgaatacaatggttaccatgttctctgaatattgtgagactaaatttgaagtggaacctgttgaagtgatacatcatgatggaaggaaaacagtttaccctgatctttcatgttacaaaatggatgttttgttatctgacattcttgggcctattggcatctcccaggacgagaaacaggttgtctgtcttttgaataaaatgcaactgcaagctgaaagtcactccttgaaaggggaggctcgcatttcagtgtctgttcctccaacaagaagtgatattctgcatgcccgtgatttgtcagaggacgttgctattgcttatggattcaacaatgtgccaaaatcaaagccgaagtgtatgacaataggaggaaggcaaccattaaacagattctcagataaaattcgtgctgaggttgcaagagctggttatatggaggtgctcacatttatcttgtcttcacacgaagagaactttgacatgttaaacaggacagatgacaaaagtaaagcagtcattattgcaaaccctcgcacttctgaattcgagatttttgaagttggtgatgttgtgatgctggactcgtcacgtgatgttggtgcctctaataatcgcaggcttgcagctttgtactgcaatagggtttctggatttgaggaaattatgggattggtggatagtattgtcaaagttgtcagagctccacatgttaactttggcgagaattactatgtacctacagatgaacctgagttcttcccgaaaagacaatgtaaaattgtgacaagtgatggcaagcaagttggctacttaggaattgtccatgctgaggtcctaaggaaatttggcattccggatccctgcactttcgttgagatggacctcgaagcactgttgtaatgcagtcaacctgaaacaaaggaatgcttgaagctgatacctcatacctgccacatattggttttgttcgtaagcatggtggggtaccagcaagaagtgcatattacccaagctgcagtatctcgatgtacttctcaattgcattggattttgctgtgggaaaaaagggtacaacgatacagcaaatacccagcctaatttttgtgttagggattatgtttgcattgtaagggcttattcctatccaactttctatgaaaagtgtaccgtacatccttttgtaaaccatcgcgcgtccaaaagttatttctcaactcttgtcacctccacatgaggtcaccatgatgtaaagcaggttcagaatattagacctctaatatctccttgtgtttgtgaatggcattaaaatttgacattaaggattgtttggtttataaagactaattttagtccttttattttatttcattttagt

SEQ ID NO: 219121 - DNA, 702 bp, Zea Mays
cagcaactatgcatcttcccccacgcccaacagctcgcgcggaacctccggagctaaggccatccgatccacccctcgtccaaccgctcggacccacctgtactgcatatattgtgctcctggactctcgtgtgtccaactcaaacccccctgaaaacctaattctgccgcagatgggattgaggaaggagagaaggagccactgccggggaaatcttcgattgggctattgttcacgccgtcagcggtaccggggcctttcctcaggtgtgaggaaggacggtcatggctgcgctactcaggattgggcgctggcacaccacaatttctcgccgtgaacaagcttcgccgcagctccgctgtacaccgtgaccagcaccatcgaatcaccaatacctggcgaagagtaggtggtccaagaggagccgccctataatgaagagtacgagttgatctatgtggtgtctcccagtcagctttgtggcaccaaggaataatacttagttcgcttcattgttatcatttatttttgtaagacttccgctatgtaataataatatttatgttatttgtgacatttatctctatacactttgtcattatatgtgatgttcttcgtcggcgcatatatgagacgcacccgactttatctcttaaatccaggtgtgacatttactatgtagtaacacatatcaattaaac

SEQ ID NO: 219122 - DNA, 1027 bp, Zea Mays
atatctttttcgcagatattgttcacaattccgctcatcaccagatgcgtcgggagacttctaggctgtctttacattctatatattaaagcggggaggattcctgcaaagctacgatgtccacgtcaacttataaaacgtcagccgttcgatggtgcctcaacgacaagggaagcacaacactgaagggactcaaagcgcagcgaccagaatatctttttcgcagatattgttcacaattccgctcatcaccagatgcgtcgggagacttctaggctgtctttacatacgaatggactctagcgaacagaagtgcctgtgagcattgtcgtttctccaaaaaggatgacaccttcaatgttcgcgacaatccaacagcgacggcgaggaacctttggccctccggaaaggacccggagtctgaagttgtttaggtcgggtttggatctcctctgtcttcctcggttggctttttcctgtatcatatttatcaagtctttacattttagtatcctttgtttccgatttcccaaaggtgcgtagatcctaccccactactttttaattcaaaattcgtatttttttggttattagcgcttccatggcgactgttttcctctaaacccctgcttttccagaagcaatcaggcctgccttccttttccactgcctcatcggattaaagtttttttgagctacaggctacagccatgtacatgaaacgaaaatcctgctgagctgaattaaaaaaaatgttattaatgtatctatgaatctgaaaaccctaatgaatttgtagtattctgtttgatcgtctacgcatatttattggctttagcagatagcgatgtacattattatactcttccccgtagatacaaattgtactgattttatctacgtatatacatatagcttcagtttaaggttattaattttatgctccatactttacgccactgcctcattcgactaatgattgtttgcgcaaccaggaaaacactgctgaatctatttctatcttttg

SEQ ID NO: 219123 - DNA, 974 bp, Zea Mays
ttataaaacgtcagccgttcgatggtgcctcaacgacaagggaagcacaacactgaagggactcaaagcgcagcgaccagaatatctttttcgcagatattgttcacaattccgctcatcaccagatgcgtcgggagacttctaggctgtctttacatacgaatggactctagcgaacagaagtgcctgtgagcattgtcgtttctccaaaaaggatgacaccttcaatgttcgcgacaatccaacagcgacggcgaggaacctttggccctcccatggcttgcatcagtttccgttgtgatagaagcggaatccgagcttcttttttgtgattcccatgattgggagttgggaaaggacccggagtctgaagttgtttaggtcgggtttggatctcctctgtcttcctcggttggctttttcctgtatcatatttatcaagtctttacattttagtatcctttgtttccgatttcccaaaggtgcgtagatcctaccccactactttttaattcaaaattcgtatttttttggttattagcgcttccatggcgactgttttcctctaaacccctgcttttccagaagcaatcaggcctgccttccttttccactgcctcatcggattaaagtttttttgagctacaggctacagccatgtacatgaaacgaaaatcctgctgagctgaattaaaaaaaatgttattaatgtatctatgaatctgaaaaccctaatgaatttgtagtattctgtttgatcgtctacgcatatttattggctttagcagatagcgatgtacattattatactcttccccgtagatacaaattgtactgattttatctacgtatatacatatagcttcagtttaaggttattaattttatgctccatactttacgccactgcctcattcgactaatgattgtttgcgcaaccaggaaaacactgctgaatctatttctatcttttg

SEQ ID NO: 219124 - DNA, 2746 bp, Zea Mays
aggccggccaccacctccccacacgtttccctcagaccgagcaaagacgaaaatggcggcggcggttcctctcccctgaccagagccagggcgtgccactgccatgtcgccactgacaaaggcggcgtcggcggcggcggcggcggagtttctcatctcttccggattggatacagggcgtgccatgcctgcgtctcagatctcacgattggcatgcgccctgacttctcgctcttcgtatctccccctccctctcccggcccgtgctagcgtcggaggaattgtattgtcgtagatctgttgctccataaatgccttccctatctgtggccgagcgcaaccaagaaacgaggtatggccggagggagaggtagggctggtcggctggacctggtcggctggacgttgccggactggacttttccctgttggagagggggtagcgaggagggctgccgcaccgacgcgagcacgaggacgccgcggagggccgcgacccgaggccactggcgaggacggactgcagagcgctcgcagcggacgacccacgagcagagaagcgagctgcttacgaagctagatagaggatttggaacggcggcggccggcggacaagcgggctgaaggagtgcggcttgtgggtgactcggcaaggctacgagcttcatcgaacaagaagacacgcgggtcaaggtatcacgccataccggatgctccaccgctgttccctatccacatcatctgccgcatccatctcatctcgaaaaaacttcgcatgcatctgtttcctgtgccatcccttatgataaccttcgcatctccttcgtgtggcatataggcaatcgacaggattgagaaggtaatgctccttccattatgttattgaaccatgtatgctgttaaatgttactagccaccataagtagagtaagattacttatattcttttagaaacggtaataccacttctgagcggtgccttccatgctgaacgatgccatccagacgtgtactgatcggccggagtggaagaacaactcacatttgtgcagccagcccaagggatcttcagtgccgtcatattttgggaatccaagcttctgcgctcctggagggggtgggccgtgcctgaagtcagcgccattggaggttttggaggaatcgctgaaggtctgtttcttgtctgctaacacctgggattgtagacggttcacagtgacagagatgcggccttgttctgcttgtggtgtattcacggtgtcgttgagagcgcaattgtactgtccaaggggctctgggtgatgacgggatcctctcctggcgctgagtcgttcatcgtgagaacaggccgaccggcggcagcagaagagaagatcaggcggaaggattgtctagtccaataccaaatgataggcacagggttacgagcagatttggtttggtaggtttcgagatgaagacgagggcaaggtctagcagtgccaactctaggtgtgctgctgcttacactgcgcggtggtggagctggtcatgttggcggccgtgcaatgcaagtgcccgccacgcccgcgtccaggaaggagacagggttttgacaggaaaggaagatgttcgtgcaataacaaaggaagctcgatctgtggtagaaccacacactaacaaaataaaaagggtaactatgtatcattgtattaagaagatgaaaggggtaaagagccttggaaggatcttgctgagtacatatgtgatgggtccgttggctttagaggttttcctattttaaagcacaacacagggacctagagagcagattcattaatgcttggtcaaaaaagccctaagaattgtgaacgttgagcgcaccacaggctgtgagaattcatcgcggccaatgatgaataatactctccttcagcgccacaggcgctgcaggtcgggccagcactacgggccgaggctacaggccaagcacatcatggcgttcttggctcttgcaagcattaggtcgtttatgagaccacactgggtagccttcattagcgaagttgaggcggaggctgtgaaaattgttaggaagtatttggcaaagactgagatgacgaagagcttggagacccacgatggctatattcttatgaaccgagtcttcaaaatgaatgagatggaatactggccatatcccaaggatgcagaggaaggggaagaagattgtttagttgttactgtgaatggtaaggaggttgcggactgttgcgatgataggggcagtttgaaacgaaaaacactatctactggaggtggtgtagaggaaaaagcgaagggatcaaaatctccagatgaaatggagactgcacgtgagtacatttctggtttgagtgccgcggcgactgattttgctgaggaactagcggagactacgggtgaagttacatcgcctgagtctctactggtggcgcatgcgaggtcagccacagtttctgagggtaaatatatttctgatgctactggcgaggacttcgaacaaaataggctagctaaatctctcgatattttccttatggggatgagccttgtggccaaaccacacagcgagccccccaaggtggttgttggtgtggtggaggatccatgggcgatattttgctcgattgttgaaattggtggagacccggggtctgctgcatcaagtgcagttgctggcacgactgtcatgacactgcgaagggttgcagaagatgcacgatga

SEQ ID NO: 219125 - DNA, 2162 bp, Zea Mays
gttgtttcgtcttcacttctgaatcattttgtttagtattagtcaattctgtttcttacttatgaatcaaatacttgttaactctaaaaaaatggatgccttctgaatctcttatgagttaaatacttaaatggtctcattgcttcctctttttttgtcagaataatataatttaccttagtgccactaaaactggtttcttaaactttaaatctttctgcacagtgactgtaccaatatttttttttctaaatactaattccgttatgaaatattttaaaaggaaaaccagctaccttttgctaatcagtcaagggtaagtttttcccgaaacaagattttggtctccagaattgaaatatggcttttgtttcttgggtgactaccttttttttaaaaaaaaacaggaatatactctataataaatactaccacctgacacggagcttgatcctcgtgtgagctttccttgtgtagggcttcaagagctttccttgtgtagggcttcaacgagaatctctactaagtctgcaagggtagcataccattctttgttctgcatgtcattccttgttctgccatccctattctgcgattcagattcccattcctattccctgttatgcgattcccattctcgtttgtgcggcgtccgctgctccctcctcccttcaccacgcgacgcagcgacacgacgactgttctctcctccctcactcgccctctcctcccttccccatggcgtcttcgcgtctccgatcgatccaagccaccatggattttttcaaatccatcctcgccgagctcgatccgccacagatttctccgatcgatctgaaccgtagcctccccacaggtggagcaggagccagaacttgtcaaattcacctcctccagcggcgacgggtggggcttcgatgacctgctgaagacgctaacccgatcgatgtcctgtatagccgcttcgaggcgcagatgcgcacgctccaggcagatctggccacattcacatccgaccctgaggatgtcgactctgcatcgtcgctgaggacaggtcactactcgatcgtcgtaggtcggcggaggcaggggaggagacacaacgcacacacgccggtggcagggccgacccccacacgccgggtctaacccgatcctcgtcgtctgtggttacttcagtgtcatcacggccaccaccgtgcttctctgtgttgccgtcaacgtcgtctccgccacccagtccttccacgctggctatgacgtgcgtggaacgccccgcttgccctgttccattccagtgcaactttccctctcctggatccggctggttcggggaggtgcctcatagagcccccgcttgatctgtggtcgggatcggattagccgctatgcatctcatggtgtatgctgttgaagcctgtgaaattgttgtccacgtaatatgtcattcgatgtagttttcttttcagttcaagttgctcaggcacacgttcattttggagtcatatgggagcaaatagaacccacattcctaccattgactccagtacagtgtgctgtcgtggggtgaataaaagcagctaaacagacaatgttttgtaagatctaagttgtatcgtttgtattctgatgagaagaagaaaaaggcttgcacacctgacaacagatgaagttaggttacctcagaagtcatcaacctgtgcatcagggtttcttatatgtctgctgctgattacagtcaccttctcgtaggtttctactcagctaggcagatacgttatcactatgatgagcagtggtgttgtacttggggttggatttcatctgtcatgttagccatatacttatgcctctcgtttcatttcacttttggtataacctgaaattgcaatctaattaaataggctattgtttatccccatttaagtggagacagtcaaatgaacaaactaatttggtacagctagcttggtgggggtgattatcggcacaatgataggtgcaaacagtgtcctagaggaacactgcaaagctagactagacctcacaatattgtcataactagaaggtaatttgtaaacattgatgttgtgtgtcatatctcctaactatatatgtgttgttttctgaatccagactagattgtttgtgtaatagcctgg

SEQ ID NO: 219126 - DNA, 5537 bp, Zea Mays
cgcacaacctctcgcccacgtgaaagttgcgtgacgtcgattccaaaaggatcacaatttcgatgccacctcgatctcacatatttattttgtgaaatgtcgagtcttgtgtctgtttaaaattcatggattaagcgaatacgaatttggaattcaaccatttcacaaaagctcaagttcggtgtagtattcatctccataatttaaacaattaaaaaggtttcatgaactttggggttacctaatctcatttgctggtgaaatttgtgttgttcaaattacgcgtgcaaatgaatatgaaaatcagaaaatgtcggatttaatgtaaaatttggagcccacatgttgtccgagaaaaacaacgcgccagctcagtaatcgaattattctttagtcaaatgaccgatggcagatgagactcataaaaatttgactggattaaagatagtctaaactaccaaagtcgatctcgtttgattcggtccgtatgtttctcatcagttctaaatctttggatataaataactggtaaaagtttatctgactccggagtattccctagatcaaatcttgttcaaatattgccgtcgatcttgttttagtctgacccatttatacatccgtcaaaccctgattttttttagaaccgggaaatgtatttaatcttttccaaaaaaagagagaagtggaaaaatccattttttcttatcttccacacgtccctttcttctagtatcttcataccaccgcagcccaggctctcagccttatccccttcgtacaacactatcaccaggaattcccttgcctttgctcgttctcatggccgagcacaagtcttcctcaagcgtcgcctgctgtaccagtgtcgagctccccacgctcgccgctactcctagcccctctcctccctggatttggcccagtctccatctctctttccagccatggacggcgacctctcctgcctacagcagggcgccgggatgctgcttcctatacatcgtgcgcctccctggtgcttgctctcgccctagtccatggagcagcagcagccacgacactccttcgtgtcgcgccctcgacgtgttcgatgaaatactgcagcgagctccaactcgatctgcacagcccctgcgcgacgtcacaaactccgctcgttgtcgatgtcgtgcttcgggcatcgagtgttcgacgaaaatcccaagtccatggacagcacatacacaactcaaatccgatcggccaggtacgttaattgctcacgtgctgtagaggacgagagttggattaatctcagagtaatgctgatggatgaacctaaggatgggtgatctgatcgagtgccaggatattgaagctcacccaccggacgtctctaacaacactaacgtagtgttatcccaggcaagccccggtgcatttgccacctccttgttgttataaaacttttatcacttatatgttgcattaggtgataggagttgagtgatgaaacaactgatgcattaccattccttggaatttgattactattccttgattcctgtttataaaagagaactaaagatgcttagccctgcttagataattaaaagttgttctttttaaaaagatgacgtgttacacgggatatgggaaattgtcgtgaaaaagaaattgggatggtgaatccatatggccatgatggattcaacatccagaaaaagtacctctgtcaggtaccaaagattgggaaatggtttaaataaaatgagaccagacgttgagcaggaaaggtcgcccatctgtgtcgcttaaggaccgttccgattgttggcctgctgatctaggaccctttaactggccacatgcctcgtcatgggtaagcttagcctcggtcggaccaataccagaaaggccggcccgcaatgggagtggagagatggcgagagtatcgtgtatccacctggcaagaggctggatggtggggtactgagctctcggttggcggggacccgttctggtcttgagaaaatcgtgggcgagttgacatatgcaagggttaagtgctacatatgtcgtgtggttggagatccccagctgggtattaatcgattcggatcgccgaacttctcggatatgaagactggatcttcgaccttcagcgtagataacaagtgaaactaaagatgctaaaataaagctagtataggacaagtgaatgctctagattaggcaaatctagattcaggaaaagtacttaatttgtgaagtaaaattttggcataaggatccactactagtaagctcttctgcaaaatgagtctttgaaatttgataagctttaccttgattcccaataaaccagcatacccttgagagtcttttctttagtcgggtaagtcttgctgagtaattgcgtactcagggttttattccctgttgtttttcaggttataagtttgttctgttgtggatggtgctaagtgccggtgggctcggccttcttatataagtatatcccatctttagcttctttattgaggactgtcacttaagctagcatgtattttaaaacttataaatgttttatacattcaaattgtaatgtttttgaatcaaattctcttataatcactccgatgatatattgtaatatggttataacttgtaaatgttgtaacttgtaatcattttgtaataaagaatttatttccgctgcaagtgtttgtatgtgagttgtatttacttaatcctgcgatcttggcggtaagtcgtttatccggggtcctcgtggcactcggacagatcctgttaagttgtttggtgcacacgcatagctgtctgaggtctttgagacaaggacaattgcatgtgggcccgataacttgggaggttctgcgacagctggtatcggagctgaattaagtataatatgatcacatacatatttttaaaacaaagttttggtttcgaaaaaaaaaaattattttcaactaaacacattgtttggttttgaaaaacagatttgaaaaactataatgctagcgacatcctctgttaatataagccctaaattaaggactatcaggtggcttagatcaaaatactaacccacaatctgggaagggtaatgcatacatgtgtaatgttatttttgaggccattcaattttgaatggatcgacgctcaaggtaaggtgagatgtgagagcgtgactggacaaacgtcggtctaggggagagtttaataaaagcgcttgattatatacatgttttacatatgtatatatgaaggctgcgatgtggagtatttacttttctgggaatattgaaaagtgtaatgtaccataatgagctgccctatggttaaagtgtggcagcggcgcctatgcgtggctcggcgcttaatgaggagctggcctccatatagaaatatatggagtataaactaagataaactgtcatgtgtgaattgcatcattgggaactgggctgtgatgtaattttctgcaggtacactaacttcgaactcgtatgtgtagctgacgactagcaacatatcgagagagaacgtagatatgccaccgatatagaacgctattgccaccttatgttggcgaaatttgtgaggacgaataggacgagcatgtatcctaattgttgcattgtgtttgttgtttgcgcacaaaaatgcttccctcacctttattctaataattggtggttgtaaacgaatatgcttttctcatctttattccgataataaataattggaaaatgtttgaagcatgattgtcctataagcaaatttctagttttgtttgttgtgtcctttagacatgtatttatgaggcatgtggttcttcgtcaattgaccgctagtgcaacttgggtttgttttcgtgcttgtgtgcgggtagaatgtaggtagtttgtttgcataaacccaaagctaggtcatgtcctcatttagtgaaccataacccaaatcgtcatcaatcctccaaaaatttatccaaatctccaagaagggatgaattcgagtttctcgttactactccatgaccgcttagataagctttttattggatgtaaaatgcacgcagacttaaaataaggatctcaagtacatgttctcgtcgtttaatacgtgactcttttgtagtcatttttccatccaaaatcatgcctttgctcgcttggtgcaagctgatgtttctattccactctgtatcttcttggggaccatgtcgttattttatcaacctaacccgggaaagccatgtccaatcattttcttgaactggatgtctttgggttcctcatatctcttgaaggcataccaatttaatcttctgatcatttttcctctgaacctaatcagacactaatccttgactttgtaatctctgcgatgggcatagaaatatgcttggggctgaagtaagagtctcccatcgtactcattcattaataagtttaggttatggccatctcttgttcatttcatcggccatgatctatttggctctctgtttgtaatccttcttaaaggtggagtctcttttgtatcttgtcatccttgcttggtctatgtgtgccgcataaggtttttcattggttgagcttggtaatggcgttatgactaaaactgacggtgccacgacgaaaccgagggcctcctgtgggtatacacacatggttgtgttgctcggtacgcgctggtatcacggttagtagttgtaatccattaggaagctatatcaatgtgttatctaggcacaatctttttacgctatgtgagattcattattggtgccagttcggtgatggtgtcatgaataaggacttatggtgccgcagcgaaactgagagccccttgtgaatgtacacgcaaggttatgctgcttggcgcatgctggtatcgaggtatctagtcatgatccattatggaactacattaatatattatctttcgtggacttttcccttgaaacgatttttatgttctttgctgaaacaatcaaacaacatatgccatcactattggatcaaaataatatataactctaatgtattccttgagtaaagttcttaccaattctgaagtcttcgtaaaaaaatcaaaacctatctgtatctagtcgtgtggtaaaatcacccttttcatgtggggactcctttctcttgatctcagtggcaactgcacacatggaaccttatgtgttcttttgtcagttatagcttgtttgttgacatctctagttaaactaaagtggtatgtgctatacccactagagaagcaacattttgagatgcttgtctttgcttggaattagcttatgctatcactattatggacagggttatacgcttctctactcttagaagtctttcgttctgaatctcgggacgagattcttttaagggggaaggttgtaacaccccaggtgtttatcgtctactcgaccacgagtgcggacgataacacgtgatagctgtgaatgtaaaggtcactaaattttaatcatcctcgtttatcacgattttgat

SEQ ID NO: 219127 - DNA, 947 bp, Zea Mays
aggctctcagccttatccccttcgtacaacactatcaccaggaattcccttgcctttgctcgttctcatggccgagcacaagtcttcctcaagcgtcgcctgctgtaccagtgtcgagctccccacgctcgccgctactcctagcccctctcctccctggatttggcccagtctccatctctctttccagccatggacggcgacctctcctgcctacagcaggtcagcgccccatctcctcaacatctcggctccctgtcccatctctctctcacgagccactcttctcgttctccatggcgtcgacatggggctcgcccctgcaacctcgcctcgctgggtctcctcagggcgccgggatgctgcttcctatacatcgtgcgcctccctggtgcttgctctcgccctagtccatggagcagcagcagccacgacactccttcgtgtcgcgccctcgacgtgttcgatgaaatactgcagcgagctccaactcgatctgcacagcccctgcgcgacgtcacaaactccgctcgttgtcgatgtcgtgcttcgggcatcgagtgttcgacgaaaatcccaagtccatggacagcacatacacaactcaaatccgatcggccaggtacgttaattgctcacgtgctgtagaggacgagagttggattaatctcagagtaatgctgatggatgaacctaaggatgggtgatctgatcgagtgccaggatattgaagctcacccaccggacgtctctaacaacactaacgtagtgttatcccaggcaagccccggtgcatttgccacctccttgttgttataaaacttttatcacttatatgttgcattaggtgataggagttgagtgatgaaacaactgatgcattaccattccttggaatttgattactattccttgattcctgtttataaaagagaactaaagatgct

SEQ ID NO: 219128 - DNA, 1221 bp, Zea Mays
cggtccgtatgtttctcatcagttctaaatctttggatataaataactggtaaaagtttatctgactccggagtattccctagatcaaatcttgttcaaatattgccgtcgatcttgttttagtctgacccatttatacatccgtcaaaccctgattttttttagaaccgggaaatgtatttatcttttccaaaaaagagagaagtggaaaaatccattttttcttatcttccacacgtccctttcttctagtatcttcataccaccgcagcccaggctctcagccttatccccttcgtacaacactatcaccaggaattcccttgcctttgctcgttctcatggccgagcacaagtcttcctcaagcgtcgcctgctgtaccagtgtcgagctccccacgctcgccgctactcctagcccctctcctccctggatttggcccagtctccatctctctttccagccatggacggcgacctctcctgcctacagcaggtcagcgccccatctcctcaacatctcggctccctgtcccatctctctctcacgagccactcttctcgttctccatggcgtcgacatggggctcgcccctgcaacctcgcctcgctgggtctcctcagggcgccgggatgctgcttcctatacatcgtgcgcctccctggtgcttgctctcgccctagtccatggagcagcagcagccacgacactccttcgtgtcgcgccctcgacgtgttcgatgaaatactgcagcgagctccaactcgatctgcacagcccctgcgcgacgtcacaaactccgctcgttgtcgatgtcgtgcttcgggcatcgagtgttcgacgaaaatcccaagtccatggacagcacatacacaactcaaatccgatcggccaggtacgttaattgctcacgtgctgtagaggacgagagttggattaatctcagagtaatgctgatggatgaacctaaggatgggtgatctgatcgagtgccaggatattgaagctcacccaccggacgtctctaacaacactaacgtagtgttatcccaggcaagccccggtgcatttgccacctccttgttgttataaaacttttatcacttatatgttgcattaggtgataggagttgagtgatgaaacaactgatgcattaccattccttggaatttgattactattccttgattcctgtttataaaagagaactaaagatgct

SEQ ID NO: 219129 - DNA, 1696 bp, Zea Mays
tagatccgctcccctgcaggccacgccttctcgccgctcgcggaaccaccgccgccacctcaccactccagctccagcccccgcccgccataatcgcgtccccttctcgtccttccagagcttcttaaaccacccggcccgctcccagcgtcccttctccgcccacagccagcggcgaactcgatcgagcaggatggggtttatcggcgcgcacggcgtggagacgctgaagcggtataggtacagtggagaggaccgctcggtggtggccaagtacgtgctgcagcccttctggagccgatgcgtcactctcttcccgctctggatgccgtgggtccatcttgcccatggattacttctcttcttgtaccagacttttgatgctgttgatggtaaacaagcaaggcgtactagctcatcgagtcctcttggagaactttttgatcatggatgtgatgcacttgcgtgtgcttttgaagcattggcccttggaagcaccttgatgtgtggaggatggacactttgtttctgggtagttgccgctgtcccgttctatcttgcaacctgggaacacttctttacaaatacgctcattctgcctacaataaatggaccaacggagggcctgatgctgatctatgtatcacatttgtttacattttttactggcgctgaatggtgggcacaggattttcggaaatcactaccctttttcggttggattccacttccatttctttctgaaattgaaattcctttatatgttcttgtgctgattcttatgatcgtatgtgctgttatacctactgttagatccaatgtcagcaatgtccaagaggtagttgaggcacgaaaaggaagcatggcattagcattagccatgatccttccttttattgtactgttagctggagttgctatctggtgctatctttctccttcaagtataatgaggaaccagccacatttgctcgtgattggaactggctttaattttggatatttggtgggaagaatgatacttgctcatttgtgtgatgaacccaaaggtctaaaatctgggatgttcatgtctctggtgtttctttgttttccaattgcaaatgctctcattgcaaagatcaacgatgggagtcctttagttgatgagcttgttctgctgctgctttattgtgcatatacagtgggtctctacctgcacctcgctgtgtcggttgtgcatgaaatcaaggatgcccttggaatctattgcttcaggataactagaaaggaggcttgaactttgtagtgaagatatattattattacttcacaagtgctagcgaggagcaacacagttcgtcaccgtgcacgctgggagtgtgtgtgcccctctgaaatgccacagccatctgtttgttgagcagagggatctagggattgtattgcgcagttatcttggtcatataacaatatagcagtgtgatgtacactgtagtagggtcgttagaagatatactgtgaaaaacttgcttggagaaagtgatcgtagcatgtgattatcttggttattgtctacaccctccgtttttttttaaaaaaaaaatatgtattatatttcgctataaatctagataaacatctatttagactcgtagcggaaacgactcttttttttgtgtgtgatgggcactcttttggggacggagatctgact

SEQ ID NO: 219130 - DNA, 1699 bp, Zea Mays
ataccacgcgttgcgttaggctagatccgctcccctgcaggccacgccttctcgccgctcgcggaaccaccgccgccacctcaccactccagctccagcccccgcccgccataatcgcgtccccttctcgtccttccagagcttcttaaaccacccggcccgctcccagcgtcccttctccgcccacagccagcggcgaactcgatcgagcaggatggggtttatcggcgcgcacggcgtggagacgctgaagcggtataggtacagtggagaggaccgctcggtggtggccaagtacgtgctgcagcccttctggagccgatgcgtcactctcttcccgctctggatgcctacatggttatgctttccgacatttcagatcacacttacaggattttcgtttctagtactatcagcgctgcttggctatatatgttcgcctcaccttgacactgctccccctaggtgggtccatcttgcccatggattacttctcttcttgtaccagtttgaagcattggcccttggaagcaccttgatgtgtggaggatggacactttgtttctgggtagttgccgctgtcccgttctatcttgcaacctgggaacaaggtttgggtgggatggagccaaaaaactggattcacctggcttcaacccacacccatggccccactgtgccaagatgtcaggattttcggaaatcactaccctttttcggttggattccacttccatttctttctgaaattgaaattcctttatatgttcttgtgctgattcttatgatcgtatgtgctgttatacctactgttagatccaatgtcagcaatgtccaagaggtagttgaggcacgaaaaggaagcatggcattagcattagccatgatccttccttttattgtactgttagctggagttgctatctggtgctatctttctccttcaagtataatgaggaaccagccacatttgctcgtgattggaactggctttaattttggatatttggtgggaagaatgatacttgctcatttgtgtgatgaacccaaaggtctaaaatctgggatgttcatgtctctggtgtttctttgttttccaattgcaaatgctctcattgcaaagatcaacgatgggagtcctttagttgatgagcttgttctgctgctgctttattgtgcatatacagtgggtctctacctgcacctcgctgtgtcggttgtgcatgaaatcaaggatgcccttggaatctattgcttcaggataactagaaaggaggcttgaactttgtagtgaagatatattattattacttcacaagtgctagcgaggagcaacacagttcgtcaccgtgcacgctgggagtgtgtgtgcccctctgaaatgccacagccatctgtttgttgagcagagggatctagggattgtattgcgcagttatcttggtcatataacaatatagcagtgtgatgtacactgtagtagggtcgttagaagatatactgtgaaaaacttgcttggagaaagtgatcgtagcatgtgattatcttggttattgtctacaccctccgtttttttttaaaaaaaaaatatgtattatatttcgctataaatctagataaacatctatttagactcgtagcggaaacgactcttttttttgtgtgtgatgggcactcttttggggacggagatctgact

SEQ ID NO: 219131 - DNA, 1800 bp, Zea Mays
atataccacgcgttgcgttaggctagatccgctcccctgcaggccacgccttctcgccgctcgcggaaccaccgccgccacctcaccactccagctccagcccccgcccgccataatcgcgtccccttctcgtccttccagagcttcttaaaccacccggcccgctcccagcgtcccttctccgcccacagccagcggcgaactcgatcgagcaggatggggtttatcggcgcgcacggcgtggagacgctgaagcggtataggtacagtggagaggaccgctcggtggtggccaagtacgtgctgcagcccttctggagccgatgcgtcactctcttcccgctctggatgcctacatggttatgctttccgacatttcagatcacacttacaggattttcgtttctagtactatcagcgctgcttggctatatatgttcgcctcaccttgacactgctccccctaggtgggtccatcttgcccatggattacttctcttcttgtaccagacttttgatgctgttgatggtaaacaagcaaggcgtactagctcatcgagtcctcttggagaactttttgatcatggatgtgatgcacttgcgtgtgcttttgaagcattggcccttggaagcaccttgatgtgtggaggatggacactttgtttctgggtagttgccgctgtcccgttctatcttgcaacctgggaacaaggtttgggtgggatggagccaaaaaactggattcacctggcttcaacccacacccatggccccactgtgccaagatgtcaggattttcggaaatcactaccctttttcggttggattccacttccatttctttctgaaattgaaattcctttatatgttcttgtgctgattcttatgatcgtatgtgctgttatacctactgttagatccaatgtcagcaatgtccaagaggtagttgaggcacgaaaaggaagcatggcattagcattagccatgatccttccttttattgtactgttagctggagttgctatctggtgctatctttctccttcaagtataatgaggaaccagccacatttgctcgtgattggaactggctttaattttggatatttggtgggaagaatgatacttgctcatttgtgtgatgaacccaaaggtctaaaatctgggatgttcatgtctctggtgtttctttgttttccaattgcaaatgctctcattgcaaagatcaacgatgggagtcctttagttgatgagcttgttctgctgctgctttattgtgcatatacagtgggtctctacctgcacctcgctgtgtcggttgtgcatgaaatcaaggatgcccttggaatctattgcttcaggataactagaaaggaggcttgaactttgtagtgaagatatattattattacttcacaagtgctagcgaggagcaacacagttcgtcaccgtgcacgctgggagtgtgtgtgcccctctgaaatgccacagccatctgtttgttgagcagagggatctagggattgtattgcgcagttatcttggtcatataacaatatagcagtgtgatgtacactgtagtagggtcgttagaagatatactgtgaaaaacttgcttggagaaagtgatcgtagcatgtgattatcttggttattgtctacaccctccgtttttttttaaaaaaaaaatatgtattatatttcgctataaatctagataaacatctatttagactcgtagcggaaacgactcttttttttgtgtgtgatgggcactcttttggggacggagatctgact

SEQ ID NO: 219132 - DNA, 1864 bp, Zea Mays
aatataccacgcgttgcgttaggctagatccgctcccctgcaggccacgccttctcgccgctcgcggaaccaccgccgccacctcaccactccagctccagcccccgcccgccataatcgcgtccccttctcgtccttccagagcttcttaaaccacccggcccgctcccagcgtcccttctccgcccacagccagcggcgaactcgatcgagcaggatggggtttatcggcgcgcacggcgtggagacgctgaagcggtataggtacagtggagaggaccgctcggtggtggccaagtacgtgctgcagcccttctggagccgatgcgtcactctcttcccgctctggatgcctacatggttatgctttccgacatttcagatcacacttacaggattttcgtttctagtactatcagcgctgcttggctatatatgttcgcctcaccttgacactgctccccctaggtgggtccatcttgcccatggattacttctcttcttgtaccagacttttgatgctgttgatggtaaacaagcaaggcgtactagctcatcgagtcctcttggagaactttttgatcatggatgtgatgcacttgcgtgtgcttttgaagcattggcccttggaagcaccttgatgtgtggaggatggacactttgtttctgggtagttgccgctgtcccgttctatcttgcaacctgggaacacttctttacaaatacgctcattctgcctacaataaatggaccaacggagggcctgatgctgatctatgtatcacatttgtttacattttttactggcgctgaatggtgggcacaggattttcggaaatcactaccctttttcggttggattccacttccatttctttctgaaattgaaattcctttatatgttcttgtgctgattcttatgatcgtatgtgctgttatacctactgttagatccaatgtcagcaatgtccaagaggtagttgaggcacgaaaaggaagcatggcattagcattagccatgtttggctttgctactctgcttttggaaacaatccttccttttattgtactgttagctggagttgctatctggtgctatctttctccttcaagtataatgaggaaccagccacatttgctcgtgattggaactggctttaattttggatatttggtgggaagaatgatacttgctcatttgtgtgatgaacccaaaggtctaaaatctgggatgttcatgtctctggtgtttctttgttttccaattgcaaatgctctcattgcaaagatcaacgatgggagtcctttagttgatgagcttgttctgctgctgctttattgtgcatatacagtgggtctctacctgcacctcgctgtgtcggttgtgcatgaaatcaaggatgcccttggaatctattgcttcaggataactagaaaggaggcttgaactttgtagtgaagatatattattattacttcacaagtgctagcgaggagcaacacagttcgtcaccgtgcacgctgggagtgtgtgtgcccctctgaaatgccacagccatctgtttgttgagcagagggatctagggattgtattgcgcagttatcttggtcatataacaatatagcagtgtgatgtacactgtagtagggtcgttagaagatatactgtgaaaaacttgcttggagaaagtgatcgtagcatgtgattatcttggttattgtctacaccctccgtttttttttaaaaaaaaaatatgtattatatttcgctataaatctagataaacatctatttagactcgtagcggaaacgactcttttttttgtgtgtgatgggcactcttttggggacggagatctgact

SEQ ID NO: 219133 - DNA, 1798 bp, Zea Mays
attgacgaatataccacgcgttgcgttaggctagatccgctcccctgcaggccacgccttctcgccgctcgcggaaccaccgccgccacctcaccactccagctccagcccccgcccgccataatcgcgtccccttctcgtccttccagagcttcttaaaccacccggcccgctcccagcgtcccttctccgcccacagccagcggcgaactcgatcgagcaggatggggtttatcggcgcgcacggcgtggagacgctgaagcggtataggtacagtggagaggaccgctcggtggtggccaagtacgtgctgcagcccttctggagccgatgcgtcactctcttcccgctctggatgcctacatggttatgctttccgacatttcagatcacacttacaggattttcgtttctagtactatcagcgctgcttggctatatatgttcgcctcaccttgacactgctccccctagacttttgatgctgttgatggtaaacaagcaaggcgtactagctcatcgagtcctcttggagaactttttgatcatggatgtgatgcacttgcgtgtgcttttgaagcattggcccttggaagcaccttgatgtgtggaggatggacactttgtttctgggtagttgccgctgtcccgttctatcttgcaacctgggaacacttctttacaaatacgctcattctgcctacaataaatggaccaacggagggcctgatgctgatctatgtatcacatttgtttacattttttactggcgctgaatggtgggcacaggattttcggaaatcactaccctttttcggttggattccacttccatttctttctgaaattgaaattcctttatatgttcttgtgctgattcttatgatcgtatgtgctgttatacctactgttagatccaatgtcagcaatgtccaagaggtagttgaggcacgaaaaggaagcatggcattagcattagccatgatccttccttttattgtactgttagctggagttgctatctggtgctatctttctccttcaagtataatgaggaaccagccacatttgctcgtgattggaactggctttaattttggatatttggtgggaagaatgatacttgctcatttgtgtgatgaacccaaaggtctaaaatctgggatgttcatgtctctggtgtttctttgttttccaattgcaaatgctctcattgcaaagatcaacgatgggagtcctttagttgatgagcttgttctgctgctgctttattgtgcatatacagtgggtctctacctgcacctcgctgtgtcggttgtgcatgaaatcaaggatgcccttggaatctattgcttcaggataactagaaaggaggcttgaactttgtagtgaagatatattattattacttcacaagtgctagcgaggagcaacacagttcgtcaccgtgcacgctgggagtgtgtgtgcccctctgaaatgccacagccatctgtttgttgagcagagggatctagggattgtattgcgcagttatcttggtcatataacaatatagcagtgtgatgtacactgtagtagggtcgttagaagatatactgtgaaaaacttgcttggagaaagtgatcgtagcatgtgattatcttggttattgtctacaccctccgtttttttttaaaaaaaaaatatgtattatatttcgctataaatctagataaacatctatttagactcgtagcggaaacgactcttttttttgtgtgtgatgggcactcttttggggacggagatctgact

SEQ ID NO: 219134 - DNA, 1282 bp, Zea Mays
gctagatccgctcccctgcaggccacgccttctcgccgctcgcggaaccaccgccgccacctcaccactccagctccagcccccgcccgccataatcgcgtccccttctcgtccttccagagcttcttaaaccacccggcccgctcccagcgtcccttctccgcccacagccagcggcgaactcgatcgagcaggatggggtttatcggcgcgcacggcgtggagacgctgaagcggtataggtacagtggagaggaccgctcggtggtggccaagtacgtgctgcagcccttctggagccgatgcgtcactctcttcccgctctggatgcctacatggttatgctttccgacatttcagatcacacttacaggattttcgtttctagtactatcagcgctgcttggctatatatgttcgcctcaccttgacactgctccccctaggtgggtccatcttgcccatggattacttctcttcttgtaccagtttgaagcattggcccttggaagcaccttgatgtgtggaggatggacactttgtttctgggtagttgccgctgtcccgttctatcttgcaacctgggaacacttctttacaaatacgctcattctgcctacaataaatggaccaacggagggcctgatgctgatctatgtatcacatttgtttacattttttactggcgctgaatggtgggcacaggattttcggaaatcactaccctttttcggttggattccacttccatttctttctgaaattgaaattcctttatatgttcttgtgctgattcttatgatcgtatgtgctgttatacctactgttagatccaatgtcagcaatgtccaagaggtagttgaggcacgaaaaggaagcatggcattagcattagccatgatccttccttttattgtactgttagctggagttgctatctggtgctatctttctccttcaagtataatgaggaaccagccacatttgctcgtgattggaactggctttaattttggatatttggtgggaagaatgatacttgctcatttgtgtgatgaacccaaaggtctaaaatctgggatgttcatgtctctggtgtttctttgttttccaattgcaaatgctctcattgcaaagatcaacgatgggagtcctttagttgatgagcttgttctgctgctgctttattgtgcatatacagtgtgttatgtgtctgtcttctgggattacggtaccccctttctatgtcgatgtttctgcttggttatctggtcacactcag

SEQ ID NO: 219135 - DNA, 379 bp, Zea Mays
ccgctcccctgcaggccacgccttctcgccgctcgcggaaccaccgccgccacctcaccactccagctccagcccccgcccgccataatcgcgtccccttctcgtccttccagagcttcttaaaccacccggcccgctcccagcgtcccttctccgcccacagccagcggcgaactcgatcgagcaggatggggtttatcggcgcgcacggcgtggagacgctgaagcggtataggtacagtggagaggaccgctcggtggtggccaagtacgtgctgcagcccttctggagccgatgcgtcactctcttcccgctctggatgccgtgggtccatcttgcccatggattacttctcttcttgtaccagtctaatattgc

SEQ ID NO: 219136 - DNA, 957 bp, Zea Mays
caacaacgaacaaaaaaactctactccgtaacctttccgtctctaaccttcccgtctcctgctgccacctcccgcatccgtgaagaacgactgaaccagccgccacccgcccgtccgactccggctccggccacctgcctccgtccctccgccgagctgcccgtctgccttcgtccctccggcctaggcgagcagatctccacccccacccgccccgagccgagcagcagccagcagagccgcatcgccgccggggaacgctgagttgccggcccgtcgccctgagaagatctccatcccagcagcatagccgcagcgccgcctccccaaggcaaggcccgagcgccctacgccctgccacaggccccaggttgatgtctttcatgagactattgcctcaaaggctaccccaacttatcaggcaggtggagcaagatgttgagactgtaatccacgttctccagccaggtccaataggaattgtggagcacaaattcacagacacggagatcttagaggccagggctacagtgaaaagagcagtggataattggcgaagaaattggacccttgagaaaaatgttggcagataaatggaaataatataccccttgtgtcttctatcaacagtacttgaaataaataggatgctatggctggatgcagctgttgccattagttagatttgagcacgatctgcttatcgggagttatgttaactgttctaaatgatcagtctgcctctctttgtttcatggtttgaaacgttcatatttagagaatttctttttgttcattgccttgtcggcagccggctgtcatattgaatgtgatctttcttttgatgcttcaatactttaactgtagtatctgaagagatacttgaagatcactgacttcatgatggatacaacaccttgaccgttgtgttaacacctttgaggctgccatcctgag

SEQ ID NO: 219137 - DNA, 1292 bp, Zea Mays
ctttcatctccaagccgaaaaaacacccacagaaccctaccctcccgagtcccgaccccgtcctgctcgctccgccgtccttcgcccgccacccgccacccgccggactgccaaagcccggaggcctgaggcccgagttacgcgaggagcagccgaaccagcggcccggcgcctcatccctcagcggccccgcccctggggccgtgtagtcagcaagcggccacgcgagtgcgcggtcggcgcggagtgagcaggagcaacccgtggctggcggtcagtcggtggctagctggagcctggagttgcgacttgcgagcggcgttagaactcgctccacctataatttttgtgtggctccgtcactgattccacccgttctgtggccggcgacagaggcacagagaagcgccaatccgccggcttgatctgaagcatggacaggccctcatcaccggtcgttgctggttctgccctctgttgctgaagatcgtgaccatggaactcgcgtcgtcgtcctagagctcctcgcgatgttgctgctccaggctgccatcctcatgtcaacggtggagggccttgtgcggatcgtgcaagaagctccacaagttcctcatcaataagatcagtttgaggcttggccatgcctttaaatatagatattgatctgttcaagctggatattgatgagctgatagctgattattccaaggagaactgtacgtcactctttgaattcaaacgagtatggatgggcaagaaattttcttatatctatgaaggcaggcctaagacaaactcgggtttattcatgcagtccctctttctgcattgtattggttatttgacttctcaaagttcactgcaccaaagattggctgggctatactgcctttactgtctgtatgagtgccagccatacaagccgcagttcaagatttacttgtctcttgaggagtgcaggcaactgaaagatatcgttgttatggcgaagcaaaatggactgcagctcgtgcctgcacttgtcaaaaggatgctggataaagacatgtttttgtttggctacatgaatttgatcgacgacaacggggacaagcaggtcgaggaattgaccgcattgcagaacaagcgagtaaaatttgcatgtgacaagttatttgcaaatacccaagcagaaagatatttgcacatggacttgggtgctgagttcgagcttgatagcatcaagaaattgtcaaaggagtatgcagaagcaaaggaactggcccttgcagtgacgaaaaaacgcaaaaaat

SEQ ID NO: 219138 - DNA, 1303 bp, Zea Mays
aggattttgcgtagtgttgtcaccatggtgctcttagtttgaggcttggccatgcctttaaatatagatattgatctgttcaagctggatattgatgagctgatagctgattattccaaggagaactgtacgtcactctttgaattcaaacgagtatggatgggcaagaaattttcttatatctatgaaggcaggcctaagacaaactcgggtttattcatgcagtccctctttctgcattgtattggttatttgacttctcaaagttcactgcaccaaagattggctgggctatactgcctttactgtctgtatgagtgccagccatacaagccgcagttcaagatttacttgtctcttgaggagtgcaggcaactgaaagatatcgttgttatggcgaagcaaaatggactgcagctcgtgcctgcacttgtcaaaaggatgctggataaagacatgtttttgtttggctacatgaatttgatcgacgacaacggggacaagcaggtcgaggaattgaccgcattgcagaacaagcgagtaaaatttgcatgtgacaagttatttgcaaatacccaagcagaaagatatttgcacatggacttgggtgctgagttcgagcttgatagcatcaagaaattgtcaaaggagtatgcagaagcaaaggaactggcccttgcagaggcaagccaaactgtcgaagttgacgatgctaagcacctccttcagagtgagaggctgttgggcgacaagatagatgaagtcgtcaaagaatgggatgtccagaaggaggggttctacgagaggacaggattatcctcatcccctggcgaccagctcatggccatcgacaacgatgaatcaggagctcaatgtcacgaggatggatcccgtggcgatcagctcatggcggtcgacaatgatgaatcgggagtacaggatcacgaggacctcgacgacgacgacggctttgccgagttagaactgctgctagaatgaagaacatatacaagtctgtaaactcttactaccgccgtataaccgtgtaatcagaacaccgagagatgtaatcctcgctcgtctttactagcctctcctttttaggtgccagaccttctgttcatctacactggctgcagtaactgtacattgaaataatccagtgcgccagcctatgcaggggagaaaagaaagaggtgagcttgagtaaaaatgtacatgaacagtgacaagaaaaaaaaacgctggctgcagtaattgtgcatttaaacgatacagtgtgccagactatgcagggtgaaaa

SEQ ID NO: 219139 - DNA, 2019 bp, Zea Mays
ctttcatctccaagccgaaaaaacacccacagaaccctaccctcccgagtcccgaccccgtcctgctcgctccgccgtccttcgcccgccacccgccacccgccggactgccaaagcccggaggcctgaggcccgagttacgcgaggagcagccgaaccagcggcccggcgcctcatccctcagcggccccgcccctggggccgtgtagtcagcaagcggccacgcgagtgcgcggtcggcgcggagtgagcaggagcaacccgtggctggcggtcagtcggtggctagctggagcctggagttgcgacttgcgagcggcgttagaactcgctccacctataatttttgtgtggctccgtcactgattccacccgttctgtggccggcgacagaggcacagagaagcgccaatccgccggcttgatctgaagcatggacaggcgagtaattttgcaagtggaatatagatcgatctgaagctatgcatctgtgtgaattgtgccaagaggaaacatactcagttatttgggttcagcaagatggggtataaaccttatcaagttgcaaaccctcatcaccggtcgttgctggttctgccctctgttgctgaagatcgtgaccatggaactcgcgtcgtcgtcctagagctcctcgcgatgttgctgctccaggctgccatcctcatgtcaacggtggagggccttgtgcggatcgtgcaagaagctccacaagttcctcatcaataagatcagtttgaggcttggccatgcctttaaatatagatattgatctgttcaagctggatattgatgagctgatagctgattattccaaggagaactgtacgtcactctttgaattcaaacgagtatggatgggcaagaaattttcttatatctatgaaggcaggcctaagacaaactcgggtttattcatgcagtccctctttctgcattgtattggttatttgacttctcaaagttcactgcaccaaagattggctgggctatactgcctttactgtctgtatgagtgccagccatacaagccgcagttcaagatttacttgtctcttgaggagtgcaggcaactgaaagatatcgttgttatggcgaagcaaaatggactgcagctcgtgcctgcacttgtcaaaaggatgctggataaagacatgtttttgtttggctacatgaatttgatcgacgacaacggggacaagcaggtcgaggaattgaccgcattgcagaacaagcgagtaaaatttgcatgtgacaagttatttgcaaatacccaagcagaaagatatttgcacatggacttgggtgctgagttcgagcttgatagcatcaagaaattgtcaaaggagtatgcagaagcaaaggaactggcccttgcagaggcaagccaaactgtcgaagttgacgatgctaagcacctccttcagagtgagaggctgttgggcgacaagatagatgaagtcgtcaaagaatgggatgtccagaaggaggggttctacgagaggacaggattatcctcatcccctggcgaccagctcatggccatcgacaacgatgaatcaggagctcaatgtcacgaggatggatcccgtggcgatcagctcatggcggtcgacaatgatgaatcgggagtacaggatcacgaggacctcgacgacgacgacggctttgccgagttagaactgctgctagaatgaagaacatatacaagtctgtaaactcttactaccgccgtataaccgtgtaatcagaacaccgagagatgtaatcctcgctcgtctttactagcctctcctttttaggtgccagaccttctgttcatctacactggctgcagtaactgtacattgaaataatccagtgcgccagcctatgcaggggagaaaagaaagaggtgagcttgagtaaaaatgtacatgaacagtgacaagaaaaaaaaacgctggctgcagtaattgtgcatttaaacgatacagtgtgccagactatgcagggtgaaaa

SEQ ID NO: 219140 - DNA, 1809 bp, Zea Mays
ctttcatctccaagccgaaaaaacacccacagaaccctaccctcccgagtcccgaccccgtcctgctcgctccgccgtccttcgcccgccacccgccacccgccggactgccaaagcccggaggcctgaggcccgagttacgcgaggagcagccgaaccagcggcccggcgcctcatccctcagcggccccgcccctggggccgtgtagtcagcaagcggccacgcgagtgcgcggtcggcgcggagtgagcaggagcaacccgtggctggcggtcagtcggtggctagctggagcctggagttgcgacttgcgagcggcgttagaactcgctccacctataatttttgtgtggctccgtcactgattccacccgttctgtggccggcgacagaggcacagagaagcgccaatccgccggcttgatctgaagcatggacaggccctcatcaccggtcgttgctggttctgccctctgttgctgaagatcgtgaccatggaactcgcgtcgtcgtcctagagctcctcgcgatgttgctgctccaggctgccatcctcatgtcaacggtggagggccttgtgcggatcgtgcaagaagctccacaagttcctcatcaataagatcaggagaactgtacgtcactctttgaattcaaacgagtatggatgggcaagaaattttcttatatctatgaaggcaggcctaagacaaactcgggtttattcatgcagtccctctttctgcattgtattggttatttgacttctcaaagttcactgcaccaaagattggctgggctatactgcctttactgtctgtatgagtgccagccatacaagccgcagttcaagatttacttgtctcttgaggagtgcaggcaactgaaagatatcgttgttatggcgaagcaaaatggactgcagctcgtgcctgcacttgtcaaaaggatgctggataaagacatgtttttgtttggctacatgaatttgatcgacgacaacggggacaagcaggtcgaggaattgaccgcattgcagaacaagcgagtaaaatttgcatgtgacaagttatttgcaaatacccaagcagaaagatatttgcacatggacttgggtgctgagttcgagcttgatagcatcaagaaattgtcaaaggagtatgcagaagcaaaggaactggcccttgcagaggcaagccaaactgtcgaagttgacgatgctaagcacctccttcagagtgagaggctgttgggcgacaagatagatgaagtcgtcaaagaatgggatgtccagaaggaggggttctacgagaggacaggattatcctcatcccctggcgaccagctcatggccatcgacaacgatgaatcaggagctcaatgtcacgaggatggatcccgtggcgatcagctcatggcggtcgacaatgatgaatcgggagtacaggatcacgaggacctcgacgacgacgacggctttgccgagttagaactgctgctagaatgaagaacatatacaagtctgtaaactcttactaccgccgtataaccgtgtaatcagaacaccgagagatgtaatcctcgctcgtctttactagcctctcctttttaggtgccagaccttctgttcatctacactggctgcagtaactgtacattgaaataatccagtgcgccagcctatgcaggggagaaaagaaagaggtgagcttgagtaaaaatgtacatgaacagtgacaagaaaaaaaaacgctggctgcagtaattgtgcatttaaacgatacagtgtgccagactatgcagggtgaaaa

SEQ ID NO: 219141 - DNA, 1550 bp, Zea Mays
ccggcctgcccaatcccctttcatctccaagccgaaaaaacacccacagaaccctaccctcccgagtcccgaccccgtcctgctcgctccgccgtccttcgcccgccacccgccacccgccggactgccaaagcccggaggcctgaggcccgagttacgcgaggagcagccgaaccagcggcccggcgcctcatccctcagcggccccgcccctggggccgtgtagtcagcaagcggccacgcgagtgcgcggtcggcgcggagtgagcaggagcaacccgtggctggcggtcagtcggtggctagctggagcctggagttgcgacttgcgagcggcgttagaactcgctccacctataatttttgtgtggctccgtcactgattccacccgttctgtggccggcgacagaggcacagagaagcgccaatccgccggcttgatctgaagcatggacagggagaactgtacgtcactctttgaattcaaacgagtatggatgggcaagaaattttcttatatctatgaaggcaggcctaagacaaactcgggtttattcatgcagtccctctttctgcattgtattggttatttgacttctcaaagttcactgcaccaaagattggctgggctatactgcctttactgtctgtatgagtgccagccatacaagccgcagttcaagatttacttgtctcttgaggagtgcaggcaactgaaagatatcgttgttatggcgaagcaaaatggactgcagctcgtgcctgcacttgtcaaaaggatgctggataaagacatgtttttgtttggctacatgaatttgatcgacgacaacggggacaagcaggtcgaggaattgaccgcattgcagaacaagcgagtaaaatttgcatgtgacaagttatttgcaaatacccaagcagaaagatatttgcacatggacttgggtgctgagttcgagcttgatagcatcaagaaattgtcaaaggagtatgcagaagcaaaggaactggcccttgcagaggcaagccaaactgtcgaagttgacgatgctaagcacctccttcagagtgagaggctgttgggcgacaagatagatgaagtcgtcaaagaatgggatgtccagaaggaggggttctacgagaggacaggattatcctcatcccctggcgaccagctcatggccatcgacaacgatgaatcaggagctcaatgtcacgaggatggatcccgtggcgatcagctcatggcggtcgacaatgatgaatcgggagtacaggatcacgaggacctcgacgacgacgacggctttgccgagttagaactgctgctagaatgaagaacatatacaagtgccagaccttctgttcatctacactggctgcagtaactgtacattgaaataatccagtgcgccagcctatgcaggggagaaaagaaagaggtgagcttgagtaaaaatgtacatgaacagtgacaagaaaaaaaaacgctggctgcagtaattgtgcatttaaacgatacagtgtgccagactatgcagggtgaaaa

SEQ ID NO: 219142 - DNA, 1847 bp, Zea Mays
tgacgccccaaaagtaaatgagaattgagaatccgtcgggtgtaaatttggccattttttggagatcccacatgccagccatttaacaaaagcagcccacttgtaatgcgactccacctggcccggcctgcccaatcccctttcatctccaagccgaaaaaacacccacagaaccctaccctcccgagtcccgaccccgtcctgctcgctccgccgtccttcgcccgccacccgccacccgccggactgccaaagcccggaggcctgaggcccgagttacgcgaggagcagccgaaccagcggcccggcgcctcatccctcagcggccccgcccctggggccgtgtagtcagcaagcggccacgcgagtgcgcggtcggcgcggagtgagcaggagcaacccgtggctggcggtcagtcggtggctagctggagcctggagttgcgacttgcgagcggcgttagaactcgctccacctataatttttgtgtggctccgtcactgattccacccgttctgtggccggcgacagaggcacagagaagcgccaatccgccggcttgatctgaagcatggacaggtttgaggcttggccatgcctttaaatatagatattgatctgttcaagctggatattgatgagctgatagctgattattccaaggagaactgtacgtcactctttgaattcaaacgagtatggatgggcaagaaattttcttatatctatgaaggcaggcctaagacaaactcgggtttattcatgcagtccctctttctgcattgtattggttatttgacttctcaaagttcactgcaccaaagattggctgggctatactgcctttactgtctgtatgagtgccagccatacaagccgcagttcaagatttacttgtctcttgaggagtgcaggcaactgaaagatatcgttgttatggcgaagcaaaatggactgcagctcgtgcctgcacttgtcaaaaggatgctggataaagacatgtttttgtttggctacatgaatttgatcgacgacaacggggacaagcaggtcgaggaattgaccgcattgcagaacaagcgagtaaaatttgcatgtgacaagttatttgcaaatacccaagcagaaagatatttgcacatggacttgggtgctgagttcgagcttgatagcatcaagaaattgtcaaaggagtatgcagaagcaaaggaactggcccttgcagaggcaagccaaactgtcgaagttgacgatgctaagcacctccttcagagtgagaggctgttgggcgacaagatagatgaagtcgtcaaagaatgggatgtccagaaggaggggttctacgagaggacaggattatcctcatcccctggcgaccagctcatggccatcgacaacgatgaatcaggagctcaatgtcacgaggatggatcccgtggcgatcagctcatggcggtcgacaatgatgaatcgggagtacaggatcacgaggacctcgacgacgacgacggctttgccgagttagaactgctgctagaatgaagaacatatacaagtctgtaaactcttactaccgccgtataaccgtgtaatcagaacaccgagagatgtaatcctcgctcgtctttactagcctctcctttttaggtgccagaccttctgttcatctacactggctgcagtaactgtacattgaaataatccagtgcgccagcctatgcaggggagaaaagaaagaggtgagcttgagtaaaaatgtacatgaacagtgacaagaaaaaaaaacgctggctgcagtaattgtgcatttaaacgatacagtgtgccagactatgcagggtgaaaa

SEQ ID NO: 219143 - DNA, 2108 bp, Zea Mays
gacgatcccccagtcccctcccctcacggctgcatgcccgcatccggattccggtccatccggcagccagacgctgccgccgtaaattccccttccgcgtctgtctggccggtggccgctgtggttttgtaggctagtgcgtgccgtcctcggacctctcctctcgtcctccaccaccatgactgaggcccagtctccactatccgccaccatggcgaaggaggcccagtcgtcgccgtccgccaccgtagcgcaggcgacggctctgccgcagctcgtattattcaactccttgacgaagagggaggagcccttccagccccgggtggaggggaaggtagggatgtacgtctgtggcgtcactccctacgactttagccacatcggccacgcgcgtgcctacgtcgccttcgacgtcctctacaggtacctgaaattcttggggtatgaagttgaatatgtccgtaatttcacggatatcgacgacaagattattaagcgtgcaaatgaacgcggtgaaacagttacaagtttgagtagccggtttatcaatgaatttcttcttgatatgactgagctccagtgtttacctcctacctgtgagccacgtgtaacagagcacattgagcatattatagagttgataaccaagataatggagaatgacaaagcctatgctatggaaggagatgtttacttttcagtcgaaagttttcctgaatatctcagtttatctggaagaaaattcgatcaaaatcaggcaggggcacgggttgcttttgatacacgaaagcgtaatcctgcagactttgcactctggaaggctgcaaaggagggcgaacctttttgggatagcccttggggccgtggaagaccgggatggcatattgaatgcagcgcaatgagtgctcactatttaggacatctattcgatattcatggtggggggaaagatttgatttttcctcatcatgagaatgagcttgcacaaagccgagctgcttatcctgagagtgaggtgaagtgctggatgcataatggctttgttaacaaggatgataaaaaaatggcaaaatcagataataactttttcacgattagagatactctatatgactgcgaggaagtattagctacatatcgtgaagagggtatttctctctcagtgccgttcgaggagcaaaatctgattgataagcaccattcagaattcttgaaatatatgtcgaatgatcttaaaaccacagatgttctggatcgttgcttcatggagctgctgaaggccataaacagcagtttgaatgatttgaagaaactgcaacagaaaatagaacagcaaaagaagaaacagcaacagcagaagaagcagcaacagaagcaacagcaattgcaaaaacagccagaacattatattcaagctctgattgcactggaaatagaacttaaaaataaactgtctatacttggtctgatgccatcttcatctttggcagaggtactgaagcaattgaaggacaaagcactaaagagagcggggctgactgaagaaaaattgcaagagcagattgagcagagaaacgttgcaaggaagaataaacagtttgagatatctgatggaatcaggaaaaaccttgctaccaagggcatcgccctgatggatgaaccttctggtacagtgtggagaccatgcgaaccagaggggccgcacccactcaacaaatgatggtaaaatgagatttttgcctgagggcagctacacattttgaactaacaaaatcaccatctctggatgcagtattcttcactcaggggtagggggtccaggttgactcgccagtcgccagttgaaacttgcatttctggttgtgtaagaagcaatggaccccatatatatactttactccttgcgaggtttgagttttggttttggatataagacttggcaattccatttcaatgaaacagatgaaattttgcttggtactcttcgcgtgtgttagtggtttagtttgttgtgcaccggtggtgcttgagatgaagtcattgctttattttaaggtaatgaaaactgttctagcagaatttggttagccccctcgggtcatgaa

SEQ ID NO: 219144 - DNA, 5148 bp, Zea Mays
acggccagcaggtaccctgacgatcaatacgacagattatggacacctatgattattgacgccatcgactggctggtgctatccacgacggaaaaggtgcggaacatatatgatgacctcttcgaggtgccgtcgaaggtgatgcagacggcgatcacgccgcgtgacgctaccagcagcatcaacttctattggaactccaagggctcgtcgcttgggtacataccggtcttccacttctccgaggtgctgcaggcgggcgccggcgttgttcgccagttcaacatcaacatcaacggcaagcggttcacctcccatgattattacacaccacggcacctcgaaagtggctacgtatacggtaccagaccttacaccaaccagatccggtataacgtctccatcgttaagacagacacgtcaacgctcccgcctatcatcaacgccgacgagattttcatcgtcatctctacgaccaacgttggcacggactcggaggacgtctctgctatgaaggctatcaaggcgaagtatcaggtgaagaagaactggatgggagacccgtgcgttgctgggacttttaggtgggatggactgacgtgcagctatgccatttctgatcctccaaaaattactgccctaaacatgtccttcagtggtctgaccggtgacatatcatctgctttcgcaaatctcaaggctgtccaatccttggatttgtcacacaacaacctgacgggctcaatccctagctccctgtcacaactgccgtcactgacaactctagatttgacggggaatcagctcagcggaccaataccctctagtcttctcaaaagaatccaagacggctccttaaacctaatctatgccgataatccagacctttgcaccaacgccggggattcatgtcagacggcgccgcaaggaaagagcaagctagtcatctactacgtcgctgttcctatggctctgatcgtggtggcgttggcagtactgctgtgttgtcttctgcggcggcgaaagacgcgagggctagcggacgtctctgtgaagccccgggacaagactccgacgagccttgcttcaatggcggccgacgaacacagacttagctcgctgcggcttgagaaccgccggttcacatacgaggacctagagatgatcaccgacagcttcaagcgtgtcattggccggggcggctttggatacgtctacgagggcttcttggaggatggcactcaggtggcggtgaagatgaggtctcagtcgtccaatcagggtgccaaggagttcctcacggaggcacagatcttgacacggatccatcacaagaaccttgtctccatggtcggctactgcaaagatggggtgtacatggcgcttgtctacgagtacatgtcagaaggatccctgcaggagcacattgcaggaaaacgcttgacttgggggcagaggcttcgaatcgcattggaatcagcgcaagggctagagtatctgcacaggggctgcaacccgcctctgattcacagggacgtgaagaccagcaacatcctactgaacgcgaaactggaggccaaggttgctgatttcggcatgtcaaaggctctagaccgcgacacctatgcgtccacgaacactcttgttggcacaccaggatacgtcgacccagagtacctggaaacaatgcagccaagcaccaagagcgacgtgtacagtttcggcgtggtgctcctggaactggtcacagggagacctcctatcctgcacagcccacagcccaccagcgtgatccagtgggcacggcagcacctggcgcgcggcgacatcgaggtcgtggtggacgcgtccatgggaggcaaccacgacgtcaacagcgtgtggaaagccgcggaggtcgcgctccagtgcaccgagcaggcgtcggcgcagcgccccaccatgggcgacgtggtggcgcagctcctggagtgcctcgacctcgagaagggccgctccgccaacgaaagtttctgcgacggagacgacagcggctccgcgaccgcgagcttgagccacagcagcgcatttgtgacggggcgtatttttgggacggtgccaatggtggagacaggccctgccacgagacgcgcgctcgtgtgtgtctcactgtctcccctgtcccctctcccgcgtgctcgtctaccttcggctcccccatgggatgagagcgccttcctcgccatggccgcctcccacctgccccccgcagccaccctcgtcaagaagtacccaactctcctccacccgttcggcgccaaaccacacgcccagaggctgatcttcaggtgccgcgcgaccagcagcgagggtgcggacgatggctgggcgtcctttgtggacgagctcaagaggtcgctgcaggtggacccgtccgacgcggtgattagcaacgccggcgcgggtctcacatcaaataacgacctcgtcaccgcgctgccactggaaccctccgctggtccggctgcgggagacgcgaccactgccgctgccggcgcggtgagcgagctcctgggcgtggacgcgtcaggcgcggtggccacccccgaccgcctcctgagctccctgctgcacctggacgcgtccaacccggtggcgagcgtggcgggcggcgcgctgtctcgcctggacgcgctcacgtcgggactgtcggacgcgcagcggtgggcgctgttcgggttcctggccgcgacgtggctgtacctgaccgcgcggcccggggtgctgagcggcgccgtggacatgtacgtgctggcgccgctgcagctggcgctggacagcgtgctgggccggcggagcctcaagatgagcgacttcgtcgtcggcgagcgcatcggggagggctccttcggggtggtgtatgccggcgccgtggtgccgaagaacggcgccgtcgtggaggagcggtccggcaaggccaagacgagcctccagaacgacgacaggtacaaggagaaggtcatactcaagaagatcaaggtcatgacggtgggggcgaaggagtgtggggactacgaggagtggttcaactaccgcgtgtcgagagcggcgccggagtcgtgcgccgacttcctcgggagcttcgtcgccgacaagaacaaggcggagttcgtcaagggcggcaagtggctcgtctggaagtttgagggcgacaggacgctggccaattacctgagcgagcgcggcttcccgtccaacctggagcgtctcatgttcgggcgcgtgctgcagggcctgggcccgctggagcgcgaggcgctggtggtgaagcaggtgatgcggcagctgatcacgtcgctgaagcgcatccacgccacgggcatcgtgcaccgcgacatcaagccgtccaacctcgtcgtgacccgccgcgggcaggtgaagctcatcgacttcggagccgccaccgacctccgcatcggcaagaactacgtgcccgaccgcgcgctgctcgacccggactactgcccgcccgagctctacgtcctccccgaggagacgcccgagcccccgccggagcccatcgccgccatcctctccccgatcctctggcagctgaacagcccggacctgttcgacatgtactcggcggggatagtgctgatgcagatggccataccgacgctgcggacgcagtcggggctcaagaacttcaacgccgagctcaggtccgccggctacgacctcaacaggtggcggcagagcgcgcggcggaggcccgacctgcagatcctggacctcgactccggccgaggctgggacctcgccaccaagctcatctcggagaggggcgccaacggcggtggccgcctgtctgccgcggccgcgttgcgccacccgtattttctcctgggtggcgaccaggccgcggcggtgctgtccaagttctcgctcagtaaatagcatccatccatggcccatggctgggtacctacgacctacgggatatatacacatcggcttattggaatcctccgatcgattcaccatccttgtatattgcgcattattgaatccttgggcataccataccggcagtgggaggcatcccaaattcaaaagggagtcatctggtaactgatgttacaacttttctgtatgggaatgctgtgaacaatgtggtgcagagtttcacacactaactaaccttacattatgctagacagagatcctacttcctttgcttcagttcctcgaatctatgcagatgcagacactcgcagagagagctcatcaactggctgcaaaattctgacctgctccttctttcagccaatcagatgtttggccatgctcgttctgatcctatactgacagacgaatccggccatggatcgcctctactgtcactggcagtacggatcgaacttcttctggagttcttcctggttgcccccgaccagcttgtcgatctccttcatgtctctcatgaagatgaacgttggagttgcgcgtacatcgaattgcgtgaccaattcctggagaaccattttaatgtggtatttaacttaagactcttcttttgttctatggacaaaagtaatagaacaaaatagataaagacagaaatcaatgtgtggaattttgaatattgatgtacgcaccggcagttcgtcgacgtcaatggagaagaaaacaagatcagaatgcttcaaggaaagctcggcgtatagtggagcagcgttcctgcatggtccacaccaagtcgcactgaactttaccacaacctgtacacgcgtggacatgccaacgtatacagttaacctgatgaacagctgaaggaatcatgctatcctgattcacagcgtttgttattactactattcatcttgggtacttactgtctgtccaagttcattcgcttcctccaatttctgctcccaacacttcaggtctggtatgatggtcactcttccggagctgtagtccagatgttcctcgtcatctacggcactctgcaagcagagaaaatctgatcagaaacctattgcctactgctgcaaacggctaatctatagtatgtatgattatatcaaacgaaacagaatggcaacccatgacacggcgagcaaagtaaaactgtagtggagttggagaaagttgatttacgct

SEQ ID NO: 219145 - DNA, 5016 bp, Zea Mays
acggccagcaggtaccctgacgatcaatacgacagattatggacacctatgattattgacgccatcgactggctggtgctatccacgacggaaaaggtgcggaacatatatgatgacctcttcgaggtgccgtcgaaggtgatgcagacggcgatcacgccgcgtgacgctaccagcagcatcaacttctattggaactccaagggctcgtcgcttgggtacataccggtcttccacttctccgaggtgctgcaggcgggcgccggcgttgttcgccagttcaacatcaacatcaacggcaagcggttcacctcccatgattattacacaccacggcacctcgaaagtggctacgtatacggtaccagaccttacaccaaccagatccggtataacgtctccatcgttaagacagacacgtcaacgctcccgcctatcatcaacgccgacgagattttcatcgtcatctctacgaccaacgttggcacggactcggaggacgtctctgctatgaaggctatcaaggcgaagtatcaggtgaagaagaactggatgggagacccgtgcgttgctgggacttttaggtgggatggactgacgtgcagctatgccatttctgatcctccaaaaattactgccctaaacatgtccttcagtggtctgaccggtgacatatcatctgctttcgcaaatctcaaggctgtccaatccttggatttgtcacacaacaacctgacgggctcaatccctagctccctgtcacaactgccgtcactgacaactctagatttgacggggaatcagctcagcggaccaataccctctagtcttctcaaaagaatccaagacggctccttaaacctaatctatgccgataatccagacctttgcaccaacgccggggattcatgtcagacggcgccgcaaggaaagagcaagctagtcatctactacgtcgctgttcctatggctctgatcgtggtggcgttggcagtactgctgtgttgtcttctgcggcggcgaaagacgcgagggctagcggacgtctctgtgaagccccgggacaagactccgacgagccttgcttcaatggcggccgacgaacacagacttagctcgctgcggcttgagaaccgccggttcacatacgaggacctagagatgatcaccgacagcttcaagcgtgtcattggccggggcggctttggatacgtctacgagggcttcttggaggatggcactcaggtggcggtgaagatgaggtctcagtcgtccaatcagggtgccaaggagttcctcacggaggcacagatcttgacacggatccatcacaagaaccttgtctccatggtcggctactgcaaagatggggtgtacatggcgcttgtctacgagtacatgtcagaaggatccctgcaggagcacattgcaggaaaacgcttgacttgggggcagaggcttcgaatcgcattggaatcagcgcaagggctagagtatctgcacaggggctgcaacccgcctctgattcacagggacgtgaagaccagcaacatcctactgaacgcgaaactggaggccaaggttgctgatttcggcatgtcaaaggctctagaccgcgacacctatgcgtccacgaacactcttgttggcacaccaggatacgtcgacccagagtaccacctggcgcgcggcgacatcgaggtcgtggtggacgcgtccatgggaggcaaccacgacgtcaacagcgtgtggaaagccgcggaggtcgcgctccagtgcaccgagcaggcgtcggcgcagcgccccaccatgggcgacgtggtggcgcagctcctggagtgcctcgacctcgagaagggccgctccgccaacgaaagtttctgcgacggagacgacagcggctccgcgaccgcgagcttgagccacagcagcgcatttgtgacggggcgtatttttgggacggtgccaatggtggagacaggccctgccacgagacgcgcgctcgtgtgtgtctcactgtctcccctgtcccctctcccgcgtgctcgtctaccttcggctcccccatgggatgagagcgccttcctcgccatggccgcctcccacctgccccccgcagccaccctcgtcaagaagtacccaactctcctccacccgttcggcgccaaaccacacgcccagaggctgatcttcaggtgccgcgcgaccagcagcgagggtgcggacgatggctgggcgtcctttgtggacgagctcaagaggtcgctgcaggtggacccgtccgacgcggtgattagcaacgccggcgcgggtctcacatcaaataacgacctcgtcaccgcgctgccactggaaccctccgctggtccggctgcgggagacgcgaccactgccgctgccggcgcggtgagcgagctcctgggcgtggacgcgtcaggcgcggtggccacccccgaccgcctcctgagctccctgctgcacctggacgcgtccaacccggtggcgagcgtggcgggcggcgcgctgtctcgcctggacgcgctcacgtcgggactgtcggacgcgcagcggtgggcgctgttcgggttcctggccgcgacgtggctgtacctgaccgcgcggcccggggtgctgagcggcgccgtggacatgtacgtgctggcgccgctgcagctggcgctggacagcgtgctgggccggcggagcctcaagatgagcgacttcgtcgtcggcgagcgcatcggggagggctccttcggggtggtgtatgccggcgccgtggtgccgaagaacggcgccgtcgtggaggagcggtccggcaaggccaagacgagcctccagaacgacgacaggtacaaggagaaggtcatactcaagaagatcaaggtcatgacggtgggggcgaaggagtgtggggactacgaggagtggttcaactaccgcgtgtcgagagcggcgccggagtcgtgcgccgacttcctcgggagcttcgtcgccgacaagaacaaggcggagttcgtcaagggcggcaagtggctcgtctggaagtttgagggcgacaggacgctggccaattacctgagcgagcgcggcttcccgtccaacctggagcgtctcatgttcgggcgcgtgctgcagggcctgggcccgctggagcgcgaggcgctggtggtgaagcaggtgatgcggcagctgatcacgtcgctgaagcgcatccacgccacgggcatcgtgcaccgcgacatcaagccgtccaacctcgtcgtgacccgccgcgggcaggtgaagctcatcgacttcggagccgccaccgacctccgcatcggcaagaactacgtgcccgaccgcgcgctgctcgacccggactactgcccgcccgagctctacgtcctccccgaggagacgcccgagcccccgccggagcccatcgccgccatcctctccccgatcctctggcagctgaacagcccggacctgttcgacatgtactcggcggggatagtgctgatgcagatggccataccgacgctgcggacgcagtcggggctcaagaacttcaacgccgagctcaggtccgccggctacgacctcaacaggtggcggcagagcgcgcggcggaggcccgacctgcagatcctggacctcgactccggccgaggctgggacctcgccaccaagctcatctcggagaggggcgccaacggcggtggccgcctgtctgccgcggccgcgttgcgccacccgtattttctcctgggtggcgaccaggccgcggcggtgctgtccaagttctcgctcagtaaatagcatccatccatggcccatggctgggtacctacgacctacgggatatatacacatcggcttattggaatcctccgatcgattcaccatccttgtatattgcgcattattgaatccttgggcataccataccggcagtgggaggcatcccaaattcaaaagggagtcatctggtaactgatgttacaacttttctgtatgggaatgctgtgaacaatgtggtgcagagtttcacacactaactaaccttacattatgctagacagagatcctacttcctttgcttcagttcctcgaatctatgcagatgcagacactcgcagagagagctcatcaactggctgcaaaattctgacctgctccttctttcagccaatcagatgtttggccatgctcgttctgatcctatactgacagacgaatccggccatggatcgcctctactgtcactggcagtacggatcgaacttcttctggagttcttcctggttgcccccgaccagcttgtcgatctccttcatgtctctcatgaagatgaacgttggagttgcgcgtacatcgaattgcgtgaccaattcctggagaaccattttaatgtggtatttaacttaagactcttcttttgttctatggacaaaagtaatagaacaaaatagataaagacagaaatcaatgtgtggaattttgaatattgatgtacgcaccggcagttcgtcgacgtcaatggagaagaaaacaagatcagaatgcttcaaggaaagctcggcgtatagtggagcagcgttcctgcatggtccacaccaagtcgcactgaactttaccacaacctgtacacgcgtggacatgccaacgtatacagttaacctgatgaacagctgaaggaatcatgctatcctgattcacagcgtttgttattactactattcatcttgggtacttactgtctgtccaagttcattcgcttcctccaatttctgctcccaacacttcaggtctggtatgatggtcactcttccggagctgtagtccagatgttcctcgtcatctacggcactctgcaagcagagaaaatctgatcagaaacctattgcctactgctgcaaacggctaatctatagtatgtatgattatatcaaacgaaacagaatggcaacccatgacacggcgagcaaagtaaaactgtagtggagttggagaaagttgatttacgct

SEQ ID NO: 219146 - DNA, 4995 bp, Zea Mays
acggccagcaggtaccctgacgatcaatacgacagattatggacacctatgattattgacgccatcgactggctggtgctatccacgacggaaaaggtgcggaacatatatgatgacctcttcgaggtgccgtcgaaggtgatgcagacggcgatcacgccgcgtgacgctaccagcagcatcaacttctattggaactccaagggctcgtcgcttgggtacataccggtcttccacttctccgaggtgctgcaggcgggcgccggcgttgttcgccagttcaacatcaacatcaacggcaagcggttcacctcccatgattattacacaccacggcacctcgaaagtggctacgtatacggtaccagaccttacaccaaccagatccggtataacgtctccatcgttaagacagacacgtcaacgctcccgcctatcatcaacgccgacgagattttcatcgtcatctctacgaccaacgttggcacggactcggaggacgtctctgctatgaaggctatcaaggcgaagtatcaggtgaagaagaactggatgggagacccgtgcgttgctgggacttttaggtgggatggactgacgtgcagctatgccatttctgatcctccaaaaattactgccctaaacatgtccttcagtggtctgaccggtgacatatcatctgctttcgcaaatctcaaggctgtccaatccttctatgccgataatccagacctttgcaccaacgccggggattcatgtcagacggcgccgcaaggaaagagcaagctagtcatctactacgtcgctgttcctatggctctgatcgtggtggcgttggcagtactgctgtgttgtcttctgcggcggcgaaagacgcgagggctagcggacgtctctgtgaagccccgggacaagactccgacgagccttgcttcaatggcggccgacgaacacagacttagctcgctgcggcttgagaaccgccggttcacatacgaggacctagagatgatcaccgacagcttcaagcgtgtcattggccggggcggctttggatacgtctacgagggcttcttggaggatggcactcaggtggcggtgaagatgaggtctcagtcgtccaatcagggtgccaaggagttcctcacggaggcacagatcttgacacggatccatcacaagaaccttgtctccatggtcggctactgcaaagatggggtgtacatggcgcttgtctacgagtacatgtcagaaggatccctgcaggagcacattgcaggaaaacgcttgacttgggggcagaggcttcgaatcgcattggaatcagcgcaagggctagagtatctgcacaggggctgcaacccgcctctgattcacagggacgtgaagaccagcaacatcctactgaacgcgaaactggaggccaaggttgctgatttcggcatgtcaaaggctctagaccgcgacacctatgcgtccacgaacactcttgttggcacaccaggatacgtcgacccagagtacctggaaacaatgcagccaagcaccaagagcgacgtgtacagtttcggcgtggtgctcctggaactggtcacagggagacctcctatcctgcacagcccacagcccaccagcgtgatccagtgggcacggcagcacctggcgcgcggcgacatcgaggtcgtggtggacgcgtccatgggaggcaaccacgacgtcaacagcgtgtggaaagccgcggaggtcgcgctccagtgcaccgagcaggcgtcggcgcagcgccccaccatgggcgacgtggtggcgcagctcctggagtgcctcgacctcgagaagggccgctccgccaacgaaagtttctgcgacggagacgacagcggctccgcgaccgcgagcttgagccacagcagcgcatttgtgacggggcgtatttttgggacggtgccaatggtggagacaggccctgccacgagacgcgcgctcgtgtgtgtctcactgtctcccctgtcccctctcccgcgtgctcgtctaccttcggctcccccatgggatgagagcgccttcctcgccatggccgcctcccacctgccccccgcagccaccctcgtcaagaagtacccaactctcctccacccgttcggcgccaaaccacacgcccagaggctgatcttcaggtgccgcgcgaccagcagcgagggtgcggacgatggctgggcgtcctttgtggacgagctcaagaggtcgctgcaggtggacccgtccgacgcggtgattagcaacgccggcgcgggtctcacatcaaataacgacctcgtcaccgcgctgccactggaaccctccgctggtccggctgcgggagacgcgaccactgccgctgccggcgcggtgagcgagctcctgggcgtggacgcgtcaggcgcggtggccacccccgaccgcctcctgagctccctgctgcacctggacgcgtccaacccggtggcgagcgtggcgggcggcgcgctgtctcgcctggacgcgctcacgtcgggactgtcggacgcgcagcggtgggcgctgttcgggttcctggccgcgacgtggctgtacctgaccgcgcggcccggggtgctgagcggcgccgtggacatgtacgtgctggcgccgctgcagctggcgctggacagcgtgctgggccggcggagcctcaagatgagcgacttcgtcgtcggcgagcgcatcggggagggctccttcggggtggtgtatgccggcgccgtggtgccgaagaacggcgccgtcgtggaggagcggtccggcaaggccaagacgagcctccagaacgacgacaggtacaaggagaaggtcatactcaagaagatcaaggtcatgacggtgggggcgaaggagtgtggggactacgaggagtggttcaactaccgcgtgtcgagagcggcgccggagtcgtgcgccgacttcctcgggagcttcgtcgccgacaagaacaaggcggagttcgtcaagggcggcaagtggctcgtctggaagtttgagggcgacaggacgctggccaattacctgagcgagcgcggcttcccgtccaacctggagcgtctcatgttcgggcgcgtgctgcagggcctgggcccgctggagcgcgaggcgctggtggtgaagcaggtgatgcggcagctgatcacgtcgctgaagcgcatccacgccacgggcatcgtgcaccgcgacatcaagccgtccaacctcgtcgtgacccgccgcgggcaggtgaagctcatcgacttcggagccgccaccgacctccgcatcggcaagaactacgtgcccgaccgcgcgctgctcgacccggactactgcccgcccgagctctacgtcctccccgaggagacgcccgagcccccgccggagcccatcgccgccatcctctccccgatcctctggcagctgaacagcccggacctgttcgacatgtactcggcggggatagtgctgatgcagatggccataccgacgctgcggacgcagtcggggctcaagaacttcaacgccgagctcaggtccgccggctacgacctcaacaggtggcggcagagcgcgcggcggaggcccgacctgcagatcctggacctcgactccggccgaggctgggacctcgccaccaagctcatctcggagaggggcgccaacggcggtggccgcctgtctgccgcggccgcgttgcgccacccgtattttctcctgggtggcgaccaggccgcggcggtgctgtccaagttctcgctcagtaaatagcatccatccatggcccatggctgggtacctacgacctacgggatatatacacatcggcttattggaatcctccgatcgattcaccatccttgtatattgcgcattattgaatccttgggcataccataccggcagtgggaggcatcccaaattcaaaagggagtcatctggtaactgatgttacaacttttctgtatgggaatgctgtgaacaatgtggtgcagagtttcacacactaactaaccttacattatgctagacagagatcctacttcctttgcttcagttcctcgaatctatgcagatgcagacactcgcagagagagctcatcaactggctgcaaaattctgacctgctccttctttcagccaatcagatgtttggccatgctcgttctgatcctatactgacagacgaatccggccatggatcgcctctactgtcactggcagtacggatcgaacttcttctggagttcttcctggttgcccccgaccagcttgtcgatctccttcatgtctctcatgaagatgaacgttggagttgcgcgtacatcgaattgcgtgaccaattcctggagaaccattttaatgtggtatttaacttaagactcttcttttgttctatggacaaaagtaatagaacaaaatagataaagacagaaatcaatgtgtggaattttgaatattgatgtacgcaccggcagttcgtcgacgtcaatggagaagaaaacaagatcagaatgcttcaaggaaagctcggcgtatagtggagcagcgttcctgcatggtccacaccaagtcgcactgaactttaccacaacctgtacacgcgtggacatgccaacgtatacagttaacctgatgaacagctgaaggaatcatgctatcctgattcacagcgtttgttattactactattcatcttgggtacttactgtctgtccaagttcattcgcttcctccaatttctgctcccaacacttcaggtctggtatgatggtcactcttccggagctgtagtccagatgttcctcgtcatctacggcactctgcaagcagagaaaatctgatcagaaacctattgcctactgctgcaaacggctaatctatagtatgtatgattatatcaaacgaaacagaatggcaacccatgacacggcgagcaaagtaaaactgtagtggagttggagaaagttgatttacgct

SEQ ID NO: 219147 - DNA, 4917 bp, Zea Mays
acggccagcaggtaccctgacgatcaatacgacagattatggacacctatgattattgacgccatcgactggctggtgctatccacgacggaaaaggtgcggaacatatatgatgacctcttcgaggtgccgtcgaaggtgatgcagacggcgatcacgccgcgtgacgctaccagcagcatcaacttctattggaactccaagggctcgtcgcttgggtacataccggtcttccacttctccgaggtgctgcaggcgggcgccggcgttgttcgccagttcaacatcaacatcaacggcaagcggttcacctcccatgattattacacaccacggcacctcgaaagtggctacgtatacggtaccagaccttacaccaaccagatccggtataacgtctccatcgttaagacagacacgtcaacgctcccgcctatcatcaacgccgacgagattttcatcgtcatctctacgaccaacgttggcacggactcggaggacggtacgtgggatggactgacgtgcagctatgccatttctgatcctccaaaaattactgccctaaacatgtccttcagtggtctgaccggtgacatatcatctgctttcgcaaatctcaaggctgtccaatccttctatgccgataatccagacctttgcaccaacgccggggattcatgtcagacggcgccgcaaggaaagagcaagctagtcatctactacgtcgctgttcctatggctctgatcgtggtggcgttggcagtactgctgtgttgtcttctgcggcggcgaaagacgcgagggctagcggacgtctctgtgaagccccgggacaagactccgacgagccttgcttcaatggcggccgacgaacacagacttagctcgctgcggcttgagaaccgccggttcacatacgaggacctagagatgatcaccgacagcttcaagcgtgtcattggccggggcggctttggatacgtctacgagggcttcttggaggatggcactcaggtggcggtgaagatgaggtctcagtcgtccaatcagggtgccaaggagttcctcacggaggcacagatcttgacacggatccatcacaagaaccttgtctccatggtcggctactgcaaagatggggtgtacatggcgcttgtctacgagtacatgtcagaaggatccctgcaggagcacattgcaggaaaacgcttgacttgggggcagaggcttcgaatcgcattggaatcagcgcaagggctagagtatctgcacaggggctgcaacccgcctctgattcacagggacgtgaagaccagcaacatcctactgaacgcgaaactggaggccaaggttgctgatttcggcatgtcaaaggctctagaccgcgacacctatgcgtccacgaacactcttgttggcacaccaggatacgtcgacccagagtacctggaaacaatgcagccaagcaccaagagcgacgtgtacagtttcggcgtggtgctcctggaactggtcacagggagacctcctatcctgcacagcccacagcccaccagcgtgatccagtgggcacggcagcacctggcgcgcggcgacatcgaggtcgtggtggacgcgtccatgggaggcaaccacgacgtcaacagcgtgtggaaagccgcggaggtcgcgctccagtgcaccgagcaggcgtcggcgcagcgccccaccatgggcgacgtggtggcgcagctcctggagtgcctcgacctcgagaagggccgctccgccaacgaaagtttctgcgacggagacgacagcggctccgcgaccgcgagcttgagccacagcagcgcatttgtgacggggcgtatttttgggacggtgccaatggtggagacaggccctgccacgagacgcgcgctcgtgtgtgtctcactgtctcccctgtcccctctcccgcgtgctcgtctaccttcggctcccccatgggatgagagcgccttcctcgccatggccgcctcccacctgccccccgcagccaccctcgtcaagaagtacccaactctcctccacccgttcggcgccaaaccacacgcccagaggctgatcttcaggtgccgcgcgaccagcagcgagggtgcggacgatggctgggcgtcctttgtggacgagctcaagaggtcgctgcaggtggacccgtccgacgcggtgattagcaacgccggcgcgggtctcacatcaaataacgacctcgtcaccgcgctgccactggaaccctccgctggtccggctgcgggagacgcgaccactgccgctgccggcgcggtgagcgagctcctgggcgtggacgcgtcaggcgcggtggccacccccgaccgcctcctgagctccctgctgcacctggacgcgtccaacccggtggcgagcgtggcgggcggcgcgctgtctcgcctggacgcgctcacgtcgggactgtcggacgcgcagcggtgggcgctgttcgggttcctggccgcgacgtggctgtacctgaccgcgcggcccggggtgctgagcggcgccgtggacatgtacgtgctggcgccgctgcagctggcgctggacagcgtgctgggccggcggagcctcaagatgagcgacttcgtcgtcggcgagcgcatcggggagggctccttcggggtggtgtatgccggcgccgtggtgccgaagaacggcgccgtcgtggaggagcggtccggcaaggccaagacgagcctccagaacgacgacaggtacaaggagaaggtcatactcaagaagatcaaggtcatgacggtgggggcgaaggagtgtggggactacgaggagtggttcaactaccgcgtgtcgagagcggcgccggagtcgtgcgccgacttcctcgggagcttcgtcgccgacaagaacaaggcggagttcgtcaagggcggcaagtggctcgtctggaagtttgagggcgacaggacgctggccaattacctgagcgagcgcggcttcccgtccaacctggagcgtctcatgttcgggcgcgtgctgcagggcctgggcccgctggagcgcgaggcgctggtggtgaagcaggtgatgcggcagctgatcacgtcgctgaagcgcatccacgccacgggcatcgtgcaccgcgacatcaagccgtccaacctcgtcgtgacccgccgcgggcaggtgaagctcatcgacttcggagccgccaccgacctccgcatcggcaagaactacgtgcccgaccgcgcgctgctcgacccggactactgcccgcccgagctctacgtcctccccgaggagacgcccgagcccccgccggagcccatcgccgccatcctctccccgatcctctggcagctgaacagcccggacctgttcgacatgtactcggcggggatagtgctgatgcagatggccataccgacgctgcggacgcagtcggggctcaagaacttcaacgccgagctcaggtccgccggctacgacctcaacaggtggcggcagagcgcgcggcggaggcccgacctgcagatcctggacctcgactccggccgaggctgggacctcgccaccaagctcatctcggagaggggcgccaacggcggtggccgcctgtctgccgcggccgcgttgcgccacccgtattttctcctgggtggcgaccaggccgcggcggtgctgtccaagttctcgctcagtaaatagcatccatccatggcccatggctgggtacctacgacctacgggatatatacacatcggcttattggaatcctccgatcgattcaccatccttgtatattgcgcattattgaatccttgggcataccataccggcagtgggaggcatcccaaattcaaaagggagtcatctggtaactgatgttacaacttttctgtatgggaatgctgtgaacaatgtggtgcagagtttcacacactaactaaccttacattatgctagacagagatcctacttcctttgcttcagttcctcgaatctatgcagatgcagacactcgcagagagagctcatcaactggctgcaaaattctgacctgctccttctttcagccaatcagatgtttggccatgctcgttctgatcctatactgacagacgaatccggccatggatcgcctctactgtcactggcagtacggatcgaacttcttctggagttcttcctggttgcccccgaccagcttgtcgatctccttcatgtctctcatgaagatgaacgttggagttgcgcgtacatcgaattgcgtgaccaattcctggagaaccattttaatgtggtatttaacttaagactcttcttttgttctatggacaaaagtaatagaacaaaatagataaagacagaaatcaatgtgtggaattttgaatattgatgtacgcaccggcagttcgtcgacgtcaatggagaagaaaacaagatcagaatgcttcaaggaaagctcggcgtatagtggagcagcgttcctgcatggtccacaccaagtcgcactgaactttaccacaacctgtacacgcgtggacatgccaacgtatacagttaacctgatgaacagctgaaggaatcatgctatcctgattcacagcgtttgttattactactattcatcttgggtacttactgtctgtccaagttcattcgcttcctccaatttctgctcccaacacttcaggtctggtatgatggtcactcttccggagctgtagtccagatgttcctcgtcatctacggcactctgcaagcagagaaaatctgatcagaaacctattgcctactgctgcaaacggctaatctatagtatgtatgattatatcaaacgaaacagaatggcaacccatgacacggcgagcaaagtaaaactgtagtggagttggagaaagttgatttacgct

SEQ ID NO: 219148 - DNA, 5070 bp, Zea Mays
acggccagcaggtaccctgacgatcaatacgacagattatggacacctatgattattgacgccatcgactggctggtgctatccacgacggaaaaggtgcggaacatatatgatgacctcttcgaggtgccgtcgaaggtgatgcagacggcgatcacgccgcgtgacgctaccagcagcatcaacttctattggaactccaagggctcgtcgcttgggtacataccggtcttccacttctccgaggtgctgcaggcgggcgccggcgttgttcgccagttcaacatcaacatcaacggcaagcggttcacctcccatgattattacacaccacggcacctcgaaagtggctacgtatacggtaccagaccttacaccaaccagatccggtataacgtctccatcgttaagacagacacgtcaacgctcccgcctatcatcaacgccgacgagattttcatcgtcatctctacgaccaacgttggcacggactcggaggacggtacgtgggatggactgacgtgcagctatgccatttctgatcctccaaaaattactgccctaaacatgtccttcagtggtctgaccggtgacatatcatctgctttcgcaaatctcaaggctgtccaatccttggatttgtcacacaacaacctgacgggctcaatccctagctccctgtcacaactgccgtcactgacaactctagatttgacggggaatcagctcagcggaccaataccctctagtcttctcaaaagaatccaagacggctccttaaacctaatctatgccgataatccagacctttgcaccaacgccggggattcatgtcagacggcgccgcaaggaaagagcaagctagtcatctactacgtcgctgttcctatggctctgatcgtggtggcgttggcagtactgctgtgttgtcttctgcggcggcgaaagacgcgagggctagcggacgtctctgtgaagccccgggacaagactccgacgagccttgcttcaatggcggccgacgaacacagacttagctcgctgcggcttgagaaccgccggttcacatacgaggacctagagatgatcaccgacagcttcaagcgtgtcattggccggggcggctttggatacgtctacgagggcttcttggaggatggcactcaggtggcggtgaagatgaggtctcagtcgtccaatcagggtgccaaggagttcctcacggaggcacagatcttgacacggatccatcacaagaaccttgtctccatggtcggctactgcaaagatggggtgtacatggcgcttgtctacgagtacatgtcagaaggatccctgcaggagcacattgcaggaaaacgcttgacttgggggcagaggcttcgaatcgcattggaatcagcgcaagggctagagtatctgcacaggggctgcaacccgcctctgattcacagggacgtgaagaccagcaacatcctactgaacgcgaaactggaggccaaggttgctgatttcggcatgtcaaaggctctagaccgcgacacctatgcgtccacgaacactcttgttggcacaccaggatacgtcgacccagagtacctggaaacaatgcagccaagcaccaagagcgacgtgtacagtttcggcgtggtgctcctggaactggtcacagggagacctcctatcctgcacagcccacagcccaccagcgtgatccagtgggcacggcagcacctggcgcgcggcgacatcgaggtcgtggtggacgcgtccatgggaggcaaccacgacgtcaacagcgtgtggaaagccgcggaggtcgcgctccagtgcaccgagcaggcgtcggcgcagcgccccaccatgggcgacgtggtggcgcagctcctggagtgcctcgacctcgagaagggccgctccgccaacgaaagtttctgcgacggagacgacagcggctccgcgaccgcgagcttgagccacagcagcgcatttgtgacggggcgtatttttgggacggtgccaatggtggagacaggccctgccacgagacgcgcgctcgtgtgtgtctcactgtctcccctgtcccctctcccgcgtgctcgtctaccttcggctcccccatgggatgagagcgccttcctcgccatggccgcctcccacctgccccccgcagccaccctcgtcaagaagtacccaactctcctccacccgttcggcgccaaaccacacgcccagaggctgatcttcaggtgccgcgcgaccagcagcgagggtgcggacgatggctgggcgtcctttgtggacgagctcaagaggtcgctgcaggtggacccgtccgacgcggtgattagcaacgccggcgcgggtctcacatcaaataacgacctcgtcaccgcgctgccactggaaccctccgctggtccggctgcgggagacgcgaccactgccgctgccggcgcggtgagcgagctcctgggcgtggacgcgtcaggcgcggtggccacccccgaccgcctcctgagctccctgctgcacctggacgcgtccaacccggtggcgagcgtggcgggcggcgcgctgtctcgcctggacgcgctcacgtcgggactgtcggacgcgcagcggtgggcgctgttcgggttcctggccgcgacgtggctgtacctgaccgcgcggcccggggtgctgagcggcgccgtggacatgtacgtgctggcgccgctgcagctggcgctggacagcgtgctgggccggcggagcctcaagatgagcgacttcgtcgtcggcgagcgcatcggggagggctccttcggggtggtgtatgccggcgccgtggtgccgaagaacggcgccgtcgtggaggagcggtccggcaaggccaagacgagcctccagaacgacgacaggtacaaggagaaggtcatactcaagaagatcaaggtcatgacggtgggggcgaaggagtgtggggactacgaggagtggttcaactaccgcgtgtcgagagcggcgccggagtcgtgcgccgacttcctcgggagcttcgtcgccgacaagaacaaggcggagttcgtcaagggcggcaagtggctcgtctggaagtttgagggcgacaggacgctggccaattacctgagcgagcgcggcttcccgtccaacctggagcgtctcatgttcgggcgcgtgctgcagggcctgggcccgctggagcgcgaggcgctggtggtgaagcaggtgatgcggcagctgatcacgtcgctgaagcgcatccacgccacgggcatcgtgcaccgcgacatcaagccgtccaacctcgtcgtgacccgccgcgggcaggtgaagctcatcgacttcggagccgccaccgacctccgcatcggcaagaactacgtgcccgaccgcgcgctgctcgacccggactactgcccgcccgagctctacgtcctccccgaggagacgcccgagcccccgccggagcccatcgccgccatcctctccccgatcctctggcagctgaacagcccggacctgttcgacatgtactcggcggggatagtgctgatgcagatggccataccgacgctgcggacgcagtcggggctcaagaacttcaacgccgagctcaggtccgccggctacgacctcaacaggtggcggcagagcgcgcggcggaggcccgacctgcagatcctggacctcgactccggccgaggctgggacctcgccaccaagctcatctcggagaggggcgccaacggcggtggccgcctgtctgccgcggccgcgttgcgccacccgtattttctcctgggtggcgaccaggccgcggcggtgctgtccaagttctcgctcagtaaatagcatccatccatggcccatggctgggtacctacgacctacgggatatatacacatcggcttattggaatcctccgatcgattcaccatccttgtatattgcgcattattgaatccttgggcataccataccggcagtgggaggcatcccaaattcaaaagggagtcatctggtaactgatgttacaacttttctgtatgggaatgctgtgaacaatgtggtgcagagtttcacacactaactaaccttacattatgctagacagagatcctacttcctttgcttcagttcctcgaatctatgcagatgcagacactcgcagagagagctcatcaactggctgcaaaattctgacctgctccttctttcagccaatcagatgtttggccatgctcgttctgatcctatactgacagacgaatccggccatggatcgcctctactgtcactggcagtacggatcgaacttcttctggagttcttcctggttgcccccgaccagcttgtcgatctccttcatgtctctcatgaagatgaacgttggagttgcgcgtacatcgaattgcgtgaccaattcctggagaaccattttaatgtggtatttaacttaagactcttcttttgttctatggacaaaagtaatagaacaaaatagataaagacagaaatcaatgtgtggaattttgaatattgatgtacgcaccggcagttcgtcgacgtcaatggagaagaaaacaagatcagaatgcttcaaggaaagctcggcgtatagtggagcagcgttcctgcatggtccacaccaagtcgcactgaactttaccacaacctgtacacgcgtggacatgccaacgtatacagttaacctgatgaacagctgaaggaatcatgctatcctgattcacagcgtttgttattactactattcatcttgggtacttactgtctgtccaagttcattcgcttcctccaatttctgctcccaacacttcaggtctggtatgatggtcactcttccggagctgtagtccagatgttcctcgtcatctacggcactctgcaagcagagaaaatctgatcagaaacctattgcctactgctgcaaacggctaatctatagtatgtatgattatatcaaacgaaacagaatggcaacccatgacacggcgagcaaagtaaaactgtagtggagttggagaaagttgatttacgct

SEQ ID NO: 219149 - DNA, 4938 bp, Zea Mays
acggccagcaggtaccctgacgatcaatacgacagattatggacacctatgattattgacgccatcgactggctggtgctatccacgacggaaaaggtgcggaacatatatgatgacctcttcgaggtgccgtcgaaggtgatgcagacggcgatcacgccgcgtgacgctaccagcagcatcaacttctattggaactccaagggctcgtcgcttgggtacataccggtcttccacttctccgaggtgctgcaggcgggcgccggcgttgttcgccagttcaacatcaacatcaacggcaagcggttcacctcccatgattattacacaccacggcacctcgaaagtggctacgtatacggtaccagaccttacaccaaccagatccggtataacgtctccatcgttaagacagacacgtcaacgctcccgcctatcatcaacgccgacgagattttcatcgtcatctctacgaccaacgttggcacggactcggaggacggtacgtgggatggactgacgtgcagctatgccatttctgatcctccaaaaattactgccctaaacatgtccttcagtggtctgaccggtgacatatcatctgctttcgcaaatctcaaggctgtccaatccttggatttgtcacacaacaacctgacgggctcaatccctagctccctgtcacaactgccgtcactgacaactctagatttgacggggaatcagctcagcggaccaataccctctagtcttctcaaaagaatccaagacggctccttaaacctaatctatgccgataatccagacctttgcaccaacgccggggattcatgtcagacggcgccgcaaggaaagagcaagctagtcatctactacgtcgctgttcctatggctctgatcgtggtggcgttggcagtactgctgtgttgtcttctgcggcggcgaaagacgcgagggctagcggacgtctctgtgaagccccgggacaagactccgacgagccttgcttcaatggcggccgacgaacacagacttagctcgctgcggcttgagaaccgccggttcacatacgaggacctagagatgatcaccgacagcttcaagcgtgtcattggccggggcggctttggatacgtctacgagggcttcttggaggatggcactcaggtggcggtgaagatgaggtctcagtcgtccaatcagggtgccaaggagttcctcacggaggcacagatcttgacacggatccatcacaagaaccttgtctccatggtcggctactgcaaagatggggtgtacatggcgcttgtctacgagtacatgtcagaaggatccctgcaggagcacattgcaggaaaacgcttgacttgggggcagaggcttcgaatcgcattggaatcagcgcaagggctagagtatctgcacaggggctgcaacccgcctctgattcacagggacgtgaagaccagcaacatcctactgaacgcgaaactggaggccaaggttgctgatttcggcatgtcaaaggctctagaccgcgacacctatgcgtccacgaacactcttgttggcacaccaggatacgtcgacccagagtaccacctggcgcgcggcgacatcgaggtcgtggtggacgcgtccatgggaggcaaccacgacgtcaacagcgtgtggaaagccgcggaggtcgcgctccagtgcaccgagcaggcgtcggcgcagcgccccaccatgggcgacgtggtggcgcagctcctggagtgcctcgacctcgagaagggccgctccgccaacgaaagtttctgcgacggagacgacagcggctccgcgaccgcgagcttgagccacagcagcgcatttgtgacggggcgtatttttgggacggtgccaatggtggagacaggccctgccacgagacgcgcgctcgtgtgtgtctcactgtctcccctgtcccctctcccgcgtgctcgtctaccttcggctcccccatgggatgagagcgccttcctcgccatggccgcctcccacctgccccccgcagccaccctcgtcaagaagtacccaactctcctccacccgttcggcgccaaaccacacgcccagaggctgatcttcaggtgccgcgcgaccagcagcgagggtgcggacgatggctgggcgtcctttgtggacgagctcaagaggtcgctgcaggtggacccgtccgacgcggtgattagcaacgccggcgcgggtctcacatcaaataacgacctcgtcaccgcgctgccactggaaccctccgctggtccggctgcgggagacgcgaccactgccgctgccggcgcggtgagcgagctcctgggcgtggacgcgtcaggcgcggtggccacccccgaccgcctcctgagctccctgctgcacctggacgcgtccaacccggtggcgagcgtggcgggcggcgcgctgtctcgcctggacgcgctcacgtcgggactgtcggacgcgcagcggtgggcgctgttcgggttcctggccgcgacgtggctgtacctgaccgcgcggcccggggtgctgagcggcgccgtggacatgtacgtgctggcgccgctgcagctggcgctggacagcgtgctgggccggcggagcctcaagatgagcgacttcgtcgtcggcgagcgcatcggggagggctccttcggggtggtgtatgccggcgccgtggtgccgaagaacggcgccgtcgtggaggagcggtccggcaaggccaagacgagcctccagaacgacgacaggtacaaggagaaggtcatactcaagaagatcaaggtcatgacggtgggggcgaaggagtgtggggactacgaggagtggttcaactaccgcgtgtcgagagcggcgccggagtcgtgcgccgacttcctcgggagcttcgtcgccgacaagaacaaggcggagttcgtcaagggcggcaagtggctcgtctggaagtttgagggcgacaggacgctggccaattacctgagcgagcgcggcttcccgtccaacctggagcgtctcatgttcgggcgcgtgctgcagggcctgggcccgctggagcgcgaggcgctggtggtgaagcaggtgatgcggcagctgatcacgtcgctgaagcgcatccacgccacgggcatcgtgcaccgcgacatcaagccgtccaacctcgtcgtgacccgccgcgggcaggtgaagctcatcgacttcggagccgccaccgacctccgcatcggcaagaactacgtgcccgaccgcgcgctgctcgacccggactactgcccgcccgagctctacgtcctccccgaggagacgcccgagcccccgccggagcccatcgccgccatcctctccccgatcctctggcagctgaacagcccggacctgttcgacatgtactcggcggggatagtgctgatgcagatggccataccgacgctgcggacgcagtcggggctcaagaacttcaacgccgagctcaggtccgccggctacgacctcaacaggtggcggcagagcgcgcggcggaggcccgacctgcagatcctggacctcgactccggccgaggctgggacctcgccaccaagctcatctcggagaggggcgccaacggcggtggccgcctgtctgccgcggccgcgttgcgccacccgtattttctcctgggtggcgaccaggccgcggcggtgctgtccaagttctcgctcagtaaatagcatccatccatggcccatggctgggtacctacgacctacgggatatatacacatcggcttattggaatcctccgatcgattcaccatccttgtatattgcgcattattgaatccttgggcataccataccggcagtgggaggcatcccaaattcaaaagggagtcatctggtaactgatgttacaacttttctgtatgggaatgctgtgaacaatgtggtgcagagtttcacacactaactaaccttacattatgctagacagagatcctacttcctttgcttcagttcctcgaatctatgcagatgcagacactcgcagagagagctcatcaactggctgcaaaattctgacctgctccttctttcagccaatcagatgtttggccatgctcgttctgatcctatactgacagacgaatccggccatggatcgcctctactgtcactggcagtacggatcgaacttcttctggagttcttcctggttgcccccgaccagcttgtcgatctccttcatgtctctcatgaagatgaacgttggagttgcgcgtacatcgaattgcgtgaccaattcctggagaaccattttaatgtggtatttaacttaagactcttcttttgttctatggacaaaagtaatagaacaaaatagataaagacagaaatcaatgtgtggaattttgaatattgatgtacgcaccggcagttcgtcgacgtcaatggagaagaaaacaagatcagaatgcttcaaggaaagctcggcgtatagtggagcagcgttcctgcatggtccacaccaagtcgcactgaactttaccacaacctgtacacgcgtggacatgccaacgtatacagttaacctgatgaacagctgaaggaatcatgctatcctgattcacagcgtttgttattactactattcatcttgggtacttactgtctgtccaagttcattcgcttcctccaatttctgctcccaacacttcaggtctggtatgatggtcactcttccggagctgtagtccagatgttcctcgtcatctacggcactctgcaagcagagaaaatctgatcagaaacctattgcctactgctgcaaacggctaatctatagtatgtatgattatatcaaacgaaacagaatggcaacccatgacacggcgagcaaagtaaaactgtagtggagttggagaaagttgatttacgct

SEQ ID NO: 219150 - DNA, 4863 bp, Zea Mays
acggccagcaggtaccctgacgatcaatacgacagattatggacacctatgattattgacgccatcgactggctggtgctatccacgacggaaaaggtgcggaacatatatgatgacctcttcgaggtgccgtcgaaggtgatgcagacggcgatcacgccgcgtgacgctaccagcagcatcaacttctattggaactccaagggctcgtcgcttgggtacataccggtcttccacttctccgaggtgctgcaggcgggcgccggcgttgttcgccagttcaacatcaacatcaacggcaagcggttcacctcccatgattattacacaccacggcacctcgaaagtggctacgtatacggtaccagaccttacaccaaccagatccggtataacgtctccatcgttaagacagacacgtcaacgctcccgcctatcatcaacgccgacgagattttcatcgtcatctctacgaccaacgttggcacggactcggaggacgtctctgctatgaaggctatcaaggcgaagtatcaggtgaagaagaactggatgggagacccgtgcgttgctgggacttttaggtgggatggactgacgtgcagctatgccatttctgatcctccaaaaattactgccctaaacatgtccttcagtggtctgaccggtgacatatcatctgctttcgcaaatctcaaggctgtccaatccttctatgccgataatccagacctttgcaccaacgccggggattcatgtcagacggcgccgcaaggaaagagcaagctagtcatctactacgtcgctgttcctatggctctgatcgtggtggcgttggcagtactgctgtgttgtcttctgcggcggcgaaagacgcgagggctagcggacgtctctgtgaagccccgggacaagactccgacgagccttgcttcaatggcggccgacgaacacagacttagctcgctgcggcttgagaaccgccggttcacatacgaggacctagagatgatcaccgacagcttcaagcgtgtcattggccggggcggctttggatacgtctacgagggcttcttggaggatggcactcaggtggcggtgaagatgaggtctcagtcgtccaatcagggtgccaaggagttcctcacggaggcacagatcttgacacggatccatcacaagaaccttgtctccatggtcggctactgcaaagatggggtgtacatggcgcttgtctacgagtacatgtcagaaggatccctgcaggagcacattgcaggaaaacgcttgacttgggggcagaggcttcgaatcgcattggaatcagcgcaagggctagagtatctgcacaggggctgcaacccgcctctgattcacagggacgtgaagaccagcaacatcctactgaacgcgaaactggaggccaaggttgctgatttcggcatgtcaaaggctctagaccgcgacacctatgcgtccacgaacactcttgttggcacaccaggatacgtcgacccagagtaccacctggcgcgcggcgacatcgaggtcgtggtggacgcgtccatgggaggcaaccacgacgtcaacagcgtgtggaaagccgcggaggtcgcgctccagtgcaccgagcaggcgtcggcgcagcgccccaccatgggcgacgtggtggcgcagctcctggagtgcctcgacctcgagaagggccgctccgccaacgaaagtttctgcgacggagacgacagcggctccgcgaccgcgagcttgagccacagcagcgcatttgtgacggggcgtatttttgggacggtgccaatggtggagacaggccctgccacgagacgcgcgctcgtgtgtgtctcactgtctcccctgtcccctctcccgcgtgctcgtctaccttcggctcccccatgggatgagagcgccttcctcgccatggccgcctcccacctgccccccgcagccaccctcgtcaagaagtacccaactctcctccacccgttcggcgccaaaccacacgcccagaggctgatcttcaggtgccgcgcgaccagcagcgagggtgcggacgatggctgggcgtcctttgtggacgagctcaagaggtcgctgcaggtggacccgtccgacgcggtgattagcaacgccggcgcgggtctcacatcaaataacgacctcgtcaccgcgctgccactggaaccctccgctggtccggctgcgggagacgcgaccactgccgctgccggcgcggtgagcgagctcctgggcgtggacgcgtcaggcgcggtggccacccccgaccgcctcctgagctccctgctgcacctggacgcgtccaacccggtggcgagcgtggcgggcggcgcgctgtctcgcctggacgcgctcacgtcgggactgtcggacgcgcagcggtgggcgctgttcgggttcctggccgcgacgtggctgtacctgaccgcgcggcccggggtgctgagcggcgccgtggacatgtacgtgctggcgccgctgcagctggcgctggacagcgtgctgggccggcggagcctcaagatgagcgacttcgtcgtcggcgagcgcatcggggagggctccttcggggtggtgtatgccggcgccgtggtgccgaagaacggcgccgtcgtggaggagcggtccggcaaggccaagacgagcctccagaacgacgacaggtacaaggagaaggtcatactcaagaagatcaaggtcatgacggtgggggcgaaggagtgtggggactacgaggagtggttcaactaccgcgtgtcgagagcggcgccggagtcgtgcgccgacttcctcgggagcttcgtcgccgacaagaacaaggcggagttcgtcaagggcggcaagtggctcgtctggaagtttgagggcgacaggacgctggccaattacctgagcgagcgcggcttcccgtccaacctggagcgtctcatgttcgggcgcgtgctgcagggcctgggcccgctggagcgcgaggcgctggtggtgaagcaggtgatgcggcagctgatcacgtcgctgaagcgcatccacgccacgggcatcgtgcaccgcgacatcaagccgtccaacctcgtcgtgacccgccgcgggcaggtgaagctcatcgacttcggagccgccaccgacctccgcatcggcaagaactacgtgcccgaccgcgcgctgctcgacccggactactgcccgcccgagctctacgtcctccccgaggagacgcccgagcccccgccggagcccatcgccgccatcctctccccgatcctctggcagctgaacagcccggacctgttcgacatgtactcggcggggatagtgctgatgcagatggccataccgacgctgcggacgcagtcggggctcaagaacttcaacgccgagctcaggtccgccggctacgacctcaacaggtggcggcagagcgcgcggcggaggcccgacctgcagatcctggacctcgactccggccgaggctgggacctcgccaccaagctcatctcggagaggggcgccaacggcggtggccgcctgtctgccgcggccgcgttgcgccacccgtattttctcctgggtggcgaccaggccgcggcggtgctgtccaagttctcgctcagtaaatagcatccatccatggcccatggctgggtacctacgacctacgggatatatacacatcggcttattggaatcctccgatcgattcaccatccttgtatattgcgcattattgaatccttgggcataccataccggcagtgggaggcatcccaaattcaaaagggagtcatctggtaactgatgttacaacttttctgtatgggaatgctgtgaacaatgtggtgcagagtttcacacactaactaaccttacattatgctagacagagatcctacttcctttgcttcagttcctcgaatctatgcagatgcagacactcgcagagagagctcatcaactggctgcaaaattctgacctgctccttctttcagccaatcagatgtttggccatgctcgttctgatcctatactgacagacgaatccggccatggatcgcctctactgtcactggcagtacggatcgaacttcttctggagttcttcctggttgcccccgaccagcttgtcgatctccttcatgtctctcatgaagatgaacgttggagttgcgcgtacatcgaattgcgtgaccaattcctggagaaccattttaatgtggtatttaacttaagactcttcttttgttctatggacaaaagtaatagaacaaaatagataaagacagaaatcaatgtgtggaattttgaatattgatgtacgcaccggcagttcgtcgacgtcaatggagaagaaaacaagatcagaatgcttcaaggaaagctcggcgtatagtggagcagcgttcctgcatggtccacaccaagtcgcactgaactttaccacaacctgtacacgcgtggacatgccaacgtatacagttaacctgatgaacagctgaaggaatcatgctatcctgattcacagcgtttgttattactactattcatcttgggtacttactgtctgtccaagttcattcgcttcctccaatttctgctcccaacacttcaggtctggtatgatggtcactcttccggagctgtagtccagatgttcctcgtcatctacggcactctgcaagcagagaaaatctgatcagaaacctattgcctactgctgcaaacggctaatctatagtatgtatgattatatcaaacgaaacagaatggcaacccatgacacggcgagcaaagtaaaactgtagtggagttggagaaagttgatttacgct

SEQ ID NO: 219151 - DNA, 970 bp, Zea Mays
ctttctccaactccactacagttttactttgctcgccgtgtcatggagtgccgtagatgacgaggaacatctggactacagctccggaagagtgaccatcataccagacctgaagtgttgggagcagaaattggaggaagcgaatgaacttggacagacagttgtggtaaagttcagtgcgacttggtgtggaccatgcaggaacgctgctccactatacgccgagctttccttgaagcattctgatcttgttttcttctccattgacgtcgacgaactgccggaattggtcacgcaattcgatgtacgcgcaactccaacgttcatcttcatgagagacatgaaggagatcgacaagctggtcgggggcaaccaggaagaactccagaagaagttcgatccgtactgccagtgacagtagaggcgatccatggccggattcgtctgtcagtataggatcagaacgagcatggccaaacatctgattggctgaaagaaggagcaggtcagaattttgcagccagttgatgagctctctctgcgagtgtctgcatctgcatagattcgaggaactgaagcaaaggaagtaggatctctgtctagcataatgtaaggttagttagtgtgtgaaactctgcaccacattgttcacagcattcccatacagaaaagttgtaacatcagttaccagatgactcccttttgaatttgggatgcctcccactgccggtatggtatgcccaaggattcaataatgcgcaatatacaaggatggtgaatcgatcggaggattccaataagccgatgtgtatatatcccgtaggtcgtaggtacccagccatgggccatggatggatgctatttactgagcgagaacttggacagcaccgccgcggcctggtcgccacccaggagaaaatacgggtggcgcaacgcggccgcggcagacaggcggccaccgccgttggcg

SEQ ID NO: 219152 - DNA, 1211 bp, Zea Mays
caacgtgccgccacggttaccagggagcttgccccggtaatggcggtggctcgttccctcccctagcccccggcgtcacccgtccctcccctcctgccgctgccgccgccgccgccgccgggataccgaccgccctcggtcctccgcggccgcatcacgccacgcgaccgaccttccctgctgcggcgtttcggaaacaaaacggagaagtgtcgtcccttgcagagggttcaggggtctggatatcctgacgaaactgactcgagccgatggggtgctgtggaagcagtgccgtagatgacgaggaacatctggactacagctccggaagagtgaccatcataccagacctgaagtgttgggagcagaaattggaggaagcgaatgaacttggacagacagttgtggtaaagttcagtgcgacttggtgtggaccatgcaggaacgctgctccactatacgccgagctttccttgaagcattctgatcttgttttcttctccattgacgtcgacgaactgccggaattggtcacgcaattcgatgtacgcgcaactccaacgttcatcttcatgagagacatgaaggagatcgacaagctggtcgggggcaaccaggaagaactccagaagaagttcgatccgtactgccagtgacagtagaggcgatccatggccggattcgtctgtcagtataggatcagaacgagcatggccaaacatctgattggctgaaagaaggagcaggtcagaattttgcagccagttgatgagctctctctgcgagtgtctgcatctgcatagattcgaggaactgaagcaaaggaagtaggatctctgtctagcataatgtaaggttagttagtgtgtgaaactctgcaccacattgttcacagcattcccatacagaaaagttgtaacatcagttaccagatgactcccttttgaatttgggatgcctcccactgccggtatggtatgcccaaggattcaataatgcgcaatatacaaggatggtgaatcgatcggaggattccaataagccgatgtgtatatatcccgtaggtcgtaggtacccagccatgggccatggatggatgctatttactgagcgagaacttggacagcaccgccgcggcctggtcgccacccaggagaaaatacgggtggcgcaacgcggccgcggcagacaggcggccaccgccgttggcg

SEQ ID NO: 219153 - DNA, 2144 bp, Zea Mays
gaaaagctgaaacacacgatatatacatgctcctaactcctcctgggaccccacgtgttcctgcactggagggcgctgagaaaacaccatcctcaaatatattaccgaagcgcactacaactagatcatcctcaactaccagagcatctaggctttcaatatctcaaacagagaatgggaattcgacgattcccactagacctgcaagaagtaactctgtcagccgatcatctatccagtcagctctcatgaatggcaacaacaggacatcagttctgaatacaagcatttcttcagtcacttcaagacctacaactcctagtaggcgaagcagcacagttggcacaccaaagcattcagctccagctgcacgtccagtgcctgcaagatcctctactcctgttaatactcgtccatctacaccagcaaaaactcgcccatctactcctacgagaactcgtccaacagcaccaaactcttcaactgattccgctgctgccaagactacattcacacataatgcaaggccatcaactccaaattcccggtcccgtattgttcccaattcatcttcaagtgcaactcatgtaataagccgtccgagcgcctccttgagtgcaacaagcagaccagggtcttcctcaggtaatgttcctgggataagccgtgccacctcattgtcctcaagttcggttccttcaatgagccgttccagctcacgatcatctacacctacacgacagcctgcaattcgctcatcagctccagctattggtcgttctccttctgttggacggacttctagcatcaacagctttacgacttcgtccaggtctgcagccagtactggcaggaactcagcaccttcatctgctccatcatctcgtccaagttctccaaacccacgaccccgagctccagtgcgacctcttgatatccccgattttccaaatgaaactccaccaaatctaaggacaaaattacctgaaagaccaccatctgctggcagatcacggccaggaatggctttaggcataagatcaaccccaaatactgaaccttcagctgcctcagctcctgtgaagaagatctctgtgcctgctgtgagccgaagtaaattttctgatgcatcatcaaagacctctactctcacaaatggacaccaaaatcgacaggctgacaggtccaatattgacagtcaagctaatagaccctcgagaccttccacgggtaccacagataatggatttgggaggtcgatatcaaggaggtcacttgacatggctatcaagcacatggacattcggcagaacttgggtggcattcgcggcacatccctgtttccccagagcatccgctcggctgctgccaaggtccgtccagctcgggcatcagacccagggcatggcatctcaaacggggaccagcgctacagtgacaatggaaagcagcgtgaacggacacctctcccggggactcaaacggggttctctcacgtaatggtggcagctcaaccgattcgccagacagggggagcatcgggaccaaggagaccctgagcgaactggacatctatggtagctcgcgctatgaagcgatgcttctcagggaggacgtgcggaacacaaactggctgcacgggcttgatgacaagcccgaccaaagccccctgttcgaccaccggttcgagccgctgccggagcccttcagcccgttatgacagctgctgcttgtaaattatggtcatcactatgattgactggtcgggttttctgtccttttgtgctgtcaccattacgtgagagaaccccctttgtgctgcaagatgtgtatggttccgtctgttctctgtcctataattgactggttctgcactccccccaatccaatttcagaaaccgaagacgtttgagattgcggggtttgagtctcttgatttgtgcctagagattggttttccactttccacgaattgttggactgaaagaaaaaagatctataaaagggagtaagttgctgtaatgcttggatgctcgctcgtgtgatccctgccatttatgtgctcggtttgctgtaggtgctccttgctactcttgggtagacccgcttagggtccgtttgccatttatgtgctcggtttgctg

SEQ ID NO: 219154 - DNA, 2496 bp, Zea Mays
cgcagaacttcacgctctcccacgcagcccttccagcaccaccaccaccagcagcaagcatcgtcgtcccccgtccgcctctccgcttccttccaggcttctagccctctctcctcggcatctctagcgcgggcggcatctatagtagccctagccccggccgcggcattggaggaaggcagcggcattggctgcgggaaccggagaaggaggcattgactaggtacaagcctctgtaacctgccggatccggatccgaatccgcgctgccgactgccggagtgttgcctttttgcagtttgggggcaacgaagcttgctctagtctctagagatggaggacctactgggttcggagatcgggaagaacgactacgattggctcctaactcctcctgggaccccacgtgttcctgcactggagggcgctgagaaaacaccatcctcaaatatattaccgaagcgcactacaactagatcatcctcaactaccagagcatctaggctttcaatatctcaaacagagaatgggaattcgacgattcccactagacctgcaagaagtaactctgtcagccgatcatctatccagtcagctctcatgaatggcaacaacaggacatcagttctgaatacaagcatttcttcagtcacttcaagacctacaactcctagtaggcgaagcagcacagttggcacaccaaagcattcagctccagctgcacgtccagtgcctgcaagatcctctactcctgttaatactcgtccatctacaccagcaaaaactcgcccatctactcctacgagaactcgtccaacagcaccaaactcttcaactgattccgctgctgccaagactacattcacacataatgcaaggccatcaactccaaattcccggtcccgtattgttcccaattcatcttcaagtgcaactcatgtaataagccgtccgagcgcctccttgagtgcaacaagcagaccagggtcttcctcaggtaatgttcctgggataagccgtgccacctcattgtcctcaagttcggttccttcaatgagccgttccagctcacgatcatctacacctacacgacagcctgcaattcgctcatcagctccagctattggtcgttctccttctgttggacggacttctagcatcaacagctttacgacttcgtccaggtctgcagccagtactggcaggaactcagcaccttcatctgctccatcatctcgtccaagttctccaaacccacgaccccgagctccagtgcgacctcttgatatccccgattttccaaatgaaactccaccaaatctaaggacaaaattacctgaaagaccaccatctgctggcagatcacggccaggaatggctttaggcataagatcaaccccaaatactgaaccttcagctgcctcagctcctgtgaagaagatctctgtgcctgctgtgagccgaagtaaattttctgatgcatcatcaaagacctctactctcacaaatggacaccaaaatcgacaggctgacaggtccaatattgacagtcaagctaatagaccctcgagaccttccacgggtaccacagataatggatttgggaggtcgatatcaaggaggtcacttgacatggctatcaagcacatggacattcggcagaacttgggtggcattcgcggcacatccctgtttccccagagcatccgctcggctgctgccaaggtccgtccagctcgggcatcagacccagggcatggcatctcaaacggggaccagcgctacagtgacaatggaaagcagcgtgaacggacacctctcccggggactcaaacggggttctctcacgtaatggtggcagctcaaccgattcgccagacagggggagcatcgggaccaaggagaccctgagcgaactggacatctatggtagctcgcgctatgaagcgatgcttctcagggaggacgtgcggaacacaaactggctgcacgggcttgatgacaagcccgaccaaagccccctgttcgaccaccggttcgagccgctgccggagcccttcagcccgttatgacagctgctgcttgtaaattatggtcatcactatgattgactggtcgggttttctgtccttttgtgctgtcaccattacgtgagagaaccccctttgtgctgcaagatgtgtatggttccgtctgttctctgtcctataattgactggttctgcactccccccaatccaatttcagaaaccgaagacgtttgagattgcggggtttgagtctcttgatttgtgcctagagattggttttccactttccacgaattgttggactgaaagaaaaaagatctataaaagggagtaagttgctgtaatgcttggatgctcgctcgtgtgatccctgccatttatgtgctcggtttgctgtaggtgctccttgctactcttgggtagacccgcttagggtccgtttgccatttatgtgctcggtttgctg

SEQ ID NO: 219155 - DNA, 1184 bp, Zea Mays
caggtcgcttcctcatccctcggtcccgcgtgtcgcgctcgcccagacccgaactccgcgtatcatcatcggtccaagcagaaggatcggaggcacacacgggacagtttgcagccaagatgaacgacgccgatgtcgggaagcaggtgcagcagatggtccggttcatcctgcaggaggccgacgagaaagccagcgagatcagtgttgccgccgaggaggagttcagcatcgagaagctgcagctggtggagtcggaaaaacggagggtgcggcaggagtacgagcgcaaggagaagcaggtggacgtccgcaggaagatcgagtactcgacggagctgaacgcggcgcgcatcaagctgctgcgggcgcaggacgacgtggtgaccgggatgaaggagagcgccggcgacgcgctgctccgcgtcaccaaggacgccaacgcctacaagagggtcctcaagggcctcatcgtgcagagcctgcttcgcctgagggagccggcgctggtgctgcggtgccgagaggcggaccggagcctggtggaggcggtgctggaggtggccaagaaggagtacgccgagaaggccaaggtcaacctccccaagatcatcatcgacggcaaggtctacctgccgccgcagaggaccagccgcgacgcgcatgggccgtcctgctccggcggcgtggtgctcgcgtcccaggacggcaagatcgtctgcgacaacacgctggacgccaggctcagcgtctccttcaggcaaaagctccccgagatcaggaagaaactcttcagccagcgagtatcgtcctaatgttttttttttgttactctgatcgattgttttctgaaataaaccagaagcggtccgatcctacgaagatacacaggtcctgacattgggtgaagcccgtatgtgcacgtttcggatttcgcaacatcgatttgagcttgaacagttcttcgctagcttgtcggtagaggcggcaatggctgaagttgagtctgtatcccggtggataggggacctccgcgaccgttaccctgagtcgagttgtgtcacagtctgtatctatcgctcctgaaacctgaggggcctgtattgtttgtcatgcactttgtttcttctcttctgtttgtagcctactatatccactgaaatctgaggggcctgtattgtttg

SEQ ID NO: 219156 - DNA, 1281 bp, Zea Mays
gaccttatccaccaacctccggtccacggtgactggccgcaagctcctcctctcccgcaaacacccacgcccactccattgctcctctcctccaacatcgctcacgcggtctcctctccccgctcagctccgctccgctcccggagacacgcaagcttcccgttcccgggaacgcgcactaaagatgcctccagccttcgccgccgcaccttcctcctcgatatgtggcgttcgcatcccaactgtgcgccgtttcgaagcgcaaagcacggtttccacgcccagatttatgcgtaatcgggtggcagcaaaaacacggtctacatcagcttggtccttgaaggctggcttgtgggattctctcagatctggccttttgaagaataatagcagtacagagacagtagagccaccaccagcaccacttgaagtggaagagcctttgcctgtggaaatagtactcctagaaagaacactacctgatggaagcacagaacaaattttattttcttcagccggagatgttgatgtatatgatctccaagccttatgcaataaggtaggatggccacgcaggcctctttcaaagatagcagcctcattaagaaatagctacttggttgctacactatattcaataattagatcttcagaaacagagggagaagagaagaaacagctcattgggatggcacgagcaacctcagaccatgccttcaatgcaacgatttgggatgtccttgttgatccttcataccagggtcagggtcttggtaaagcactcatggagaaagtaattcgtactttgctccagcgagacatcaacaacattacactgtttgcggataacaaagttatagatttctacaagaacctggggttcgaagttgatcctcaaggcatcaagggcatgttctggtaccccagattttagcaccagcagccagatatatcgttcgaggggttgttgtacttgaagcatctccccgttctgaaagggtaattgacaggtcagggctccacgccctgatggatctcgcacttaatatttcatccttggtgagaagctgtaattttcttcaatgctaaaacgaccatgtgatcggctcaactctccgcacccctgttgtaaccataaccccaacaaaacacgctatttgtaatacccgtgtttcatacatgcgctctagactcttgccatctgtatgtaacgtacgctttcaaatttctacattcgaaatggaaaaaaaaactgtatccatcagttatccatatgcgcac

SEQ ID NO: 219157 - DNA, 1295 bp, Zea Mays
gaccttatccaccaacctccggtccacggtgactggccgcaagctcctcctctcccgcaaacacccacgcccactccattgctcctctcctccaacatcgctcacgcggtctcctctccccgctcagctccgctccgctcccggagacacgcaagcttcccgttcccgggaacgcgcactaaagatgcctccagccttcgccgccgcaccttcctcctcgatatgtggcgttcgcatcccaactgtgcgccgtttcgaagcgcaaagcacggtttccacgcccagatttatgcgtaatcgggtggcagcaaaaacacggtctacatcagcttggtccttgaaggctggcttgtgggattctctcagatctggccttttgaagaataatagcagtacagagacagtagagccaccaccagcaccacttgaagtggaagagcctttgcctgtggaaatagtactcctagaaagaacactacctgatggaagcacagaacaaattttattttcttcagccggagatgttgatgtatatgatctccaagccttatgcaataaggtaggatggccacgcaggcctctttcaaagatagcagcctcattaagaaatagctacttggttgctacactatattcaataattagatcttcagaaacagaagttatttgacagagggagaagagaagaaacagctcattgggatggcacgagcaacctcagaccatgccttcaatgcaacgatttgggatgtccttgttgatccttcataccagggtcagggtcttggtaaagcactcatggagaaagtaattcgtactttgctccagcgagacatcaacaacattacactgtttgcggataacaaagttatagatttctacaagaacctggggttcgaagttgatcctcaaggcatcaagggcatgttctggtaccccagattttagcaccagcagccagatatatcgttcgaggggttgttgtacttgaagcatctccccgttctgaaagggtaattgacaggtcagggctccacgccctgatggatctcgcacttaatatttcatccttggtgagaagctgtaattttcttcaatgctaaaacgaccatgtgatcggctcaactctccgcacccctgttgtaaccataaccccaacaaaacacgctatttgtaatacccgtgtttcatacatgcgctctagactcttgccatctgtatgtaacgtacgctttcaaatttctacattcgaaatggaaaaaaaaactgtatccatcagttatccatatgcgcac

SEQ ID NO: 219158 - DNA, 988 bp, Zea Mays
gaccttatccaccaacctccggtccacggtgactggccgcaagctcctcctctcccgcaaacacccacgcccactccattgctcctctcctccaacatcgctcacgcggtctcctctccccgctcagctccgctccgctcccggagacacgcaagcttcccgttcccgggaacgcgcactaaagatgcctccagccttcgccgccgcaccttcctcctcgatatgtggcgttcgcatcccaactgtgcgccgtttcgaagcgcaaagcacggtttccacgcccagatttatgcgtaatcgggtggcagccggagatgttgatgtatatgatctccaagccttatgcaataagaagttatttgacagagggagaagagaagaaacagctcattgggatggcacgagcaacctcagaccatgccttcaatgcaacgatttgggatgtccttgttgatccttcataccagggtcagggtcttggtaaagcactcatggagaaagtaattcgtactttgctccagcgagacatcaacaacattacactgtttgcggataacaaagttatagatttctacaagaacctggggttcgaagttgatcctcaaggcatcaagggcatgttctggtaccccagattttagcaccagcagccagatatatcgttcgaggggttgttgtacttgaagcatctccccgttctgaaagggtaattgacaggtcagggctccacgccctgatggatctcgcacttaatatttcatccttggtgagaagctgtaattttcttcaatgctaaaacgaccatgtgatcggctcaactctccgcacccctgttgtaaccataaccccaacaaaacacgctatttgtaatacccgtgtttcatacatgcgctctagactcttgccatctgtatgtaacgtacgctttcaaatttctacattcgaaatggaaaaaaaaactgtatccatcagttatccatatgcgcac

SEQ ID NO: 219159 - DNA, 1195 bp, Zea Mays
gaccttatccaccaacctccggtccacggtgactggccgcaagctcctcctctcccgcaaacacccacgcccactccattgctcctctcctccaacatcgctcacgcggtctcctctccccgctcagctccgctccgctcccggagacacgcaagcttcccgttcccgggaacgcgcactaaagatgcctccagccttcgccgccgcaccttcctcctcgatatgtggcgttcgcatcccaactgtgcgccgtttcgaagcgcaaagcacggtttccacgcccagatttatgcgtaatcgggtggcagcaaaaacacggtctacatcagcttggtccttgaaggctggcttgtgggattctctcagatctggccttttgaagaataatagcagtacagagacagtagagccaccaccagcaccacttgaagtggaagagcctttgcctgtggaaatagtactcctagaaagaacactacctgatggaagcacagaacaaattttattttcttcagccggagatgttgatgtatatgatctccaagccttatgcaataagaagttatttgacagagggagaagagaagaaacagctcattgggatggcacgagcaacctcagaccatgccttcaatgcaacgatttgggatgtccttgttgatccttcataccagggtcagggtcttggtaaagcactcatggagaaagtaattcgtactttgctccagcgagacatcaacaacattacactgtttgcggataacaaagttatagatttctacaagaacctggggttcgaagttgatcctcaaggcatcaagggcatgttctggtaccccagattttagcaccagcagccagatatatcgttcgaggggttgttgtacttgaagcatctccccgttctgaaagggtaattgacaggtcagggctccacgccctgatggatctcgcacttaatatttcatccttggtgagaagctgtaattttcttcaatgctaaaacgaccatgtgatcggctcaactctccgcacccctgttgtaaccataaccccaacaaaacacgctatttgtaatacccgtgtttcatacatgcgctctagactcttgccatctgtatgtaacgtacgctttcaaatttctacattcgaaatggaaaaaaaaactgtatccatcagttatccatatgcgcac

SEQ ID NO: 219160 - DNA, 1074 bp, Zea Mays
gaccttatccaccaacctccggtccacggtgactggccgcaagctcctcctctcccgcaaacacccacgcccactccattgctcctctcctccaacatcgctcacgcggtctcctctccccgctcagctccgctccgctcccggagacacgcaagcttcccgttcccgggaacgcgcactaaagatgcctccagccttcgccgccgcaccttcctcctcgatatgtggcgttcgcatcccaactgtgcgccgtttcgaagcgcaaagcacggtttccacgcccagatttatgcgtaatcgggtggcagccggagatgttgatgtatatgatctccaagccttatgcaataaggtaggatggccacgcaggcctctttcaaagatagcagcctcattaagaaatagctacttggttgctacactatattcaataattagatcttcagaaacagagggagaagagaagaaacagctcattgggatggcacgagcaacctcagaccatgccttcaatgcaacgatttgggatgtccttgttgatccttcataccagggtcagggtcttggtaaagcactcatggagaaagtaattcgtactttgctccagcgagacatcaacaacattacactgtttgcggataacaaagttatagatttctacaagaacctggggttcgaagttgatcctcaaggcatcaagggcatgttctggtaccccagattttagcaccagcagccagatatatcgttcgaggggttgttgtacttgaagcatctccccgttctgaaagggtaattgacaggtcagggctccacgccctgatggatctcgcacttaatatttcatccttggtgagaagctgtaattttcttcaatgctaaaacgaccatgtgatcggctcaactctccgcacccctgttgtaaccataaccccaacaaaacacgctatttgtaatacccgtgtttcatacatgcgctctagactcttgccatctgtatgtaacgtacgctttcaaatttctacattcgaaatggaaaaaaaaactgtatccatcagttatccatatgcgcac

SEQ ID NO: 219161 - DNA, 1306 bp, Zea Mays
gaccttatccaccaacctccggtccacggtgactggccgcaagctcctcctctcccgcaaacacccacgcccactccattgctcctctcctccaacatcgctcacgcggtctcctctccccgctcagctccgctccgctcccggagacacgcaagcttcccgttcccgggaacgcgcactaaagatgcctccagccttcgccgccgcaccttcctcctcgatatgtggcgttcgcatcccaactgtgcgccgtttcgaagcgcaaagcacggtttccacgcccagatttatgcgtaatcgggtggcagcaaaaacacggtctacatcagcttggtccttgaaggctggcttgtgggattctctcagatctggccttttgaagaataatagcagtacagagacagtagagccaccaccagcaccacttgaagtggaagagcctttgcctgtggaaatagtactcctagaaagaacactacctgatggaagcacagaacaaattttattttcttcagccggagatgttgatgtatatgatctccaagccttatgcaataaggtaggatggccacgcaggcctctttcaaagatagcagcctcattaagaaatagctacttggttgctacactatattcaataattagatcttcagaaacagtgtacttgtagaagttatttgacagagggagaagagaagaaacagctcattgggatggcacgagcaacctcagaccatgccttcaatgcaacgatttgggatgtccttgttgatccttcataccagggtcagggtcttggtaaagcactcatggagaaagtaattcgtactttgctccagcgagacatcaacaacattacactgtttgcggataacaaagttatagatttctacaagaacctggggttcgaagttgatcctcaaggcatcaagggcatgttctggtaccccagattttagcaccagcagccagatatatcgttcgaggggttgttgtacttgaagcatctccccgttctgaaagggtaattgacaggtcagggctccacgccctgatggatctcgcacttaatatttcatccttggtgagaagctgtaattttcttcaatgctaaaacgaccatgtgatcggctcaactctccgcacccctgttgtaaccataaccccaacaaaacacgctatttgtaatacccgtgtttcatacatgcgctctagactcttgccatctgtatgtaacgtacgctttcaaatttctacattcgaaatggaaaaaaaaactgtatccatcagttatccatatgcgcac

SEQ ID NO: 219162 - DNA, 1338 bp, Zea Mays
gaccttatccaccaacctccggtccacggtgactggccgcaagctcctcctctcccgcaaacacccacgcccactccattgctcctctcctccaacatcgctcacgcggtctcctctccccgctcagctccgctccgctcccggagacacgcaagcttcccgttcccgggaacgcgcactaaagatgcctccagccttcgccgccgcaccttcctcctcgatatgtggcgttcgcatcccaactgtgcgccgtttcgaagcgcaaagcacggtttccacgcccagatttatgcgtaatcgggtggcagcaaaaacacggtctacatcagcttggtccttgaaggctggcttgtgggattctctcagatctggccttttgaagaataatagcagtacagagacagtagagccaccaccagcaccacttgaagtggaagagcctttgcctgtggaaatagtactcctagaaagaacactacctgatggaagcacagaacaaattttattttcttcagccggagatgttgatgtatatgatctccaagccttatgcaataaggtaggatggccacgcaggcctctttcaaagatagcagcctcattaagaaatagctacttggttgctacactatattcaataattagatcttcagaaacagaaattcatttttctagatgatgaacatcttagtgtacttgtagaagttatttgacagagggagaagagaagaaacagctcattgggatggcacgagcaacctcagaccatgccttcaatgcaacgatttgggatgtccttgttgatccttcataccagggtcagggtcttggtaaagcactcatggagaaagtaattcgtactttgctccagcgagacatcaacaacattacactgtttgcggataacaaagttatagatttctacaagaacctggggttcgaagttgatcctcaaggcatcaagggcatgttctggtaccccagattttagcaccagcagccagatatatcgttcgaggggttgttgtacttgaagcatctccccgttctgaaagggtaattgacaggtcagggctccacgccctgatggatctcgcacttaatatttcatccttggtgagaagctgtaattttcttcaatgctaaaacgaccatgtgatcggctcaactctccgcacccctgttgtaaccataaccccaacaaaacacgctatttgtaatacccgtgtttcatacatgcgctctagactcttgccatctgtatgtaacgtacgctttcaaatttctacattcgaaatggaaaaaaaaactgtatccatcagttatccatatgcgcac

SEQ ID NO: 219163 - DNA, 1584 bp, Zea Mays
cccatataaaaggcacctcataaggcactccttatcaacctgagaaggccacaagggtatcaaaaggcttaaggttgggcaagagggcgtttgagtttgtcaacaggaaacactccaacacaagttcagcctttgggaacagagaaaagagtggaaaacacaggccagaaagcagatgtatcaccaacatcagggcctgagtgagctcttcaccacgaggacatcctttccaatggagcagcatctgtttttgcgtggaggaaatgcccaaggagattctgggctggttctctcaactgatgctaaaccaaggctcaaatggacacctgagttacatcagcgatttgtagatgcagtcaatcagttaggtggagcagagaaagctactccaaaaacagtcatgaggctcatgggaatcccaggactcaccttgtaccatttgaaaagccatctccagaaatacaggctgagcaagaacctccaagctcaagcaaatgtcagtacatcaaagaatgccataggatgtacatccattgctgataggattcctggaacaagcgctgcaacaatgagcagtacaaatgtcgttccgcaggcagagaagactattcaaattggtgaagcacttcagatgcaaattgaggttcagagacagttaaatgaacaacttgaggtgcaaaggcatctacaactacgaattgaagcacaagggaaatacctacaagcagttttggagcaggcacaagaaacacttggaaaacagaatttgggtcctgcgaacctggaagatgcaaaaataaaaatatcacagttagtttcacaagtatcaactgaatgcttcagtaatgcaattacagatgtaaaaggaagttcaagtgtgcataggttagagcccagacaaatccagtttgttgaaagttcaacaaatagttatttgtctgtggccgaaggattcatcaaggagcagagactacagcaccaacagcaccatggagtactaaaagcacatgatggtagttcattattttgcagaaaaagaccgcatgaacatgagacccagtttgcccttaacagaagcctaagtgagcgtaggatggcacatttgcagaatgatgaacaatacagtaaagcagagtttgggtatgaaagtgacacagagatagtgcatgagtatactgcaccccaaaatggtggaggtagcaccaccagttcggcatcaggaagcaaagtagatgcggagaagctatatctagaagagcaaaagtgtgcaagacaggtcgctgaataccccagagaaagcaagctaatagattttgagaattcgtgttcagggaagaaacttgatctgaacacccataatgtagatgacactgatcaagcttacagacattttgacttgaatgatttcagctggagctgataatatgtaagatgatagaagcaaagaaaatgaagttaaaaataatttcttccaacattgaagtattgatacatgatcaaatgtacgtcaagaggtaccatttatgtttttaagtatttagtaatagggtacagaaatggttttcactttgggccatccggcag

SEQ ID NO: 219164 - DNA, 3580 bp, Zea Mays
tcccctcgcaggtcccggctggtcaggctcgcgcccgccagccccacccaaacctggggaactcttcgttcgtcctcttcttcccctgtcgcctttcccaaaaggccaaaaccctaaaccatacgcgcctaactccgcgtcctcccccccctccctcgaagcggccaaggcggcggcagcagtgccggcatgggcgcaatgtcggcttcgatttcgtcggtgaattggctagtcgaggatgacatccttctcaagaacgccgtcgaggctggtgcttcgttagagtccttagccagaggagctgtatgtttttcccgtaaattcactcttcatgaaatacaggaccgctggaattcattgctatatgacccagatatctcaacacaagcagcttctcggatggctgagtatgagaatgaactttctacttccgatccagccaaggcacataaacttttcaactcaaaagcaaaggatttttcatttcagaaacggaaaatagacagtgtaaagaatctatattatgcgatgagaaaaagagtacgcaatgatccacgcaacagtggcgaccttggatttcttgtcccctgttcgtgtacggcaattggtagtgagtgtatctgtggaggcctacctaacaatattgaaccagagctgaattcagtaagccgctatgggcaagtaggttcaaggtacaccattggacattcatattctgaaatgaacgaacatgcttttcatacgaagcatactgaaagcatgacaagagatggggatggcaccagtaatgttgtgtatggctactcagatgtaggccaactatatgaacatcatgcgtacacagcgaataatcatgggaatagagaagggaacaatctttctctaaagagtatcacaaattttcaggattctatgcagtttcagcagttggacaacaatcaatgtggtaatggggtggtagactcaaaggctttggtgatccctaaccatttcagtggaagtgtgcaggaacctatgcctctccaaatgattggtcaacctgagggttctgaagcaccaggtggtgcaatcttgagtcttcagcgaagcgacaggctcgctcttgctgatgataaggatgtaaaatcagaagacagggaccctctcacatttgaagcgcatttagatggtgggatatctggtttagatcacgctactgagtttatggacttcccatatttcactaatagtgaagaccttgatatcctgaatagtgaaaatcttttgaattctccaagtgagggaatccaggaggatttagacgatactgcattagttgttcatggggttagatcaaccatgcaaaatctggttcatgctgatgaagccaatatgtcctgtgatcaaatagatcttggtgatgtgaaaaataatgtagatgcttctggtataatcttatttcctacttcattagtagtgccctgtcctggcctgtatgttgagtgcaaattgaacacagaagatactgaaattccttgcaacgacgatgtttctacaccaacagagtatcctcttgaatgctgtacttctacctttgggcagaaatctgagaatactatctattccgtctcccctgcaatcagccctccatcaattgctgaacagcccaacccatccacttcagaacaaaaagaagattcagtggctcatgacgaaggtggtgtcctaggagctaaaccatcagaaggtgctttaacagttggaggccttttgcctggtaacattgacacaaatgatgcaaacacatgcatgctagctttgccttcttttagcactgctggatttggtgaaggatcaccttgtagtttaggaccacacgagagctttgataactctcatggtttgactttgcaaaattcagttcaagctcctgatcagatgcaacacaactcacttgatggtaaaccagaattaggtgacaaggctgctctacagaactgtatgccatcaaatgcactgcccgatttggatattcagaacactattgcaaatgcgccaacaccagctcaagcagaagaatgccctgactatgaaaaagatgttccaaattactatgatctagaagctttgattcttgaccaggatcttatcccgtgggaccaagactccgattttatgcatcctgaagttaccggatttcctcacccggaaagcaggaaggcattgattagattggagcaaggtgctcggtcttgtatgaacagagctatcatgtcgcatggtgcctttgcagttatctatggattgcacttgagatgctacataaaggatcctgaggttactcttggaagagagacagaagacattaaagttgacattgatttaggaaaagaagggagggcaaataagatatctcgccgacaggcggttatcaagatggatgaatctgggtattttcatattaagaacactggaaaatgtccaatctttgttaatagcaaggaaataccaagctgcaaacgcatcaacctaagctcagactcattaatcgagataaaggacatgaggtttattttccatgtaaaccaagaggctgtgaggcagtacattgatcgtgacctgaagccagaacgctaatttcccctggctttccagtcagcagcagcctgccctcctccaaatgaaaaaggtcaaaaggccgaagacccacgcgattcgagtcataaacctagcacactactttcttttcttcacctcatcaggattcaggaccacccgccggcagcagatacgcccaacaaaaaccaaccacccaccaagccagcaagcacctctccaagcagacagacgggaagggagggcaaccgagagcgatcggcgatgggctccttcctctcgagcttagtcacgccccctccggccgccgacgaccccaactgcgccgtggtggccgcccactccaaggccacctacgacgagcagtgggcggcccacaagagcagcagcaagctgatggtgatcgacttctcggcctcctggtgcgggccctgccgcttcatcgagccggccttcaaggagctggcctcccgcttctccgacgccatcttcgtcaaggtcgacgtcgacgagctcgcggaggtcgcaaggacatggaaggtagaggcgatgccaacgttcgtacttgtaaaggatgggaaggaggtaagccgtgtggttggggccaagaaggacgagcttgagaggaagatccggatgttcacgtcatcttcctcatcgtaaactcctgtggttcgcctgggacggagttgctgaagtgaaatggttcccttctctgaatgctgaaaaaaagaaaaaaaaaactatgtgaaaatgatggtagacgtgtctgggtcagtaataagagtttctaaaatctgaatgagatttgaatcgctccccgttgatgaatttctcatggtctgtgtattccaccatgattcataaggtcattctcagtgatgagttttaatacactgtttctaatgctgccacatcaaatttaaactaaccagggaactgtatagacagagtttcatccctataaagtctatcattttctatg

SEQ ID NO: 219165 - DNA, 2077 bp, Zea Mays
gtttccataatggcataaatccaaatttctcgtgaatatctcagcgccgagctcgagcccgcagtctgccatcccctttcggtggcaaccaaatccggcttgcctgcagcggatctccatctggtcggagtggatcgggtctccggtggtgtttctcgcctccgtggcggttagtggcgccggacggaccacgtccccgcagcagcggtcagcggcggctggcctagctgcggtggcttgaggcggctctcggacgggtgcctcgagctggcaccagcgggtgggtgccgcaactctcaccgctagctggtgtagaggcggcgagtcccggcgccatggagggtaggccgcaagtgtccgcttagagaggggtcaacaaagggacttgtcaagctacgacactgcggtcttcggttgccctgctcagcttgttgttgccgtacatgatccttcatgatttgtgagagatctatattccccgaatcttcaccggctctgccagatcactggcgatcttcttgccagccgcctccgctaacctgcgcggcacagtagagctcaggaaaagcggtgggactgagggagaaaagaggagatgactagcctgtcgatcacagtgatgacgctgaacttgcatgaaggcgagcagccgagcgagagtcccaacagctgggagaagcgccgggacatctgcgtcagcgtcatcaccagctactctcctaccatcctttgcacccaacaaggcttaagatggcaactggactacctacaacagtgcttgccaggttatgaacagtttggaatctcaagaaaaggctcacaggacaacactgatgaatactgcacaatattctatgaaaaggaaaaggtggagcttactgaaggtggcactttttggttgtcggaatcaccatctgttccaggaagcatttcatggggagcaaatgcaccctgcattgcaacatgggcaacgtttcaactcaaaagattagaaccacctggattcagttttcagatcgtaaatacaaatcttgatgaagttagccctcgtgctcgacgaagaagtgctttgcttacatggcaacatatagcatcgctggcccccaatttgcctgttatctattgtggaggcttcaatacacagaaggaatctatgactgggcggtttttgcttggcagatccagagaacatggtgttgttggtgatatgagagatgcttggccaaatgctcgagtgcgaaaaaatgtgtcaataatacacacatatcatggatttaaaggggagaaaaaaggtgccctagaatttcttaaattaatatttagagctctttgcctctgctgggatcgacagacacaggacttgcatgttgactggatcctatttagaggacgcccactggttcctgcactttgtgaggtcataaatgacaatatagatggcgtttatccgtcgtcgcacttccctatctttgctgagtttttgcttccacgctcagttcgcctagccgagacaccttcatagccatcgtgtcattttttttatattttttcccaatctcattctgattacggctgattgttcctttcgacgacttcaccatgaaattggggtaccacccttcaccacaattgctggtcacttcattccgcaaaacaagacaatatacacgtgcatcctttttatatatgtttccagtcagtagtcactattatgtgttgcctcagccttgctatctttttaaagttcaccttttccatatggcgttgattttcatgtatatatactgtacctttacatgctatttatcacaactgtgagagttcaagtaaatctgatgtaatgaaatttccaagctgctcttttttcacattcttatatatttgtggtcctcaggtgtcaccaaatttttcctttttttgttggctcatatttagaaacagagtagacagttcagggaataaatcactgtaagcaactccccatcacacatgaagtggtcacacggaggactctttcgtggagtggagaagctctgtagtggacgtttggtgaagaagctctgtaatgggcacatcg

SEQ ID NO: 219166 - DNA, 2434 bp, Zea Mays
gtttccataatggcataaatccaaatttctcgtgaatatctcagcgccgagctcgagcccgcagtctgccatcccctttcggtggcaaccaaatccggcttgcctgcagcggatctccatctggtcggagtggatcgggtctccggtggtgtttctcgcctccgtggcggttagtggcgccggacggaccacgtccccgcagcagcggtcagcggcggctggcctagctgcggtggcttgaggcggctctcggacgggtgcctcgagctggcaccagcgggtgggtgccgcaactctcaccgctagctggtgtagaggcggcgagtcccggcgccatggagggtaggccgcaagtgtccgcttagagaggggtcaacaaagggacttgtcaagctacgacactgcggtcttcggttgccctgctcagcttgttgttgccgtacatgatccttcatgatttgtgagagatctatattccccgaatcttcaccggctctgccagatcactggcgatcttcttgccagccgcctccgctaacctgcgcggcacagtagagctcaggaaaagcggtgggactgagggagaaaagaggagatgactagcctgtcgatcacagtgatgacgctgaacttgcatgaaggcgagcagccgagcgagagtcccaacagctgggagaagcgccgggacatctgcgtcagcgtcatcaccagctactctcctaccatcctttgcacccaacaaggcttaagatggcaactggactacctacaacagtgcttgccaggttatgaacagtttggaatctcaagaaaaggctcacaggacaacactgatgaatactgcacaatattctatgaaaaggaaaaggtggagcttactgaaggtggcactttttggttgtcggaatcaccatctgttccaggaagcatttcatggggagcaaatgcaccctgcattgcaacatgggcaacgtttcaactcaaaagattagaaccacctggattcagttttcagatcgtaaatacaaatcttgatgaagttagccctcgtgctcgacgaagaagtgctttgcttacatggcaacatatagcatcgctggcccccaatttgcctgttatctattgtggaggcttcaatacacagaaggaatctatgactgggcggtttttgcttggcagatccagagaacatggtgttgttggtgatatgagagatgcttggccaaatgctcgagtgcgaaaaaatgtgtcaataatacacacatatcatggatttaaaggtgcccctgacacttcatttaggtcttattttccagtttccgttgtaaaaactgctagggaatttttgcgtttattatgccaaagtaaaacttggaattgaggaactgacaatgttatttgatcctttattcaattcatgtcgggataaatcaattttttagtcttttggcttttacttgaaaaaaagtgccataggtcacagttttgcattatttattttatgttccttgatgacttgtactaatatgctccctgggcgaatattgagatccatccactataactagctgtcttttttttagctataactagtctttattttagcaatcttataccaaataaatattctgttgcaggggagaaaaaaggtgccctagaatttcttaaattaatatttagagctctttgcctctgctgggatcgacagacacaggacttgcatgttgactggatcctatttagaggacgcccactggttcctgcactttgtgaggtcataaatgacaatatagatggcgtttatccgtcgtcgcacttccctatctttgctgagtttttgcttccacgctcagttcgcctagccgagacaccttcatagccatcgtgtcattttttttatattttttcccaatctcattctgattacggctgattgttcctttcgacgacttcaccatgaaattggggtaccacccttcaccacaattgctggtcacttcattccgcaaaacaagacaatatacacgtgcatcctttttatatatgtttccagtcagtagtcactattatgtgttgcctcagccttgctatctttttaaagttcaccttttccatatggcgttgattttcatgtatatatactgtacctttacatgctatttatcacaactgtgagagttcaagtaaatctgatgtaatgaaatttccaagctgctcttttttcacattcttatatatttgtggtcctcaggtgtcaccaaatttttcctttttttgttggctcatatttagaaacagagtagacagttcagggaataaatcactgtaagcaactccccatcacacatgaagtggtcacacggaggactctttcgtggagtggagaagctctgtagtggacgtttggtgaagaagctctgtaatgggcacatcg

SEQ ID NO: 219167 - DNA, 2057 bp, Zea Mays
atccaaatttctcgtgaatatctcagcgccgagctcgagcccgcagtctgccatcccctttcggtggcaaccaaatccggcttgcctgcagcggatctccatctggtcggagtggatcgggtctccggtggtgtttctcgcctccgtggcggttagtggcgccggacggaccacgtccccgcagcagcggtcagcggcggctggcctagctgcggtggcttgaggcggctctcggacgggtgcctcgagctggcaccagcgggtgggtgccgcaactctcaccgctagctggtgtagaggcggcgagtcccggcgccatggagggtaggccgcaagtgtccgcttagagaggggtcaacaaagggacttgtcaagctacgacactgcggtcttcggttgccctgctcagcttgttgttgccgtacatgatccttcatgatttgtgagagatctatattccccgaatcttcaccggctctgccagatcactggcgatcttcttgccagccgcctccgctaacctgcgcggcacagtagagctcaggaaaagcggtgggactgagggagaaaagaggagatgactagcctgtcgatcacagtgatgacgctgaacttgcatgaaggcgagcagccgagcgagagtcccaacagctgggagaagcgccgggacatctgcgtcagcgtcatcaccagctactctcctaccatcctttgcacccaacaaggcttaagatggcaactggactacctacaacagtgcttgccaggttatgaacagtttggaatctcaagaaaaggctcacaggacaacactgatgaatactgcacaatattctatgaaaaggaaaaggtggagcttactgaaggtggcactttttggttgtcggaatcaccatctgttccaggaagcatttcatggggagcaaatgcaccctgcattgcaacatgggcagtttcaactcaaaagattagaaccacctggattcagttttcagatcgtaaatacaaatcttgatgaagttagccctcgtgctcgacgaagaagtgctttgcttacatggcaacatatagcatcgctggcccccaatttgcctgttatctattgtggaggcttcaatacacagaaggaatctatgactgggcggtttttgcttggcagatccagagaacatggtgttgttggtgatatgagagatgcttggccaaatgctcgagtgcgaaaaaatgtgtcaataatacacacatatcatggatttaaaggggagaaaaaaggtgccctagaatttcttaaattaatatttagagctctttgcctctgctgggatcgacagacacaggacttgcatgttgactggatcctatttagaggacgcccactggttcctgcactttgtgaggtcataaatgacaatatagatggcgtttatccgtcgtcgcacttccctatctttgctgagtttttgcttccacgctcagttcgcctagccgagacaccttcatagccatcgtgtcattttttttatattttttcccaatctcattctgattacggctgattgttcctttcgacgacttcaccatgaaattggggtaccacccttcaccacaattgctggtcacttcattccgcaaaacaagacaatatacacgtgcatcctttttatatatgtttccagtcagtagtcactattatgtgttgcctcagccttgctatctttttaaagttcaccttttccatatggcgttgattttcatgtatatatactgtacctttacatgctatttatcacaactgtgagagttcaagtaaatctgatgtaatgaaatttccaagctgctcttttttcacattcttatatatttgtggtcctcaggtgtcaccaaatttttcctttttttgttggctcatatttagaaacagagtagacagttcagggaataaatcactgtaagcaactccccatcacacatgaagtggtcacacggaggactctttcgtggagtggagaagctctgtagtggacgtttggtgaagaagctctgtaatgggcacatcg

SEQ ID NO: 219168 - DNA, 1315 bp, Zea Mays
ccatgcggaagaagcacacacacaggggtcgcgaggttatgaacagtttggaatctcaagaaaaggctcacaggacaacactgatgaatactgcacaatattctatgaaaaggaaaaggtggagcttactgaaggtggcactttttggttgtcggaatcaccatctgttccaggaagcatttcatggggagcaaatgcaccctgcattgcaacatgggcaacgtttcaactcaaaagattagaaccacctggattcagttttcagatcgtaaatacaaatcttgatgaagttagccctcgtgctcgacgaagaagtgctttgcttacatggcaacatatagcatcgctggcccccaatttgcctgttatctattgtggaggcttcaatacacagaaggaatctatgactgggcggtttttgcttggcagatccagagaacatggtgttgttggtgatatgagagatgcttggccaaatgctcgagtgcgaaaaaatgtgtcaataatacacacatatcatggatttaaaggtgccctagaatttcttaaattaatatttagagctctttgcctctgctgggatcgacagacacaggacttgcatgttgactggatcctatttagaggacgcccactggttcctgcactttgtgaggtcataaatgacaatatagatggcgtttatccgtcgtcgcacttccctatctttgctgagtttttgcttccacgctcagttcgcctagccgagacaccttcatagccatcgtgtcattttttttatattttttcccaatctcattctgattacggctgattgttcctttcgacgacttcaccatgaaattggggtaccacccttcaccacaattgctggtcacttcattccgcaaaacaagacaatatacacgtgcatcctttttatatatgtttccagtcagtagtcactattatgtgttgcctcagccttgctatctttttaaagttcaccttttccatatggcgttgattttcatgtatatatactgtacctttacatgctatttatcacaactgtgagagttcaagtaaatctgatgtaatgaaatttccaagctgctcttttttcacattcttatatatttgtggtcctcaggtgtcaccaaatttttcctttttttgttggctcatatttagaaacagagtagacagttcagggaataaatcactgtaagcaactccccatcacacatgaagtggtcacacggaggactctttcgtggagtggagaagctctgtagtggacgtttggtgaagaagctctgtaatgggcacatcg

SEQ ID NO: 219169 - DNA, 2072 bp, Zea Mays
cagagctgctctgctccagagtttaaattgttgtctcataaccagtgacagtagcgggctttgtcacagcatttacgtggcatgcgtaggcgcagccttttcaatgaaaaggctgggcttagtaataaaggtgtagacaaagcttcagatcatcatcctgtaaattcaactacccccaaatgcaaaaccatttctggtgacaactcaaagactctaagaacccccccatgtgcattgcctggtattggcttgcacttgaatgcccttgccgcaactgcaacacctaaagagaaaatagtccctcaagacattcagtctactataaatgaatcaagtaacttgataggccctgctggatcttctccggcaccttctgagcaaaacattataaatgatgatttcactcaaacaactgatgttgcaaccgctgaagcttctagtcagggtagtcccaagaagaaaaggcataagtttgatagtggtgatggcacttcatgcaagcgttgtagttgtaagaagtccaaatgcctgaaactttactgtgagtgttttgctgctggagtctattgttctgagccttgttcgtgtatcggctgtatgaacaaccagagtcatacggaaactgttctatctacgcggcaacagattgaatctcgcaatccattagcatttgctcctaaagtaattcatacatctgagcctggtctggaactaagggacttctccaataaaactcctgcttcagctcgtcacaaaaggggatgcaattgcaagaagtcgtcatgtctaaaaaaatactgtgaatgttttcagggtggtgtgggatgctccataagttgcagatgcgagggctgtaagaatgcttttggaaaacgggagggggctgccgtgttaagcatagaggaacctaagcagggattggaagaaaaggatgtttgtgtgaaagaagagaaaagtgaaatcgagaaacagcttgttgtctaccaaactcctgatgatgctcctgctgaaaatgtactgaccacaccttccatggtgcagtgcagacccttggcttgtcgtccacccccaagctccaagaaaagctccaaaaaaccacgatcttcaacaaaactcactggacatccttcgcggttgtgcaacttacaagctcctccgaagaccgacactatgctctccccattcgaaaactacgcggaaatggtccttggtgatagcacatcggatatcctcaagggaaattcatctcctcaaacttctgttaaagtggtgtcaccaaacaagaagcgaatctctcccctgcgaatgggtaccgggctatctccaatctgtaggagtggcaggaagctgattttaaagtccattccttctttcccttcccttggcggtgatgtaaacaatgaggatccagaaaccaagttgccagccccttgaatttaccatattttgtcactggtttatttctaccataccatctgatagtggacagccaagcgactttcctttcatcatttctatctctctcgatcaatgattatttatgtactgctataataatctgccgcgtgctggcaaaattctgcctccctagaacaaccaatggcatttggtttgctggtaaattatctcttggctccgtgtgttccctgtggctgtctgtctataatttatgttcattattttgttccggagaccgaagaatctgaggacttgtatgtatctgggatcaagatgtgaatctcgcatgtaccagatgacagaactgttaagacttatatttgtctgaggttaaactgcaagacttttatttaagctagaactttgatcactataggatatggcatgatatagcagggctcttgagatgcattctcttgtgcgtgcttggtaactgtagtcgtgcaactgttgacggcgtttgttcagaacaagtggttgatgaatttgaagatggtttagggagtgggaatgattttgtttgtgtgcgtgcgaacttgtaaaatctccgtgtatgaactggcaatgcttttatggtattgatcatctgcggtgtgttaactgagtgcaaaata

SEQ ID NO: 219170 - DNA, 2904 bp, Zea Mays
gctggtcctctgtccatgcgaagtgattctcctgtgttcaatttcatcaacaatctctcgcctataccaccacctaaacctttagactcagcacataatgtgcagctattcaagtcatcagatttggcacctgtttcttcgatctttgcctcaccacatgttaatccaacaaagggaactaaagttctgatcagggacgaatctgttcagcttcctcatgaattgcactcacctagcagtgtcagaactcggataggcacctcaggctcttttagaatgatcagatgcaaagacattgtgccagagaattgtaatatcacttgtcaactaaacgaggcatctattgattcttcagatcatacatcaagctctacaggccaattgactcaatccataaaagatgctgctggcagtatggaaagcgataaggatcaatgcgctggtggtaaaatagaccttaccatgtcccaggagtgcacaggcctagaaggtatgaaccttgatgagagtagcccagacagaatggattcatcacattctgggatagttgttcatgaaaaccagctatctgaacaaaacaatgatgaacctgcggcatataatggggtttacatgattacacaccaatcaagtagtgatatgctgactttagccgtaccatctggaacagaagcacaaccaatgaatgatacacaaaaggctgataatccctacccttgtgaatccttgttggatgttcagtcaagtggaaattgcacccaaaattctgtgcatgaaccccatctgtactggaacggggcagttgaaggggctgcagtagcttatactccccaagcacttcctggtgctttgcaaagtcagttgatgccatgtaacaagctcaatgagccaaaagattacatgcctactgagcaaaatgctttgtcacagcatttacgtggcatgcgtaggcgcagccttttcaatgaaaaggctgggcttagtaataaaggtgtagacaaagcttcagatcatcatcctgtaaattcaactacccccaaatgcaaaaccatttctggtgacaactcaaagactctaagaacccccccatgtgcattgcctggtattggcttgcacttgaatgcccttgccgcaactgcaacacctaaagagaaaatagtccctcaagacattcagtctactataaatgaatcaagtaacttgataggccctgctggatcttctccggcaccttctgagcaaaacattataaatgatgatttcactcaaacaactgatgttgcaaccgctgaagcttctagtcagggtagtcccaagaagaaaaggcataagtttgatagtggtgatggcacttcatgcaagcgttgtagttgtaagaagtccaaatgcctgaaactttactgtgagtgttttgctgctggagtctattgttctgagccttgttcgtgtatcggctgtatgaacaaccagagtcatacggaaactgttctatctacgcggcaacagattgaatctcgcaatccattagcatttgctcctaaagtaattcatacatctgagcctggtctggaactaagggacttctccaataaaactcctgcttcagctcgtcacaaaaggggatgcaattgcaagaagtcgtcatgtctaaaaaaatactgtgaatgttttcagatgcgagggctgtaagaatgcttttggaaaacgggagggggctgccgtgttaagcatagaggaacctaagcagggattggaagaaaaggatgtttgtgtgaaagaagagaaaagtgaaatcgagaaacagcttgttgtctaccaaactcctgatgatgctcctgctgaaaatgtactgaccacaccttccatggtgcagtgcagacccttggcttgtcgtccacccccaagctccaagaaaagctccaaaaaaccacgatcttcaacaaaactcactggacatccttcgcggttgtgcaacttacaagctcctccgaagaccgacactatgctctccccattcgaaaactacgcggaaatggtccttggtgatagcacatcggatatcctcaagggaaattcatctcctcaaacttctgttaaagtggtgtcaccaaacaagaagcgaatctctcccctgcgaatgggtaccgggctatctccaatctgtaggagtggcaggaagctgattttaaagtccattccttctttcccttcccttggcggtgatgtaaacaatgaggatccagaaaccaagttgccagccccttgaatttaccatattttgtcactggtttatttctaccataccatctgatagtggacagccaagcgactttcctttcatcatttctatctctctcgatcaatgattatttatgtactgctataataatctgccgcgtgctggcaaaattctgcctccctagaacaaccaatggcatttggtttgctggtaaattatctcttggctccgtgtgttccctgtggctgtctgtctataatttatgttcattattttgttccggagaccgaagaatctgaggacttgtatgtatctgggatcaagatgtgaatctcgcatgtaccagatgacagaactgttaagacttatatttgtctgaggttaaactgcaagacttttatttaagctagaactttgatcactataggatatggcatgatatagcagggctcttgagatgcattctcttgtgcgtgcttggtaactgtagtcgtgcaactgttgacggcgtttgttcagaacaagtggttgatgaatttgaagatggtttagggagtgggaatgattttgtttgtgtgcgtgcgaacttgtaaaatctccgtgtatgaactggcaatgcttttatggtattgatcatctgcggtgtgttaactgagtgcaaaata

SEQ ID NO: 219171 - DNA, 2606 bp, Zea Mays
cttagattcatacgtttgctggtcctctgtccatgcgaagtgattctcctgtgttcaatttcatcaacaatctctcgcctataccaccacctaaacctttagactcagcacataatgtgcagctattcaagtcatcagatttggcacctgtttcttcgatctttgcctcaccacatgttaatccaacaaagggaactaaagttctgatcagggacgaatctgttcagcttcctcatgaattgcactcacctagcagtgtcagaactcggataggcacctcaggctcttttagaatgatcagatgcaaagacattgtgccagagaattgtaatatcacttgtcaactaaacgaggcatctattgattcttcagatcatacatcaagctctacaggccaattgactcaatccataaaagatgctgctggcagtatggaaagcgataaggatcaatgcgctggtggtaaaatagaccttaccatgtcccaggagtgcacaggcctagaaggtatgaaccttgatgagagtagcccagacagaatggattcatcacattctgggatagttgttcatgaaaaccagctatctgaacaaaacaatgatgaacctgcggcatataatggggtttacatgattacacaccaatcaagtagtgatatgctgactttagccgtaccatctggaacagaagcacaaccaatgaatgatacacaaaaggctgataatccctacccttgtgaatccttgttggatgttcagtcaagtggaaattgcacccaaaattctgtgcatgaaccccatctgtactggaacggggcagttgaaggggctgcagtagcttatactccccaagcacttcctggtgctttgcaaagtcagttgatgccatgtaacaagctcaatgagccaaaagattacatgcctactgagcaaaatgctttgtcacagcatttacgtggcatgcgtaggcgcagccttttcaatgaaaaggctgggcttagtaataaaggtgtagacaaagcttcagatcatcatcctgtaaattcaactacccccaaatgcaaaaccatttctggtgacaactcaaagactctaagaacccccccatgtgcattgcctggtattggcttgcacttgaatgcccttgccgcaactgcaacacctaaagagaaaatagtccctcaagacattcagtctactataaatgaatcaagtaacttgataggccctgctggatcttctccggcaccttctgagcaaaacattataaatgatgatttcactcaaacaactgatgttgcaaccgctgaagcttctagtcagggtagtcccaagaagaaaaggcataagtttgatagtggtgatggcacttcatgcaagcgttgtagttgtaagaagtccaaatgcctgaaactgggctgccgtgttaagcatagaggaacctaagcagggattggaagaaaaggatgtttgtgtgaaagaagagaaaagtgaaatcgagaaacagcttgttgtctaccaaactcctgatgatgctcctgctgaaaatgtactgaccacaccttccatggtgcagtgcagacccttggcttgtcgtccacccccaagctccaagaaaagctccaaaaaaccacgatcttcaacaaaactcactggacatccttcgcggttgtgcaacttacaagctcctccgaagaccgacactatgctctccccattcgaaaactacgcggaaatggtccttggtgatagcacatcggatatcctcaagggaaattcatctcctcaaacttctgttaaagtggtgtcaccaaacaagaagcgaatctctcccctgcgaatgggtaccgggctatctccaatctgtaggagtggcaggaagctgattttaaagtccattccttctttcccttcccttggcggtgatgtaaacaatgaggatccagaaaccaagttgccagccccttgaatttaccatattttgtcactggtttatttctaccataccatctgatagtggacagccaagcgactttcctttcatcatttctatctctctcgatcaatgattatttatgtactgctataataatctgccgcgtgctggcaaaattctgcctccctagaacaaccaatggcatttggtttgctggtaaattatctcttggctccgtgtgttccctgtggctgtctgtctataatttatgttcattattttgttccggagaccgaagaatctgaggacttgtatgtatctgggatcaagatgtgaatctcgcatgtaccagatgacagaactgttaagacttatatttgtctgaggttaaactgcaagacttttatttaagctagaactttgatcactataggatatggcatgatatagcagggctcttgagatgcattctcttgtgcgtgcttggtaactgtagtcgtgcaactgttgacggcgtttgttcagaacaagtggttgatgaatttgaagatggtttagggagtgggaatgattttgtttgtgtgcgtgcgaacttgtaaaatctccgtgtatgaactggcaatgcttttatggtattgatcatctgcggtgtgttaactgagtgcaaaata

SEQ ID NO: 219172 - DNA, 2935 bp, Zea Mays
ctcaaggcgactactactgtcaatcaggctactgctgctagtttcattagatcaaccatccctactagatggaccaattggcttgctgattctgattctcctgtgttcaatttcatcaacaatctctcgcctataccaccacctaaacctttagactcagcacataatgtgcagctattcaagtcatcagatttggcacctgtttcttcgatctttgcctcaccacatgttaatccaacaaagggaactaaagttctgatcagggacgaatctgttcagcttcctcatgaattgcactcacctagcagtgtcagaactcggataggcacctcaggctcttttagaatgatcagatgcaaagacattgtgccagagaattgtaatatcacttgtcaactaaacgaggcatctattgattcttcagatcatacatcaagctctacaggccaattgactcaatccataaaagatgctgctggcagtatggaaagcgataaggatcaatgcgctggtggtaaaatagaccttaccatgtcccaggagtgcacaggcctagaaggtatgaaccttgatgagagtagcccagacagaatggattcatcacattctgggatagttgttcatgaaaaccagctatctgaacaaaacaatgatgaacctgcggcatataatggggtttacatgattacacaccaatcaagtagtgatatgctgactttagccgtaccatctggaacagaagcacaaccaatgaatgatacacaaaaggctgataatccctacccttgtgaatccttgttggatgttcagtcaagtggaaattgcacccaaaattctgtgcatgaaccccatctgtactggaacggggcagttgaaggggctgcagtagcttatactccccaagcacttcctggtgctttgcaaagtcagttgatgccatgtaacaagctcaatgagccaaaagattacatgcctactgagcaaaatgctttgtcacagcatttacgtggcatgcgtaggcgcagccttttcaatgaaaaggctgggcttagtaataaaggtgtagacaaagcttcagatcatcatcctgtaaattcaactacccccaaatgcaaaaccatttctggtgacaactcaaagactctaagaacccccccatgtgcattgcctggtattggcttgcacttgaatgcccttgccgcaactgcaacacctaaagagaaaatagtccctcaagacattcagtctactataaatgaatcaagtaacttgataggccctgctggatcttctccggcaccttctgagcaaaacattataaatgatgatttcactcaaacaactgatgttgcaaccgctgaagcttctagtcagggtagtcccaagaagaaaaggcataagtttgatagtggtgatggcacttcatgcaagcgttgtagttgtaagaagtccaaatgcctgaaactttactgtgagtgttttgctgctggagtctattgttctgagccttgttcgtgtatcggctgtatgaacaaccagagtcatacggaaactgttctatctacgcggcaacagattgaatctcgcaatccattagcatttgctcctaaagtaattcatacatctgagcctggtctggaactaagggacttctccaataaaactcctgcttcagctcgtcacaaaaggggatgcaattgcaagaagtcgtcatgtctaaaaaaatactgtgaatgttttcaggggctgccgtgttaagcatagaggaacctaagcagggattggaagaaaaggatgtttgtgtgaaagaagagaaaagtgaaatcgagaaacagcttgttgtctaccaaactcctgatgatgctcctgctgaaaatgtactgaccacaccttccatggtgcagtgcagacccttggcttgtcgtccacccccaagctccaagaaaagctccaaaaaaccacgatcttcaacaaaactcactggacatccttcgcggttgtgcaacttacaagctcctccgaagaccgacactatgctctccccattcgaaaactacgcggaaatggtccttggtgatagcacatcggatatcctcaagggaaattcatctcctcaaacttctgttaaagtggtgtcaccaaacaagaagcgaatctctcccctgcgaatgggtaccgggctatctccaatctgtaggagtggcaggaagctgattttaaagtccattccttctttcccttcccttggcggtgatgtaaacaatgaggatccagaaaccaagttgccagccccttgaatttaccatattttgtcactggtttatttctaccataccatctgatagtggacagccaagcgactttcctttcatcatttctatctctctcgatcaatgattatttatgtactgctataataatctgccgcgtgctggcaaaattctgcctccctagaacaaccaatggcatttggtttgctggtaaattatctcttggctccgtgtgttccctgtggctgtctgtctataatttatgttcattattttgttccggagaccgaagaatctgaggacttgtatgtatctgggatcaagatgtgaatctcgcatgtaccagatgacagaactgttaagacttatatttgtctgaggttaaactgcaagacttttatttaagctagaactttgatcactataggatatggcatgatatagcagggctcttgagatgcattctcttgtgcgtgcttggtaactgtagtcgtgcaactgttgacggcgtttgttcagaacaagtggttgatgaatttgaagatggtttagggagtgggaatgattttgtttgtgtgcgtgcgaacttgtaaaatctccgtgtatgaactggcaatgcttttatggtattgatcatctgcggtgtgttaactgagtgcaaaata

SEQ ID NO: 219173 - DNA, 2621 bp, Zea Mays
attaggacaagcattagtgttcgctcgtcactcgtcagtactcagtggaggaggcggcggcggggagggagacagatgcgggaggcccaccgcggggtcgccggaccagatggacacgccggataggccccgcgccggcgccggcgccgggttcgaggattctcctgtgttcaatttcatcaacaatctctcgcctataccaccacctaaacctttagactcagcacataatgtgcagctattcaagtcatcagatttggcacctgtttcttcgatctttgcctcaccacatgttaatccaacaaagggaactaaagttctgatcagggacgaatctgttcagcttcctcatgaattgcactcacctagcagtgtcagaactcggataggcacctcaggctcttttagaatgatcagatgcaaagacattgtgccagagaattgtaatatcacttgtcaactaaacgaggcatctattgattcttcagatcatacatcaagctctacaggccaattgactcaatccataaaagatgctgctggcagtatggaaagcgataaggatcaatgcgctggtggtaaaatagaccttaccatgtcccaggagtgcacaggcctagaaggtatgaaccttgatgagagtagcccagacagaatggattcatcacattctgggatagttgttcatgaaaaccagctatctgaacaaaacaatgatgaacctgcggcatataatggggtttacatgattacacaccaatcaagtaaacccccccatgtgcattgcctggtattggcttgcacttgaatgcccttgccgcaactgcaacacctaaagagaaaatagtccctcaagacattcagtctactataaatgaatcaagtaacttgataggccctgctggatcttctccggcaccttctgagcaaaacattataaatgatgatttcactcaaacaactgatgttgcaaccgctgaagcttctagtcagggtagtcccaagaagaaaaggcataagtttgatagtggtgatggcacttcatgcaagcgttgtagttgtaagaagtccaaatgcctgaaactttactgtgagtgttttgctgctggagtctattgttctgagccttgttcgtgtatcggctgtatgaacaaccagagtcatacggaaactgttctatctacgcggcaacagattgaatctcgcaatccattagcatttgctcctaaagtaattcatacatctgagcctggtctggaactaagggacttctccaataaaactcctgcttcagctcgtcacaaaaggggatgcaattgcaagaagtcgtcatgtctaaaaaaatactgtgaatgttttcagggtggtgtgggatgctccataagttgcagatgcgagggctgtaagaatgcttttggaaaacgggagggggctgccgtgttaagcatagaggaacctaagcagggattggaagaaaaggatgtttgtgtgaaagaagagaaaagtgaaatcgagaaacagcttgttgtctaccaaactcctgatgatgctcctgctgaaaatgtactgaccacaccttccatggtgcagtgcagacccttggcttgtcgtccacccccaagctccaagaaaagctccaaaaaaccacgatcttcaacaaaactcactggacatccttcgcggttgtgcaacttacaagctcctccgaagaccgacactatgctctccccattcgaaaactacgcggaaatggtccttggtgatagcacatcggatatcctcaagggaaattcatctcctcaaacttctgttaaagtggtgtcaccaaacaagaagcgaatctctcccctgcgaatgggtaccgggctatctccaatctgtaggagtggcaggaagctgattttaaagtccattccttctttcccttcccttggcggtgatgtaaacaatgaggatccagaaaccaagttgccagccccttgaatttaccatattttgtcactggtttatttctaccataccatctgatagtggacagccaagcgactttcctttcatcatttctatctctctcgatcaatgattatttatgtactgctataataatctgccgcgtgctggcaaaattctgcctccctagaacaaccaatggcatttggtttgctggtaaattatctcttggctccgtgtgttccctgtggctgtctgtctataatttatgttcattattttgttccggagaccgaagaatctgaggacttgtatgtatctgggatcaagatgtgaatctcgcatgtaccagatgacagaactgttaagacttatatttgtctgaggttaaactgcaagacttttatttaagctagaactttgatcactataggatatggcatgatatagcagggctcttgagatgcattctcttgtgcgtgcttggtaactgtagtcgtgcaactgttgacggcgtttgttcagaacaagtggttgatgaatttgaagatggtttagggagtgggaatgattttgtttgtgtgcgtgcgaacttgtaaaatctccgtgtatgaactggcaatgcttttatggtattgatcatctgcggtgtgttaactgagtgcaaaata

SEQ ID NO: 219174 - DNA, 2955 bp, Zea Mays
atcaaacgcacgcatccgagccaagccgaggccgaccgactgcaaggattctcctgtgttcaatttcatcaacaatctctcgcctataccaccacctaaacctttagactcagcacataatgtgcagctattcaagtcatcagatttggcacctgtttcttcgatctttgcctcaccacatgttaatccaacaaagggaactaaagttctgatcagggacgaatctgttcagcttcctcatgaattgcactcacctagcagtgtcagaactcggataggcacctcaggctcttttagaatgatcagatgcaaagacattgtgccagagaattgtaatatcacttgtcaactaaacgaggcatctattgattcttcagatcatacatcaagctctacaggccaattgactcaatccataaaagatgctgctggcagtatggaaagcgataaggatcaatgcgctggtggtaaaatagaccttaccatgtcccaggagtgcacaggcctagaaggtatgaaccttgatgagagtagcccagacagaatggattcatcacattctgggatagttgttcatgaaaaccagctatctgaacaaaacaatgatgaacctgcggcatataatggggtttacatgattacacaccaatcaagtagtgatatgctgactttagccgtaccatctggaacagaagcacaaccaatgaatgatacacaaaaggctgataatccctacccttgtgaatccttgttggatgttcagtcaagtggaaattgcacccaaaattctgtgcatgaaccccatctgtactggaacggggcagttgaaggggctgcagtagcttatactccccaagcacttcctggtgctttgcaaagtcagttgatgccatgtaacaagctcaatgagccaaaagattacatgcctactgagcaaaatgctttgtcacagcatttacgtggcatgcgtaggcgcagccttttcaatgaaaaggctgggcttagtaataaaggtgtagacaaagcttcagatcatcatcctgtaaattcaactacccccaaatgcaaaaccatttctggtgacaactcaaagactctaagaacccccccatgtgcattgcctggtattggcttgcacttgaatgcccttgccgcaactgcaacacctaaagagaaaatagtccctcaagacattcagtctactataaatgaatcaagtaacttgataggccctgctggatcttctccggcaccttctgagcaaaacattataaatgatgatttcactcaaacaactgatgttgcaaccgctgaagcttctagtcagggtagtcccaagaagaaaaggcataagtttgatagtggtgatggcacttcatgcaagcgttgtagttgtaagaagtccaaatgcctgaaactttactgtgagtgttttgctgctggagtctattgttctgagccttgttcgtgtatcggctgtatgaacaaccagagtcatacggaaactgttctatctacgcggcaacagattgaatctcgcaatccattagcatttgctcctaaagtaattcatacatctgagcctggtctggaactaagggacttctccaataaaactcctgcttcagctcgtcacaaaaggggatgcaattgcaagaagtcgtcatgtctaaaaaaatactgtgaatgttttcagggtggtgtgggatgctccataagttgcagatgcgagggctgtaagaatgcttttggaaaacgggagggggctgccgtgttaagcatagaggaacctaagcagggattggaagaaaaggatgtttgtgtgaaagaagagaaaagtgaaatcgagaaacagcttgttgtctaccaaactcctgatgatgctcctgctgaaaatgtactgaccacaccttccatggtgcagtgcagacccttggcttgtcgtccacccccaagctccaagaaaagctccaaaaaaccacgatcttcaacaaaactcactggacatccttcgcggttgtgcaacttacaagctcctccgaagaccgacactatgctctccccattcgaaaactacgcggaaatggtccttggtgatagcacatcggatatcctcaagggaaattcatctcctcaaacttctgttaaagtggtgtcaccaaacaagaagcgaatctctcccctgcgaatgggtaccgggctatctccaatctgtaggagtggcaggaagctgattttaaagtccattccttctttcccttcccttggcggtgatgtaaacaatgaggatccagaaaccaagttgccagccccttgaatttaccatattttgtcactggtttatttctaccataccatctgatagtggacagccaagcgactttcctttcatcatttctatctctctcgatcaatgattatttatgtactgctataataatctgccgcgtgctggcaaaattctgcctccctagaacaaccaatggcatttggtttgctggtaaattatctcttggctccgtgtgttccctgtggctgtctgtctataatttatgttcattattttgttccggagaccgaagaatctgaggacttgtatgtatctgggatcaagatgtgaatctcgcatgtaccagatgacagaactgttaagacttatatttgtctgaggttaaactgcaagacttttatttaagctagaactttgatcactataggatatggcatgatatagcagggctcttgagatgcattctcttgtgcgtgcttggtaactgtagtcgtgcaactgttgacggcgtttgttcagaacaagtggttgatgaatttgaagatggtttagggagtgggaatgattttgtttgtgtgcgtgcgaacttgtaaaatctccgtgtatgaactggcaatgcttttatggtattgatcatctgcggtgtgttaactgagtgcaaaata

SEQ ID NO: 219175 - DNA, 908 bp, Zea Mays
agttcatgggagtcgagtattttttatgttgggcagataattgttatgggtgctccatctatcattttcattgatgaaaatgattcaattgcacccaagagagaaaagaccaatggagaagtagaacgtcgtattgtttcacagctactggctcttatggatggactcaaatctcgttcccatgttattgttatgggtgctacaaaccggccaaacaacatcgatcctgctcttagaagatttggaaggtttgaccaagtaattgacattggagttcctgatgaagttggccggcttgaggtttccgtattcacactaagaacatgaagctagctgaagatgttaatttggaactcatttcaaaggatacccatggatacgttggtgctgatcttgctgccctttgcactgaggctgctcttcattgaattcgtgagaagatggacatcatagatcttgaggatgatacaatagatgcagagatattgaactcgatggttgttacaaaatgaccatttcaagactgcgctggaacaagcaacccatctgctctccgtgaaacttttgatttctggatccaggttgttgaagtcccaaatgtctcttgggatagaataaaaaattgtggttgggaaggttatagtagcaaaagccattggaattaatattttatatatcgaaataatccgtttagttattaatggaaaaaagagggttaaaagaagagaaatcattagttattcattaaggttaatttgattcaatgaccagagttccgcgaggatatatagctcggagacgacgaacaaaaacgcgttcatttcattcatcaagacaatcaaacattcaaactattattatgagtaaaaaccatcatacccacaacaatcaaaatgaaacaaatggtc

SEQ ID NO: 219176 - DNA, 1416 bp, Zea Mays
gatgagtatccatccggtccggcagcggcagtagtagcatttggtgacgccgattgacatggatctctagcagtagccggcaccgagcagtcaccccaccccagacacacacaactactcctagaagtctacctgaagtgacgggtgaggaggcgagagccgagaggtggaggatgcgaggctgctagcacgtgcactacttgagtcagtgttgcctgaggtagccgcgctgaggtttgagcgggagagggacgcagctagaggcggggggctctatattacaatgcagcagtgaagaccatggagtgctcccgggggaggcagaggcagatgcagaggtggaggtggtgtggcagatccatgctaaagctggcggggttgtgcgtcgccgttgccatctgcctgtgcggcgttcggtcctgggcttgcagtggcagcggcagcggctgcagggggagtactgtgttgctccgttcagagtccttgagacgaggacgagcggcagcatcttgcggtaatcaggggtgctacacgactgggcaatggcggcggctgctggcggacggtccggggtcatacccgccacggtgcacgtccaagtgcggcgactgcagcccgtgctacccggtgcacgtggccgtgccgccgggcgtgcctgtcaccaccgaatactacccggaggcgtggaggtgcaagtgcggcaaccggctctacatgccatgagcccatgagcgagcaaggaggcggccagccggtgaagaatctctcgagagcgccggccgctggggccggcgctgcattattgcgccgggccgggtgcctctcgcctgcgcgcggtgtcgtcgtggtcctcgccgcgcgcatgggcgggatctgcgctctgcagcgcgcgtggtgacctaccacaggcacactgaccggctgccggctgggatactgagagactgcatgtctttttccgtgccgcgcgctggaattcgcacggccctaccacgagcacgtgccgtacggggcgtcagcgcgtgctggatcgaagagggatgcgagctgagagagcgcgcctgatgagaggctgagacgagacctgatgcggcccacacctgcacgtgtccgtataatctgttcagagtgttcataatcgatcttttcaaatttttctcaatgccgttttccgcatctgagtcctgttacacaaatttcctggtgaactctgtagccaaatgtagtgttgccgtgttggatactagcactatatatcgtggcagcatggaacagttcctggttggtctccccgcgctgtacccaggttcagtataccaataagtaaaagcacatagatttggaccgaaaaacttttgagatggctttctgatttatgtttatgtttatcatagcactgcctataaattaaatcag

SEQ ID NO: 219177 - DNA, 549 bp, Zea Mays
ccccgcgcgccaaacccatccctaacggaagccccgacatctccatgcgccgactccctccaacccctcctctgcactcaagatctccagctgacttagacgtgcgccatcttcgctaagggagggcaccacgtcgaccacgcgcaccagcaccccgaattgggatactcacctccgagagagagaacagggagccaccggaggcctccacggtcgtccggcatgcagtgcactaattggtgccctgtgcgaggtcgggagagtccgtccaagctccaggatcgtgttgaggtggtggctgggagggagtgcgacctgggcgccgccaatttgatgccgtggccgcaaatccggggcgcgccgtgggcagggaaagacactacgtaatcatttatacgagcaagcgaccgaggaccccggtacccagcaggtggaaagtactgaggaggagctcattgaaggtgaagagcaggtagcccgggaggaggtctacaacgaggagtacgagcttatctaggtggcgtctctcagtcagctttatagcgccat

SEQ ID NO: 219178 - DNA, 2264 bp, Zea Mays
cacatccggttatgataaattgatacagatccatgataataatagcttttgcccatgtctggtggtgacgtcgtgtgccccagcgcggcgtctagtcatcagatcattatccgcaccgacttgcgtgcacgagcttcgcggcgagggcagcaccggggctgggaatgggaagacactgcagcccagctccagcagcactacagcagtagcgccaccgaacctgaaaactccgaccccccacgaaatcgcggaacctacccacgagccgagccatgctcagccgactcgccgcggcgaggcgacagctactgctatccccggccgtcgcgtaccgctcctcctcggcagcggcgacggcgtcggcggtccacgagagagcagcgcccgcctcggcctccgtgctcccggacaccctcgaaaggggctccgacgcgtaccagcgcaacacggccgccgtcggcgggttgctctccgacctgcgcgcccgcgtctcccaggtgctgcgcgggggaggcgccgaggcggtgaggcggaacgcggcgcgggggaagctgctcccgcgggaccgcatcgaccgactgctcgaccccggcgcgtccttcctcgagctctcgcaggtttcgctcgccgctcccgctcggaccctcgtcttccttgcgttgatctggccgcattgtgaagtgaactctattgcctgctcagatgtttatgatgaagcattaccatcagcaggtataataactggcataggacctgttcatggacggttatgtatgtttgtggccaatgacccaaccactaagggtggcacatactatcctcttactgtcaagaagcatctgcgagcacaggaaatagcttcggagtgcaaactgccttgcatatatctcgttgacagcggaggtgctaatctccccaggcaggctgacgttttccctgaccgtgataattttggccggatattctacaatcaagctaagatgtcttcagatggtatccctcagattgcagtagtcttgggttcttgcactgctggtggggcatatattcctgcaatggcggatgagagtgtaatagttaagggaaatgggactatatttctagcgggtccaccacttgtaaaggctgctacaggagaggagatatctgctgaggaccttggtggagcatcagtacattgcaaggtatcaggagtctcagatcattttgcacaagatgaaattcatggacttgagttggggcgaaacattgtgaagaacctgcacttagctgctaaaggaacaaatattcagagttctgcttgtggttaccaagagccattgtacgatgtagaggaacttcgctccattgcaccagctgatgtgaaacagtccttcgacattcgttcaataatagcccgtattgttgatggaagtgaatttgatgagttcaaaaaattgtatggaacaacactagtgactggttttgcaaggatatgtgggcaaccagttggaattattggaaacaatggcattttgtttacagagtcagcgttgaagggctcccacttcattgaattgtgcgctcagcggcatattcctttgattttccttcaaaacattactgggttcatggtcggatcaaagtctgaagctagtggaattgccaaagctggagcaaagatggtcatggcagtttcctgtgctaaggttcctaaaattacaataattgttggtggaagttttggggctgggaattatggaatgtgcggacgtgcatatagcccaaactttttatttctttggccaactgctaggatatctgttatgggtggcatccaggcagctggagttctcgctcaaatagaaaagaacaacaaaaggagacaaggagtggagtggagcaaggacgaggaagaagccttcaaagccaaagtcgtggaggcttacgacagagaaggaagcccgtactactccactgctaggctatgggacgacggggtcatcgaccctgctgacaccaggcgggttctgagcctctgcctctccgcttcggccaagccggttccggaagacacaagatacggtgtattccggatgtgaataaatgtgtgtgagtaataacgcagacgtgtttaataaaaagctgcctgcacgcacccaatgtgtgtgcacaaataaaaatttcgccctggtttctgtcgtcgaaatatgttgaagagtgttgttcatttcatatattactatctgatgaatgggaagtgttcttcatttgataaaaaacaa

SEQ ID NO: 219179 - DNA, 2175 bp, Zea Mays
ggcgtctagtcatcagatcattatccgcaccgacttgcgtgcacgagcttcgcggcgagggcagcaccggggctgggaatgggaagacactgcagcccagctccagcagcactacagcagtagcgccaccgaacctgaaaactccgaccccccacgaaatcgcggaacctacccacgagccgagccatgctcagccgactcgccgcggcgaggcgacagctactgctatccccggccgtcgcgtaccgctcctcctcggcagcggcgacggcgtcggcggtccacgagagagcagcgcccgcctcggcctccgtgctcccggacaccctcgaaaggggctccgacgcgtaccagcgcaacacggccgccgtcggcgggttgctctccgacctgcgcgcccgcgtctcccaggtgctgcgcgggggaggcgccgaggcggtgaggcggaacgcggcgcgggggaagctgctcccgcgggaccgcatcgaccgactgctcgaccccggcgcgtccttcctcgagctctcgcaggtttcgctcgccgctcccgctcggaccctcgtcttccttgcgttgatctggccgcattgtgaagtgaactctattgcctgctcagatgtttatgatgaagcattaccatcagcaggtataataactggcataggacctgttcatggacggttatgtatgtttgtggccaatgacccaaccactaagggtggcacatactatcctcttactgtcaagaagcatctgcgagcacaggaaatagcttcggagtgcaaactgccttgcatatatctcgttgacagcggaggtgctaatctccccaggcaggctgacgttttccctgaccgtgataattttggccggatattctacaatcaagctaagatgtcttcagatggtatccctcagattgcagtagtcttgggttcttgcactgctggtggggcatatattcctgcaatggcggatgagagtgtaatagttaagggaaatgggactatatttctagcgggtccaccacttgtaaaggctgctacaggagaggagatatctgctgaggaccttggtggagcatcagtacattgcaaggtatcaggagtctcagatcattttgcacaagatgaaattcatggacttgagttggggcgaaacattgtgaagaacctgcacttagctgctaaaggaacaaatattcagagttctgcttgtggttaccaagagccattgtacgatgtagaggaacttcgctccattgcaccagctgatgtgaaacagtccttcgacattcgttcaataatagcccgtattgttgatggaagtgaatttgatgagttcaaaaaattacactagtgactggttttgcaaggatatgtgggcaaccagttggaattattggaaacaatggcattttgtttacagagtcagcgttgaagggctcccacttcattgaattgtgcgctcagcggcatattcctttgattttccttcaaaacattactgggttcatggtcggatcaaagtctgaagctagtggaattgccaaagctggagcaaagatggtcatggcagtttcctgtgctaaggttcctaaaattacaataattgttggtggaagttttggggctgggaattatggaatgtgcggacgtgcatatagcccaaactttttatttctttggccaactgctaggatatctgttatgggtggcatccaggcagctggagttctcgctcaaatagaaaagaacaacaaaaggagacaaggagtggagtggagcaaggacgaggaagaagccttcaaagccaaagtcgtggaggcttacgacagagaaggaagcccgtactactccactgctaggctatgggacgacggggtcatcgaccctgctgacaccaggcgggttctgagcctctgcctctccgcttcggccaagccggttccggaagacacaagatacggtgtattccggatgtgaataaatgtgtgtgagtaataacgcagacgtgtttaataaaaagctgcctgcacgcacccaatgtgtgtgcacaaataaaaatttcgccctggtttctgtcgtcgaaatatgttgaagagtgttgttcatttcatatattactatctgatgaatgggaagtgttcttcatttgatacgtcaataaaaaaaa

SEQ ID NO: 219180 - DNA, 1777 bp, Zea Mays
ggcgtctagtcatcagatcattatccgcaccgacttgcgtgcacgagcttcgcggcgagggcagcaccggggctgggaatgggaagacactgcagcccagctccagcagcactacagcagtagcgccaccgaacctgaaaactccgaccccccacgaaatcgcggaacctacccacgagccgagccatgctcagccgactcgccgcggcgaggcgacagctactgctatccccggccgtcgcgtaccgctcctcctcggcagcggcgacggcgtcggcggtccacgagagagcagcgcccgcctcggcctccgtgctcccggacaccctcgaaaggggctccgacgcgtaccagcgcaacacggccgccgtcggcgggttgctctccgacctgcgcgcccgcgtctcccaggtgctgcgcgggggaggcgccgaggcggtgaggcggaacgcggcgcgggggaagctgctcccgcgggaccgcatcgaccgactgctcgaccccggcgcgtccttcctcgagctctcgcagcttgcaggctcagatgtttatgatgaagcattaccatcagcaggaaatagcttcggagtgcaaactgccttgcatatatctcgttgacagcggaggtgctaatctccccagattgcagtagtcttgggttcttgcactgctggtggggcatatattcctgcaatggcggatgagagtgtaatagttaagggaaatgggactatatttctagcgggtccaccacttgtaaaggctgctacaggagaggagatatctgctgaggaccttggtggagcatcagtacattgcaaggtatcaggagtctcagatcattttgcacaagatgaaattcatggacttgagttggggcgaaacattgtgaagaacctgcacttagctgctaaaggaacaaatattcagagttctgcttgtggttaccaagagccattgtacgatgtagaggaacttcgctccattgcaccagctgatgtgaaacagtccttcgacattcgttcaataatagcccgtattgttgatggaagtgaatttgatgagttcaaaaaattgtatggaacaacactagtgactggttttgcaaggatatgtgggcaaccagttggaattattggaaacaatggcattttgtttacagagtcagcgttgaagggctcccacttcattgaattgtgcgctcagcggcatattcctttgattttccttcaaaacattactgggttcatggtcggatcaaagtctgaagctagtggaattgccaaagctggagcaaagatggtcatggcagtttcctgtgctaaggcagctggagttctcgctcaaatagaaaagaacaacaaaaggagacaaggagtggagtggagcaaggacgaggaagaagccttcaaagccaaagtcgtggaggcttacgacagagaaggaagcccgtactactccactgctaggctatgggacgacggggtcatcgaccctgctgacaccaggcgggttctgagcctctgcctctccgcttcggccaagccggttccggaagacacaagatacggtgtattccggatgtgaataaatgtgtgtgagtaataacgcagacgtgtttaataaaaagctgcctgcacgcacccaatgtgtgtgcacaaataaaaatttcgccctggtttctgtcgtcgaaatatgttgaagagtgttgttcatttcatatattactatctgatgaatgggaagtgttcttcatttgatacgtcaataaaaaaaa

SEQ ID NO: 219181 - DNA, 1907 bp, Zea Mays
cccagcgcggcgtctagtcatcagatcattatccgcaccgacttgcgtgcacgagcttcgcggcgagggcagcaccggggctgggaatgggaagacactgcagcccagctccagcagcactacagcagtagcgccaccgaacctgaaaactccgaccccccacgaaatcgcggaacctacccacgagccgagccatgctcagccgactcgccgcggcgaggcgacagctactgctatccccggccgtcgcgtaccgctcctcctcggcagcggcgacggcgtcggcggtccacgagagagcagcgcccgcctcggcctccgtgctcccggacaccctcgaaaggggctccgacgcgtaccagcgcaacacggccgccgtcggcgggttgctctccgacctgcgcgcccgcgtctcccaggtgctgcgcgggggaggcgccgaggcggtgaggcggaacgcggcgcgggggaagctgctcccgcgggaccgcatcgaccgactgctcgaccccggcgcgtccttcctcgagctctcgcagcttgcaggctcagatgtttatgatgaagcattaccatcagcaggaaatagcttcggagtgcaaactgccttgcatatatctcgttgacagcggaggtgctaatctccccagattgcagtagtcttgggttcttgcactgctggtggggcatatattcctgcaatggcggatgagagtgtaatagttaagggaaatgggactatatttctagcgggtccaccacttgtaaaggctgctacaggagaggagatatctgctgaggaccttggtggagcatcagtacattgcaaggtatcaggagtctcagatcattttgcacaagatgaaattcatggacttgagttggggcgaaacattgtgaagaacctgcacttagctgctaaaggaacaaatattcagagttctgcttgtggttaccaagagccattgtacgatgtagaggaacttcgctccattgcaccagctgatgtgaaacagtccttcgacattcgttcaataatagcccgtattgttgatggaagtgaatttgatgagttcaaaaaattacactagtgactggttttgcaaggatatgtgggcaaccagttggaattattggaaacaatggcattttgtttacagagtcagcgttgaagggctcccacttcattgaattgtgcgctcagcggcatattcctttgattttccttcaaaacattactgggttcatggtcggatcaaagtctgaagctagtggaattgccaaagctggagcaaagatggtcatggcagtttcctgtgctaaggttcctaaaattacaataattgttggtggaagttttggggctgggaattatggaatgtgcggacgtgcatatagcccaaactttttatttctttggccaactgctaggatatctgttatgggtggcatccaggcagctggagttctcgctcaaatagaaaagaacaacaaaaggagacaaggagtggagtggagcaaggacgaggaagaagccttcaaagccaaagtcgtggaggcttacgacagagaaggaagcccgtactactccactgctaggctatgggacgacggggtcatcgaccctgctgacaccaggcgggttctgagcctctgcctctccgcttcggccaagccggttccggaagacacaagatacggtgtattccggatgtgaataaatgtgtgtgagtaataacgcagacgtgtttaataaaaagctgcctgcacgcacccaatgtgtgtgcacaaataaaaatttcgccctggtttctgtcgtcgaaatatgttgaagagtgttgttcatttcatatattactatctgatgaatgggaagtgttcttcatttgatacgtcaataaaaaaaa

SEQ ID NO: 219182 - DNA, 1059 bp, Zea Mays
gcctagtgctgttctgtggatgtaacggtgctgtaaaagggtttataaaccacataggaggtcagccagctgagtatccagtttaaagttcagagttcaatctcacagcaccaagcaaaaaggaagcagattaagggcagccgagcgagcagagagtacggaggaggtggccatgcatcaacgtctggggatgtttatagttttgggatagtgttgctggagattttgacgagcaaaaggccaacagatcctctgttcaaggatggccaggacatcatcagctttgtggagaataactttccggatcaagtctttcaagtcattgactctcacctcctagatgaatgcaggaactcaattcaaggaaataatttggtaccagaaaatgagatctaccaatgcttggttgaccttctgcaattagcactttcgtgccttcgttcattaccatctgaacgatcaaacatgaagcaagtagccagcagaatgcatgcaatccaaacatcatatcttcggtggaagaagaagtaataagaggaagggtgttccctgaattgtaaaataacatatatacttagacatccactcgcatgtattattgattatcatctagaaaatacaagaataaaacccttgcaatagaaatatgctaaacatcgtgataatatcaaaatatggaagaaatgtaggattcccaatttgttatggagacatagaaatcataaatttgcagtggagcgagtattctttgtaactgtggccgattttctagatgatgtggtagtttaaagttcccaagcaagctacaatactacatgttattgatgttgtaagttattagtagtcataataaaaatgacaaagataatggccaaattagtgggatagtattgcatctaattggtggaagtttatctattctacaatatatcgatgatactattatttttatagatcatgacctagaaaagggttgagaattgatggtatttctttatgtgttcttggaaccgtcaggtcacaaaaaattaaaagggtcatgatgtccatgaggatgag

SEQ ID NO: 219183 - DNA, 1013 bp, Zea Mays
caatctcacagcaccaagcaaaaaggaagcagattaagggcagccgagcgagcagaggttcaattagttcaattggtgtaaagggaacaattggatatattcctccagagtacggaggaggtggccatgcatcaacgtctggggatgtttatagttttgggatagtgttgctggagattttgacgagcaaaaggccaacagatcctctgttcaaggatggccaggacatcatcagctttgtggagaataactttccggatcaagtctttcaagtcattgactctcacctcctagatgaatgcaggaactcaattcaaggaaataatttggtaccagaaaatgagatctaccaatgcttggttgaccttctgcaattagcactttcgtgccttcgttcattaccatctgaacgatcaaacatgaagcaagtagccagcagaatgcatgcaatccaaacatcatatcttcggtggaagaagaagtaataagaggaagggtgttccctgaattgtaaaataacatatatacttagacatccactcgcatgtattattgattatcatctagaaaatacaagaataaaacccttgcaatagaaatatgctaaacatcgtgataatatcaaaatatggaagaaatgtaggattcccaatttgttatggagacatagaaatcataaatttgcagtggagcgagtattctttgtaactgtggccgattttctagatgatgtggtagtttaaagttcccaagcaagctacaatactacatgttattgatgttgtaagttattagtagtcataataaaaatgacaaagataatggccaaattagtgggatagtattgcatctaattggtggaagtttatctattctacaatatatcgatgatactattatttttatagatcatgacctagaaaagggttgagaattgatggtatttctttatgtgttcttggaaccgtcaggtcacaaaaaattaaaagggtcatgatgtccatgaggatgag

SEQ ID NO: 219184 - DNA, 1632 bp, Zea Mays
tctgcacaccgccactcgcccacacgcgaaggcacctagcagccgccactcgccgaactgaggaacacgccgggcgacgggatacagcagcagcgcgcccctctatccccgacgcgacggcgccctgcagctgcagataaacctgttccaatggccaaacaaaaagagggtgtggacaaaagaactgctaggaagatgatccgatctacggaaggctgtgcaaagagcattactttggagaggaacaacaaatcagacgatgtgcagcttcacgatctgccgaatgacatcctaggtagcatactatcacggttgacattcagagaatcctcacagatgggccttgtttctcatacctggcggcggctgtggagaagctgttgccggaaactggtcttcaccagtgccaccatgttccaacccggaaataggagcatcaaacatacaaggaccaactttgccatgagagtcaacagtttcttgcgtcagctacgcactcatcctactcttaataagtttgttattaagttcgggctgcgcaggaagcacactcgccatgtcaacagatggattcgcttctgctccgtgtcgcgagcaagacacatcactattaatttcactcctggagtgaaagattttttcatgggtccagccaacagcaagtacatcttccccctgaacgttttcagtggtccagaaggctcctctacacatgtcagaactcttcatctgggctatgtctgtctggacacaacctcgtctgatttcatgatctttgcaaatcttaagaagctcactctgcacaaaatttcctttttgggagacctccagtgcctgatgctgccagaatgcaattctcttgagtgtctgagcatcagcttctgttccttgcctggtttaagcacatgccaaccgctgcaacgtctgcgatgtgttcgtttgcactactgctatctaaaaaagattgagctggaagctccaaatctaacatcgtttgacttgaccaaccaaccaattccatttgtgcttggtggatctctgaatgtaatggaagccaacattaaactgttagctaaggactcaccttatggtgataatctggactacatctacactgagcttcctgctgcgctgtctcatgtgcataaactctcgataacctcgggtctcttcgtttatgatcagctgcaagggttttccaaaacctcagccagattcatcaatctgaggcatctgaccatgtatttgcctctttatggggaacctaagtcaattagtgggattcttcgcttggcctacctactggaattggccccagctctagaagaattggaattgcatgtgaatggcggtggcgtggatgttgggtgggcactcagacggaatatgttaccgtactcacacaataggctcaagagggtccttatttcaggagccactgtatgggaggggctaatggagctggcatactacattcttcggagtgccaatagactcgaaagtatggtcttagatccaaagataaggattgggggtcctcagctggatggttggatgattgatattggtagggagacgatcaaaaatatttttgagggagaggagtttcagagcattattactattctgtaa

SEQ ID NO: 219185 - DNA, 1948 bp, Zea Mays
tctgcacaccgccactcgcccacacgcgaaggcacctagcagccgccactcgccgaactgaggaacacgccgggcgacgggatacagcagcagcgcgcccctctatccccgacgcgacggcgccctgcagctgcagataaacctgttccaatggccaaacaaaaagagggtgtggacaaaagaactgctaggaagatgatccgatctacggaaggctgtgcaaagagcattactttggagaggaacaacaaatcagacgatgtgcagcttcacgatctgccgaatgacatcctaggtagcatactatcacggttgacattcagagaatcctcacagatgggccttgtttctcatacctggcggcggctgtggagaagctgttgccggaaactggtcttcaccagtgccaccatgttccaacccggaaataggagcatcaaacatacaaggaccaactttgccatgagagtcaacagtttcttgcgtcagctacgcactcatcctactcttaataagtttgttattaagttcgggctgcgcaggaagcacactcgccatgtcaacagatggattcgcttctgctccgtgtcgcgagcaagacacatcactattaatttcactcctggagtgaaagattttttcatgggtccagccaacagcaagtacatcttccccctgaacgttttcagtggtccagaaggctcctctacacatgtcagaactcttcatctgggctatgtctgtctggacacaacctcgtctgatttcatgatctttgcaaatcttaagaagctcactctgcacaaaatttcctttttgggagacctccagtgcctgatgctgccagaatgcaattctcttgagtgtctgagcatcagcttctgttccttgcctggtttaagcacatgccaaccgctgcaacgtctgcgatgtgttcgtttgcactactgctatctaaaaaagattgagctggaagctccaaatctaacatcgtttgacttgaccaaccaaccaattccatttgtgcttggtggatctctgaatgtaatggaagccaacattaaactgttagctaaggactcaccttatggtgataatctggactacatctacactgagcttcctgctgcgctgtctcatgtgcataaactctcgataacctcgggtctcttcgtttatgatcagctgcaagggttttccaaaacctcagccagattcatcaatctgaggcatctgaccatgtatttgcctctttatggggaacctaagtcaattagtgggattcttcgcttggcctacctactggaattggccccagctctagaagaattggaattgcatgtgaatggcggtggcgtggatgttgggtgggcactcagacggaatatgttaccgtactcacacaataggctcaagagggtccttatttcaggagccagtgtatgggaggggctaatggagctggcatactacatttttcggagtgccaatagactcgaaagtatggtcttagatccaaagataaggattggggctcctcagctggatggttggatgattgatattggtagggagacgatcaaaaagctttttgagggagaggagtttcagagcattattactattctgtaagaatggtaagataggccacaggattttagtggtcacaccaagtggccatgtttgattatgccataggtttgaccagtatgctaaaaaatgtttgttgttttcatttccgaccttaggaaatgtaaattaagaccctgttccaatctcgcgagataaactttagcagtttttttagctacttttagtcatttgtaatctaaacagtagagctaatggtggtaattgaaactaaattttagcatttcaattcatatagctaaagtttagcaggaagcaaaagtttataccgtgagattgaaacggggtctaatactcc

SEQ ID NO: 219186 - DNA, 2332 bp, Zea Mays
tccaaatgtgctcccacctcccctgcatgcgcaacaaccccacgccccacccggcgatacggtagccgacgcccctacccctaggtcgtgcccgtttcctcccccaccctcgcgtccccgccgtcacggcgtcacccatccacttcctctccctgctgctgcagctcgcgcaacccccatctcaccctcttccttcctgccacaccgttgctaccaccgccctgccctgagagggcccgacgccatggacctcctcgagaagatgatggggcggggagtgctctcggacctgcagaacttctccggcctgatggagcacctggccagcgttgtcgacctcaatggcatggctggacgatccatacttgaacacagatacaggtacaatgtccccctttgagcatggtgaggtgtctgttcttgattttcttgataacggtggataggtacatctccctaatacttccatttaatacacatttttaaaatttgcagcctcgatggtatctacctaacctgtggtatttgtaggttgacttggatttggggaattatgagtgtttcatagatgttactctgacgagggataatattacctctagaaatatataccagtatcttctagctcaaggaaatacttgtgttttctcatttgagattgtaactgatagtttctacttctttcggtctgtcattgagaaggagagaaggggtgattatattggaaagactttataggtaatttttctgtggcatttattactcatgttgcattggactgtccatatcacataatttaaaatacctatggtttcaaatatccaggttgttcctcatgtcactgatgaaataaaatagtggatacagtcagtgtctttagttcttgtggatgggcagatctatccagctgatgtttgtgttattgaattaggaggcactgtgtgtagggttttatgacatcttacaatatgacacttatgtaattattataatatagcagataaattgatttcactttttattttaggtgatattgagtcaatgcccttcattgaagatttgcgccaattatccttttctcctgacacattcagtgaagatttgttctcaggttgatctgtgcaattttgatggcactcatggtgtcaagtgaggactggcaatttccaccagggttcaaaatgaaacagaagttcacttggcaacaaactatacaaagccacttattcttcactggtcattagcaaaaaaagactagagaatggaaggtaaaactccaaattttttcatttgtttaagatgcaagcagttgtattaacactgccatcagttccaatgcagtgttatttaagtgtgcaagaactccttcaaatgtattgccatctcctttcaaattgcttgatagggcgtgtgaaattgaatttactagacaagaaaataattaagctcattcattgtttaggagtaaagacaaatgtatgatattctttaggacaaagagaaacaatttcacaaatttcagccaattgattctactaccttaaaaaatttattctaaaagaatactcaaacctggtgaccttatggcaatgagcaaaaaacaatgtttctaggtggatagacttgattttaggtactccttcaataccaaattagaagtcattttagcttttctaaatacaaagcttttgctatgtgtcttattctacagtgtatctacatacacagtaaaagttatgaacctaaaaaggacaaaaatgcctatatacactataaaagccaaaacgacctacaatttagaaaggagggagtggctgaattatgttgaagaagttatcactctgtagtaggtataactggtatgccaaagttcgagctcattttcttttccatcatttcacattattttactaggatgttttttttgttttgggtgtagatagattttagttttcttttttgtgaatcggccatgaggtcctgcttaacatattaccatgaagatgcattaattacttgccttaggggaacttcctgttgcgtctgtgtttcaggcattaaactcaccagaaaaattataacgatcacttacttgccttgaaatcacaatcaatgtggacacttattatcacaactatatggttttgtttgttttgataatgggctcagatccaaagtctgttgccatatattatcagttgtacatttcaacatatttgaatttgtggaagtgtcagctatgtgaaagctctcttgtgggttttggtggtttggatgacaacccaattaaaggactaacaagtgtgctaagtgttgaacaggtgcttaatgc

SEQ ID NO: 219187 - DNA, 1958 bp, Zea Mays
tccaaatgtgctcccacctcccctgcatgcgcaacaaccccacgccccacccggcgatacggtagccgacgcccctacccctaggtcgtgcccgtttcctcccccaccctcgcgtccccgccgtcacggcgtcacccatccacttcctctccctgctgctgcagctcgcgcaacccccatctcaccctcttccttcctgccacaccgttgctaccaccgccctgccctgagagggcccgacgccatggacctcctcgagaagatgatggggcggggagtgctctcggacctgcagaacttctccggcctgatggagcacctggccagcgttgtcgacctcaatggcatggctggacgatccatacttgaacacagatacaggtacaatgtccccctttgagcatggtgaggtgtctgttcttgattttcttgataacggtggataggttgacttggatttggggaattatgagtgtttcatagatgttactctgacgagggataatattacctctagaaatatataccagtatcttctagctcaaggaaatacttgtgttttctcatttgagattgtaactgatagtttctacttctttcggtctgtcattgagaaggagagaaggggtgattatattggaaagactttataggtgatattgagtcaatgcccttcattgaagatttgcgccaattatccttttctcctgacacattcagtgaagatttgttctcaggttgatctgtgcaattttgatggcactcatggtgtcaagtgaggactggcaatttccaccagggttcaaaatgaaacagaagttcacttggcaacaaactatacaaagccacttattcttcactggtcattagcaaaaaaagactagagaatggaaggtaaaactccaaattttttcatttgtttaagatgcaagcagttgtattaacactgccatcagttccaatgcagtgttatttaagtgtgcaagaactccttcaaatgtattgccatctcctttcaaattgcttgatagggcgtgtgaaattgaatttactagacaagaaaataattaagctcattcattgtttaggagtaaagacaaatgtatgatattctttaggacaaagagaaacaatttcacaaatttcagccaattgattctactaccttaaaaaatttattctaaaagaatactcaaacctggtgaccttatggcaatgagcaaaaaacaatgtttctaggtggatagacttgattttaggtactccttcaataccaaattagaagtcattttagcttttctaaatacaaagcttttgctatgtgtcttattctacagtgtatctacatacacagtaaaagttatgaacctaaaaaggacaaaaatgcctatatacactataaaagccaaaacgacctacaatttagaaaggagggagtggctgaattatgttgaagaagttatcactctgtagtaggtataactggtatgccaaagttcgagctcattttcttttccatcatttcacattattttactaggatgttttttttgttttgggtgtagatagattttagttttcttttttgtgaatcggccatgaggtcctgcttaacatattaccatgaagatgcattaattacttgccttaggggaacttcctgttgcgtctgtgtttcaggcattaaactcaccagaaaaattataacgatcacttacttgccttgaaatcacaatcaatgtggacacttattatcacaactatatggttttgtttgttttgataatgggctcagatccaaagtctgttgccatatattatcagttgtacatttcaacatatttgaatttgtggaagtgtcagctatgtgaaagctctcttgtgggttttggtggtttggatgacaacccaattaaaggactaacaagtgtgctaagtgttgaacaggtgcttaatgc

SEQ ID NO: 219188 - DNA, 2471 bp, Zea Mays
ccaaatgtgctcccacctcccctgcatgcgcaacaaccccacgccccacccggcgatacggtagccgacgcccctacccctaggtcgtgcccgtttcctcccccaccctcgcgtccccgccgtcacggcgtcacccatccacttcctctccctgctgctgcagctcgcgcaacccccatctcaccctcttccttcctgccacaccgttgctaccaccgccctgccctgagagggcccgacgccatggacctcctcgagaagatgatggggcggggagtgctctcggacctgcagaacttctccggcctgatggagcacctggccagcgttgtcgacctcaatggcatggctggacgattggaaatatatctcactgtgatccatgtacagttaatgattcaagtccctctcacttaagtcagaggagactcatccctaaagtcatccagatatacacatcgttctcgcaacttcaccatggaaacaatatagctgccaattattgtagaagatgttgagtagaaacacacataaaaggttgaaagtggtgggagaccatcagaccaaccagatgaacatcctcaaccaacacccttgcacgaatgaaggcacctttctaggatgaatggaacatgcttttaaaagatgaatatggcagcattagctaatagcatcagcactcgttattgatcgaagtctgaaatgtgtcactaagaattcacattatccacaggtggcaaacgagaaaattaaaactgactatttgtaaatggttaagtcaaaatttcaactttctaatgttaaactgtttggagggagcaaagctttgctcggcattggtcttactactttggtttcctatttttgtagatccatacttgaacacagatacaggtacaatgtccccctttgagcatggtgaggtgtctgttcttgattttcttgataacggtggataggttgacttggatttggggaattatgagtgtttcatagatgttactctgacgagggataatattacctctagaaatatataccagtatcttctagctcaaggaaatacttgtgttttctcatttgagattgtaactgatagtttctacttctttcggtctgtcattgagaaggagagaaggggtgattatattggaaagactttataggtgatattgagtcaatgcccttcattgaagatttgcgccaattatccttttctcctgacacattcagtgaagatttgttctcaggttgatctgtgcaattttgatggcactcatggtgtcaagtgaggactggcaatttccaccagggttcaaaatgaaacagaagttcacttggcaacaaactatacaaagccacttattcttcactggtcattagcaaaaaaagactagagaatggaaggtaaaactccaaattttttcatttgtttaagatgcaagcagttgtattaacactgccatcagttccaatgcagtgttatttaagtgtgcaagaactccttcaaatgtattgccatctcctttcaaattgcttgatagggcgtgtgaaattgaatttactagacaagaaaataattaagctcattcattgtttaggagtaaagacaaatgtatgatattctttaggacaaagagaaacaatttcacaaatttcagccaattgattctactaccttaaaaaatttattctaaaagaatactcaaacctggtgaccttatggcaatgagcaaaaaacaatgtttctaggtggatagacttgattttaggtactccttcaataccaaattagaagtcattttagcttttctaaatacaaagcttttgctatgtgtcttattctacagtgtatctacatacacagtaaaagttatgaacctaaaaaggacaaaaatgcctatatacactataaaagccaaaacgacctacaatttagaaaggagggagtggctgaattatgttgaagaagttatcactctgtagtaggtataactggtatgccaaagttcgagctcattttcttttccatcatttcacattattttactaggatgttttttttgttttgggtgtagatagattttagttttcttttttgtgaatcggccatgaggtcctgcttaacatattaccatgaagatgcattaattacttgccttaggggaacttcctgttgcgtctgtgtttcaggcattaaactcaccagaaaaattataacgatcacttacttgccttgaaatcacaatcaatgtggacacttattatcacaactatatggttttgtttgttttgataatgggctcagatccaaagtctgttgccatatattatcagttgtacatttcaacatatttgaatttgtggaagtgtcagctatgtgaaagctctcttgtgggttttggtggtttggatgacaacccaattaaaggactaacaagtgtgctaagtgttgaacaggtgcttaatgc

SEQ ID NO: 219189 - DNA, 219 bp, Zea Mays
ccccatgttatcagcacaactgttgtgataatgtggtggtggtgttttaatcgagagagcactagctccaagaaggccaaaggcccaaagctgatgtttgggaagggagatgaagtagaaggttttgataattcgaagtctaagtttaaggatgatgagcaagatggtaatgaggatgaggatgaataaataataggatgggggaacatcaactttgca

SEQ ID NO: 219190 - DNA, 2259 bp, Zea Mays
caactatttagtgacgagaagaagcaagcaacggccaatagccactttgtttataggacataatatttacagattcaattttcttttctgcggtccaaacaatccattttttttctattccagtggtttgcaatccggtagttttttcacttccctgttccctcgtttctgcgttttgcaccgaccaaccaatgttgggctgcctcgtatgcgggttgctgacttgtccacaacaagcacatcactttcgttttcttttctcccccaggaagatgagtgagaagatgagcaaggagggatctcgctttagaccagcgaatccatccacaaagattccgtgcacctccagcgcagcctccgctgtctgtccccgcggccgcggcaaccgagcaggaagaggaggaggatcccgtcctcccagtctagagcagccgcttgcaaagcgcatcggcggcacggccgtggattccgcgaatctgccaccgcttgctgctgcttctgagactgacaccgccatcgcagctgatggggatacccagcgacggcgacgacgtggtgcaaatccggcacgccgacgccgccggcgagcccaccgtcgtcaccgtgagctgccccgacaagacaggactgggctgcgacctgtgccgggccgtcctcctcttcggcctcagcgtcgtcaagggagacatgagcaccgacggccgctggtgctacatcgtgttctggctgttgccgcgcgggcggcggcccgtggccgtgccgtgggacctcctcaaggaccggttgcttcagctctgccccgtcgcgccgccattcggcttcgggtcccacgacgcgtacctcgcggcggcggctggcctgcaggacgttccgcctcccgcgccacagctcttcctgctcaagctatgctgcttcgaccggatgggactcttgcacgatgtgacacgcgttttgtgtgagctagagctcacgatccggagggtgaaggtctctaccacgcctgatgggagtgtgctggaccttttcttcatcacagatgccagggggcttctgcacacaaagagcaggagagaagaaacccaggacagactcgagagcgtcttaggcgactccttgacatgttgcgaaatagatcctgctggcgaagacatggtgtcttgctgcctccagtcctgggcctgggcttcgctgacgcctgctgttatagcacagatgtttagcacagctgatcgcgtggaggagcaaccgatcggcacaaggggtggtggtggtggtaccatcatctccgtgacgatggacaactcgcttagccctgcccacactcttattcagattcagtgtggcgaccataagggcctccttaagtgaagaaagcaagcaagcggaatcctcctttgctatcagatttcatatggccgattctacgcgagccaaaacggaaggtgcgagatcgatctgttcgcggtgcagtcggacgggaagaagatccttgatcagcacaggcagagagcactgtgctgtcgcctgaggatggagctccgccgaccactccatgtggcgttggtgaaccgaggtcctgacacggagctgctggtagcgaacccggtcgaggtttctgggaagggtaggccgctggtgttctacgacatcacccttgctctcaagaatcttcagagacgaatcttcttggctgagattgggaggcacgttgtggaaggcagggagtgggaggtctacagattgcacttcggtgaggagcacgagctctcgtctgcgctgcggaagaagattgtggatgcagtcaccaacatgctgatggggtgggactgatggcactgctgctgctgccgtgcctcggtctgaaacattatgcttagtgttcttccagaaactaacctatttggtgcaagcaaagaagaaacaactgatctctatctcttagatgcagcggttttcagctaatgcagagaccatgaaacctttggttatctaaacatgcactaggaaccggggtcctactacttagtgggcaccagacctgatgtatatgcatatactgaagcatgatcaagagtcatgtgtggcatatatataccattttgtctttgtcagaaatcgagttcttcatcagtacacaagcacacaaaaaaaacacgtagaacagatgttgggagatggaagagttgtacttctggatgattacaaaatatgaagtgtatataaggttcagatttgaacttggatggcttcatagggatg

SEQ ID NO: 219191 - DNA, 2189 bp, Zea Mays
cagcttgccaacatagggtacccataaacgcaacagcagcagccaggcaggcgagagaaaagagaactcctggagccataggtgtgggcgtgtggctagcatagctgtaggtcatccttcttgcttggcaatgagcgagcaagacgggcagcacgtcgcggcaagcacgccggacacggccatcgagtccttctcacagctccccttcgtccgccccaagcccccgcagccggcgtccacgtccagtgcctcgtcgatccgactgttcggcttcaaggtcccacccgacgccgccgccacgtcctcgtccacaggaaccagcgatgctaccgcagccagcgccaccgtagcgggccaggcggcggtgtcgggtgccggtgcaggcgatggcggcggcggagggcgcaagttcgagtgccactactgccgccggaacttcccgacgtcgcaggcgctgggcgggcaccagaacgcgcacaagcgggagcggcagcacgcgaagcgcgcgcagtgccagagcgcgatggccatgcatcacgcccaccactaccctgaccacacccacgcgtaccccgccttcaccagctaccaccaccagttcggcatggcgcgctacgagcccccgccgcactacccctcgtggtccagccacctcccgcacgccgctccgcctttggtgcccagatactacggcgggtccggctccctgtcgcagcctatcaacggcagccccgtcccggctgccgctctctggcgggtcccggcggccgttagcgtggccgcgccacttgtgcgccaagagcggccgacgccactgtccttgtgcggacatgacgaggaggcattgacaggagcgagaagaggggatatatcagcagatgcaggacagggaggctcgcgttcttcttccacctcgtcatctacatcgtcgcggcatcaaccccgccgggcaggtgctgctgaaaacagagagaacctgatccagccaaggatggaagcaagaagagcttcgaggtaacgagagcatgggagaaggtcgaggaggccgaggaaaccaaagccaggggtgaagaagaagactagcaaagtcaaggttgatctagttgagaagagctatggtgcatcgaggatcactacttaagaacgtgacttacagcaatgaggtaacatatgtagttatgtggtgtaagtaatatggcttaagatgcagagcaaggtccacaaggagtagtgtcaaagccagaaaattatgttggagctcataaatggcaaactagatcaagtcatggagacttggagttttggagtccaacatcgacttcaaacagcctagaaggagcaaaatggtgaagaagagaaagtatctttggagctctatttaaggtgaaacaaaaagctgggagaagatttaaagagaggtaatttcccgggacttagtcaattagtttgtacactaaatgtgtttgtctaagtcacaggaaggtcctctcaaaagttgaagtcaaaaggagaaagaaacaaggaaagcacataagtgtgttgctgattgggtagcacaccgaacaatctggtgccctctacctagtctcgggtgtctctgctaaaaatgtcagacagtatgggccatgcatcatacagtttagaccctccaacgactatcttcaaacggctactcgaaggcaacgactagctggtgcaccagacagtccggtgctggtcaatcattggtgtcaggctgccggtggtgtgccaccggacaccgaacagtctggtgcacccgcagtagtggcaatttttccaagatttggatcttctttgaatggaaaggggcaacaactaggggatcctttggggttataaaagggacccctatgcgcccatattgaacacacgagtgcagcaaacaagtccataaatcaagtaatcaaattatttctctcactctcttgtgtatgtctctagtttgtgtagaggcgaagttataagcccttagggagtggggaagtgccgctagaacaagagcaaaatcttgagcaaggttttactctgccggagcactgtcaaaagattgtaagcagtcacgacatcattgtaaccatcatcaacatagtggaggctatatctatcacattgacagacatgagcaaatggaggaaggagttgaaatagactccaagccaaggtgtggc

SEQ ID NO: 219192 - DNA, 1969 bp, Zea Mays
cttcttattcagttctgtttcgtgccaatcagacggcggccgcctcctctccccccgctgccgagctcacccttccgcctgccgcctgaacttgtctcgcccgcggcagatctgctccttccgctcgctgcaccgcaacccggataggagaccgcgcgcggtcgagaactacctggggaccaacgtcctcgaccagctccggtgcggccggcacacagctccacagatttggacagcgcaattacttaagctatttgtattcggatctgatccaaccctggtggtcagctggactcatcgcccatggagcacactaagtcaggccccagcagttggccagaactggccgacgtggtgccggtgccgcaggacgatgggcctagccctgtggtgtccatcgcctatcgagatgactttcgtgaggtcatggattacttccgcgccctctacctcaccggtgagcgaagccctcgcgctctccgcctcaccgccgaggccatcgagctcaaccccggcaactacactgtctggcatttccggcgccttattctggagtcactagattttgatttactagaggagatgaaatttgtcgaaaaaattgctgaatgcaatccaaaaaattaccaaatctggtgagtttcattgtacatatattttttcacatttagtaattcactgcatatcttttttcacatttagtaattcacagaaactaatttatctttggtgtctgcagattttgcatgaatgattggcaatatcttgactaaatatcttccatagtttttttaaactttgatcatcttttatctttgctctggaaaagtggaaatcatgactaactgttgatggtccaattttattaccaggcaccataagagatggcttgctgagaaattaggacctggtattgcaaacaaagagcatgaattcacaatgaagatacttgctattgatgcaaaaaattatcatgcttggtctcataggcagtgggttcttcaagcgttggggggatgggagactgaattagaatactgtgaccacttacttaaggaagacgtcttcaataattcagcttggaatcagagatactttgttataacaagatcaccatttcttggtggccttgcggcaatgcgtgattcagaagtagactacacaattgaagctattctagcaaacgctcagaatgaaagcccctggaggtacctcaagggtctatacaagggtgagaataacctgctagtagaggacgagcgcatctctgctgtttgtttcaaggtcctgaagaatgattggacttgtgtatttgctttgagtttgctgctcgatcttctctgcactggtttgcagccttcagatgaacttaggtccactcttgaaacaataaggagctcccatcctgaaaccgcggatgatgatcctgcagccgctgtttgctgtatcctgcagaaatgtgatcccctgcgggtaaattattggtcttggttcaaggacactctttctcagatctcatgacttcacatgggttcaccccttgtccgcgctggtccgggctctgtgagatagacatgttttagatagtttcattggacacccaaacagagcggacagagtgtatggctgctaccttctccgtgactgaaagcagtgcttgtaacgattttgtttagtaaaatttgtgagtgttactgctccaaacaacaccttatgcaaccatatttgaatatttcacatgtaagcttgaatccaggtgtgtttgttaatgtattacaattgccatgggagcctaaatgagacccataatcacttccactagagtcggaagaccgtgtcgagcagttcactcatatggtcacttaaagcactcttctgcactgtaaattgtaatattcgcagagttttaaatatgggtatgacgatgagtacgctgctgaaaatagtctaaccatttgctttgattttc

SEQ ID NO: 219193 - DNA, 901 bp, Zea Mays
atgaccttctccttgctctgcaggaagtcagacctcgcgctcctccacatggtcccctgtgccccgctcagccgcctcctcgacaatatccaggaggatgttgttgcaactgggggtatcgatacaaatgcagtaatctttgatcagtcatctggtcaaatcttgtgcacgcttactggtcactcaaagaagaacagatactatggaattgagatgtttggttctacatatagagtctcaagcatcattgacgttggcactagcctcctctgtacaaggtcaggggtttgttttgctatcgaggactacttctatatcatattcgtctgcttgctgggtgatattctttggtgtactaaccccaaggccggtgctgttgaccccaaggccgagaacaaggctatagagaagataaaatctgccaggaataaatcatcgcaaggaaggtgagtatctcttggtatcttgtacaaactacaaagtgcaggtgagtatatttgcttctttaaattgatcttactgccctaaaactactaattctcgacttcatgtgaccagactcgatttttttttcaatccagttgccaccacatcagcaccgctgcaacggaaagtacctctagaaaatgtgaccccaactttcatgattatatgttattcttagccttccctgtagtcatcaattctagatagggcatctcaatctatgcaggccaggtagcaattaggccaatagaagctgtatcttacaagcatgtcctcgagacacatgccagcgccttttcatttaaagtcatatgttactcatctaaatgcactatagggctgttcttctgcatgccagttgtgtttgaagagattgtgtaaacaaaacttaattattatggttgttagttcttag

SEQ ID NO: 219194 - DNA, 424 bp, Zea Mays
taatgtgtctttatcgggaggatcgtcatgcaagtggtacataaatacaccagtcccggaagtaaacgctctcagagctagtgctgaaaccaaacacctccctgtcatttgggatcagggcaaagcagctgctgagagtacagtgattgcagttcctgaacataagaagctcaaggatattaagtacctccatccttttgaaaataagaagaaggaatggcttgtcatcgtaaaggtgctcaagattgatagctcatggtggtacaacgcatgcaaaaaatgccttaggacaaccaaaccgcatggtgacacatacaagtgcaccaataattcctgtgacaacataggatcgcctaccccaaggtgctgcatgaatgctgccgtagcagagaaagccaaatatgagaagcctggtaaagcataa

SEQ ID NO: 219195 - DNA, 4873 bp, Zea Mays
cacttccgtctcagtcctccccgtttcacccacgcgtgcgctctctcctcactctccctctccctctcgtcgacgattgggaaagcgccgccgccgccgcgccacaccacgccaggtggcgagttcttcgtagcgccgttcgccaggtctccgtagcgcccttagccgtccgcgagaaccctcaaaggcatttgcattatggttgcagcgtaggtggggagccattagaaggaggggcaacaagagttgctgggcatggcggctcaggaggccgcggcagctgattctttgggccctcggtttgctccggatgacccgacgctccctgcgccttggaaagggctgattgatggcgcgacgctgtactattggaatcctgagacgaatgtcacccagtatgagaagccggctgcaactgcaggtgtgccccctttgtcagcaggtcttccgccggcaacccctgcgcaggttccggaatctgcaccagtggcttttccgcagcttaacgtgcagtttggacaagctggccaggcagggcaccaggagcgtcctgaccaggcagcttatcctcaggctggccagcttggccagcagcacactcaacagccagctcagcagcaaccgtttcagcagcagcaaccgtttcagcagcatgtccaggcgcaacaccaagcttcgtttcagcatgtgccatatcagcaacagcaaacacacatgccaaatcagccacatcaataccacagcacgcatcctcaacacatgccgtaccagcatggtctttacatgcaacctcagcagcaacagcaggctccaccatattcatatcaggcagaccagcagccacagatgcgacaaactgcttataatcaagctcagcagccatcagtgcctcaagctgcctacaatcaaagtcagagtcagcagccaccaatgcctcaatcttcctacgatcaaggtcagagtcagcagccaccaatgccgcaaccttcctacaatcaaggtcaagttcagcagccaccgatgccacaaccttcttacaatcaaggtcagcaatccatgataccacagtctgcctacaatcaagctcagcagcctcaaattccacatggtgcttataatcaaagccagcaaccgctgggagataggattccccagggtcaagggcaacatcctcaacaatctttgagctctcatcatcctgcccaagcttcgcagtcgccgcaagtttcccaacctcaaggacctaaaatgccgactcaacaaggtcaactgcaacatggattgccgttcactcagcatggaaaaacgccattgtcacatgggcaacaaagtcctttgttgaaggatgatgatggaggagttcatgaaggcaagcggactggctttccgttaccacttagtcagcagcgtggccaagctcctcttccaaatcagcagctaccttctactcatcaacatcctggagcccttagtagccagccaaatatacctggagtcggtgggccattttatcctgccaggaatcttcctgatggaccatcctctgctgagactaataacatgggttttatgaactcacctgctcaaatgcatcaaggtggagcagatacaaactaccagaaaaaaccagttagtggccatacagttccaaatcatgttggtccatcaccaattcgacctccaatggggttcgatatgggtaatagtgttggacactttgaaagagatgaccctcactcttatggaaggtttgatggagcaaaggctctccagcagcagccaaagcttgctgctctcccaacttcacaaaattccatggtcatgcataatggaccgctttatcctcggccagacaattttggtggtcataacatggcacctccgcattcagtaccaaatccatataatcttggtccattgcctattggaacttcagtgaggccaccgtcaagtatgtttgctcctccagattttccaagcgtatcttcagctgatgcataccgtcaacaccatgaagtcactgccatgggtgagaacgttcctgctccgtttatgacatttgaggccactggattccctccagagattctgagagagcacaatggatttacggtgatgctgagtgccctaattcaacaataggttttcaatttctgggcactgtagtgaaatacttgtggctattttctgctgacaagtattgggaggattgatgttgtttcagattataaaatgaggctgaggcttcctgcttcttgtctctgccactgaatcaacaaagagcttcttcatgccttgagttgcttaagtgggcatgcccttatgatgcttattcgttttttcatttaagatccatgcagctggtttttcaaatcccactccaattcaagctcaaacatggcctgttgcgctgcaaaaccgggacatagtagctattgctaagacagggtctggaaagacgctggggtacctaatccctgcttttatacatctgaggagatgccacaataatccgatgctgggccctacagtattggttttggcccctactcgcgaacttgcttcacaaatacaagccgaagtagttaagtttggtcaatcatctagagtttcttgcacatgcctatatggtggaacttcaaaggtccctcagctaagagaacttgagcgtggagcagatattgtggtagcaacaccagggcgtcttaatgatatcctggagatgaagaggattaacctccatcaggtttcattacttgtgcttgatgaagcagaccgcatgcttgacatggggtttgaaccgcaaatacggaagattgtggatgagcttcctaatgctaggcagactctaatgtacactgccacttggccaaaggaggttacaaaaatagctggggatttactgagagatcctgtccaggtgaacattggcagtatcgatgaacttgttgctaacaaatccatcactcagtatgtagaggtggttccacctatggacaagcagcggcgtctagagcagattcttggagatcaagaaaggggctcaaaaatcatcatattttgctcaactaagaaaatgtgcgatcagcttgctcgtggcattggtcgcaactttaatgctgtaagcattcatggtgataaatcacaggccgaaagagataatgttctcaatcagtttcgaactggcagggcttcagtattagtagccacagatgttgctgctcgtggacttgatatcaaagatattagagtggtaatcaattatgactttccaactgggatagaggactatgtgcatcgcatagggcgtacaggaagagctggcgctactggagtctcgtacacatttttctcagaacaagattggaaatatgcttgtgatttggtgaaactcttgcaaggtgccaaccagcttgtccctccgcagctgcaagacatggctgcacgcagtgcttctggaggtccaagaaaccaggcttctgggatgagtcgctgggatgggcctggtggtcgtggttttgaacctggtgttggtggccctgttggttatggtggtgttagggagggtcctggaggttttggtggtcgtgagggcccaggtggacttggtgttcgagaaagcccagccatgtttggtggccccggtggcttcggtgatcgggaaggccccggtggcttcagtggccatgagggccatggtggctttggtggccgggaacgggagggtcctggtggctttgttggcagaaagggcccaggtggttttggtggacgggatggccctgggtcaagtggtttcggtggtagaggacagcgtggatctggtggttttggcagtagaggtggagcaagccctgggggctttggtggacgtggtggcaggggcgattctcctggttttggtggacgcggcaggggtgatttttccggttttggtggacgaggtaggggagatttttctggtgggcgcggtggcaggggccgtggatttggtggcaggggacgttctgaccggtttgtctcagatggacggggacgatatgataaccgtcgaggatttggagacaagggtagggatcggagctacagccgcagcccggatagagtccgggcacggggttatgacagaagaagtgacagcaggagcattagtaggagcaggagtcgcagcaggagctggtcacgcagcagaagccgcagcaggagctggagccgaagcagcagccggagtcacagcaggagcaggagtcgtgaccatggggcagcaccggagcgcaggccccgagcaagatccggcttcgatgtgctgcctcctgcaactggagctgctggacctgcacctgttcccgtacctggaccagcagcaccgcctgttcctgctccggcacctgaacaatcactggctaatacatcttcaatgtcaccgatgtctcctggtggcctagtccagccagctgctgcacctgctggtggccaaccttcccaagggactggcgctgcattccccagttctcctgcaggcgaaacgtttccaggcgcagcagctcagcatcccgcgcctgatgtataatgagtcggacgacatccagtgccctaaatatgtaatccggtgtacaataggagaaatgagtttccgggtagtagtttatatggcaaaaaaatcggcttttccgcaattttctgatctcgtggtgaattgacgtatggatgttgtgtgtttttgtgctgaattcaagaaaaagttatgttgtgcaactatattttgttttgtgtgttttctcgttttacaattttgtgtttctttgaattcttttgttgttgctatttttgcctacaattgcgcgacctgattttgcgtacaattgcgcgacct

SEQ ID NO: 219196 - DNA, 4786 bp, Zea Mays
cacttccgtctcagtcctccccgtttcacccacgcgtgcgctctctcctcactctccctctccctctcgtcgacgattgggaaagcgccgccgccgccgcgccacaccacgccaggtggcgagttcttcgtagcgccgttcgccaggtctccgtagcgcccttagccgtccgcgagaaccctcaaaggcatttgcattatggttgcagcgtaggtggggagccattagaaggaggggcaacaagagttgctgggcatggcggctcaggaggccgcggcagctgattctttgggccctcggtttgctccggatgacccgacgctccctgcgccttggaaagggctgattgatggcgcgacgctgtactattggaatcctgagacgaatgtcacccagtatgagaagccggctgcaactgcaggtgtgccccctttgtcagcaggtcttccgccggcaacccctgcgcaggttccggaatctgcaccagtggcttttccgcagcttaacgtgcagtttggacaagctggccaggcagggcaccaggagcgtcctgaccaggcagcttatcctcaggctggccagcttggccagcagcacactcaacagccagctcagcagcaaccgtttcagcagcagcaaccgtttcagcagcatgtccaggcgcaacaccaagcttcgtttcagcatgtgccatatcagcaacagcaaacacacatgccaaatcagccacatcaataccacagcacgcatcctcaacacatgccgtaccagcatggtctttacatgcaacctcagcagcaacagcaggctccaccatattcatatcaggcagaccagcagccacagatgcgacaaactgcttataatcaagctcagcagccatcagtgcctcaagctgcctacaatcaaagtcagagtcagcagccaccaatgcctcaatcttcctacgatcaaggtcagagtcagcagccaccaatgccgcaaccttcctacaatcaaggtcaagttcagcagccaccgatgccacaaccttcttacaatcaaggtcagcaatccatgataccacagtctgcctacaatcaagctcagcagcctcaaattccacatggtgcttataatcaaagccagcaaccgctgggagataggattccccagggtcaagggcaacatcctcaacaatctttgagctctcatcatcctgcccaagcttcgcagtcgccgcaagtttcccaacctcaaggacctaaaatgccgactcaacaaggtcaactgcaacatggattgccgttcactcagcatggaaaaacgccattgtcacatgggcaacaaagtcctttgttgaaggatgatgatggaggagttcatgaaggcaagcggactggctttccgttaccacttagtcagcagcgtggccaagctcctcttccaaatcagcagctaccttctactcatcaacatcctggagcccttagtagccagccaaatatacctggagtcggtgggccattttatcctgccaggaatcttcctgatggaccatcctctgctgagactaataacatgggttttatgaactcacctgctcaaatgcatcaaggtggagcagatacaaactaccagaaaaaaccagttagtggccatacagttccaaatcatgttggtccatcaccaattcgacctccaatggggttcgatatgggtaatagtgttggacactttgaaagagatgaccctcactcttatggaaggtttgatggagcaaaggctctccagcagcagccaaagcttgctgctctcccaacttcacaaaattccatggtcatgcataatggaccgctttatcctcggccagacaattttggtggtcataacatggcacctccgcattcagtaccaaatccatataatcttggtccattgcctattggaacttcagtgaggccaccgtcaagtatgtttgctcctccagattttccaagcgtatcttcagctgatgcataccgtcaacaccatgaagtcactgccatgggtgagaacgttcctgctccgtttatgacatttgaggccactggattccctccagagattctgagagaggttttcaatttctgggcactgtagtgaaatacttgtggctattttctgctgacaagtattgggaggattgatgttgtttcagattataaaatgaggctgaggcttcctgcttcttgtctctgccactgaatcaacaaagagcttcttcatgccttgagttgcttaaatccatgcagctggtttttcaaatcccactccaattcaagctcaaacatggcctgttgcgctgcaaaaccgggacatagtagctattgctaagacagggtctggaaagacgctggggtacctaatccctgcttttatacatctgaggagatgccacaataatccgatgctgggccctacagtattggttttggcccctactcgcgaacttgcttcacaaatacaagccgaagtagttaagtttggtcaatcatctagagtttcttgcacatgcctatatggtggaacttcaaaggtccctcagctaagagaacttgagcgtggagcagatattgtggtagcaacaccagggcgtcttaatgatatcctggagatgaagaggattaacctccatcaggtttcattacttgtgcttgatgaagcagaccgcatgcttgacatggggtttgaaccgcaaatacggaagattgtggatgagcttcctaatgctaggcagactctaatgtacactgccacttggccaaaggaggttacaaaaatagctggggatttactgagagatcctgtccaggtgaacattggcagtatcgatgaacttgttgctaacaaatccatcactcagtatgtagaggtggttccacctatggacaagcagcggcgtctagagcagattcttggagatcaagaaaggggctcaaaaatcatcatattttgctcaactaagaaaatgtgcgatcagcttgctcgtggcattggtcgcaactttaatgctgtaagcattcatggtgataaatcacaggccgaaagagataatgttctcaatcagtttcgaactggcagggcttcagtattagtagccacagatgttgctgctcgtggacttgatatcaaagatattagagtggtaatcaattatgactttccaactgggatagaggactatgtgcatcgcatagggcgtacaggaagagctggcgctactggagtctcgtacacatttttctcagaacaagattggaaatatgcttgtgatttggtgaaactcttgcaaggtgccaaccagcttgtccctccgcagctgcaagacatggctgcacgcagtgcttctggaggtccaagaaaccaggcttctgggatgagtcgctgggatgggcctggtggtcgtggttttgaacctggtgttggtggccctgttggttatggtggtgttagggagggtcctggaggttttggtggtcgtgagggcccaggtggacttggtgttcgagaaagcccagccatgtttggtggccccggtggcttcggtgatcgggaaggccccggtggcttcagtggccatgagggccatggtggctttggtggccgggaacgggagggtcctggtggctttgttggcagaaagggcccaggtggttttggtggacgggatggccctgggtcaagtggtttcggtggtagaggacagcgtggatctggtggttttggcagtagaggtggagcaagccctgggggctttggtggacgtggtggcaggggcgattctcctggttttggtggacgcggcaggggtgatttttccggttttggtggacgaggtaggggagatttttctggtgggcgcggtggcaggggccgtggatttggtggcaggggacgttctgaccggtttgtctcagatggacggggacgatatgataaccgtcgaggatttggagacaagggtagggatcggagctacagccgcagcccggatagagtccgggcacggggttatgacagaagaagtgacagcaggagcattagtaggagcaggagtcgcagcaggagctggtcacgcagcagaagccgcagcaggagctggagccgaagcagcagccggagtcacagcaggagcaggagtcgtgaccatggggcagcaccggagcgcaggccccgagcaagatccggcttcgatgtgctgcctcctgcaactggagctgctggacctgcacctgttcccgtacctggaccagcagcaccgcctgttcctgctccggcacctgaacaatcactggctaatacatcttcaatgtcaccgatgtctcctggtggcctagtccagccagctgctgcacctgctggtggccaaccttcccaagggactggcgctgcattccccagttctcctgcaggcgaaacgtttccaggcgcagcagctcagcatcccgcgcctgatgtataatgagtcggacgacatccagtgccctaaatatgtaatccggtgtacaataggagaaatgagtttccgggtagtagtttatatggcaaaaaaatcggcttttccgcaattttctgatctcgtggtgaattgacgtatggatgttgtgtgtttttgtgctgaattcaagaaaaagttatgttgtgcaactatattttgttttgtgtgttttctcgttttacaattttgtgtttctttgaattcttttgttgttgctatttttgcctacaattgcgcgacctgattttgcgtacaattgcgcgacct

SEQ ID NO: 219197 - DNA, 4319 bp, Zea Mays
cacttccgtctcagtcctccccgtttcacccacgcgtgcgctctctcctcactctccctctccctctcgtcgacgattgggaaagcgccgccgccgccgcgccacaccacgccaggtggcgagttcttcgtagcgccgttcgccaggtctccgtagcgcccttagccgtccgcgagaaccctcaaaggcatttgcattatggttgcagcgtaggtggggagccattagaaggaggggcaacaagagttgctgggcatggcggctcaggaggccgcggcagctgattctttgggccctcggtttgctccggatgacccgacgctccctgcgccttggaaagggctgattgatggcgcgacgctgtactattggaatcctgagacgaatgtcacccagtatgagaagccggctgcaactgcaggtgtgccccctttgtcagcaggtcttccgccggcaacccctgcgcaggttccggaatctgcaccagtggcttttccgcagcttaacgtgcagtttggacaagctggccaggcagggcaccaggagcgtcctgaccaggcagcttatcctcaggctggccagcttggccagcagcacactcaacagccagctcagcagcaaccgtttcagcagcagcaaccgtttcagcagcatgtccaggcgcaacaccaagcttcgtttcagcatgtgccatatcagcaacagcaaacacacatgccaaatcagccacatcaataccacagcacgcatcctcaacacatgccgtaccagcatggtctttacatgcaacctcagcagcaacagcaggctccaccatattcatatcaggcagaccagcagccacagatgcgacaaactgcttataatcaagctcagcagccatcagtgcctcaagctgcctacaatcaaagtcagagtcagcagccaccaatgcctcaatcttcctacgatcaaggtcagagtcagcagccaccaatgccgcaaccttcctacaatcaaggtcaagttcagcagccaccgatgccacaaccttcttacaatcaaggtcagcaatccatgataccacagtctgcctacaatcaagctcagcagcctcaaattccacatggtgcttataatcaaagccagcaaccgctgggagataggattccccagggtcaagggcaacatcctcaacaatctttgagctctcatcatcctgcccaagcttcgcagtcgccgcaagtttcccaacctcaaggacctaaaatgccgactcaacaaggtcaactgcaacatggattgccgttcactcagcatggaaaaacgccattgtcacatgggcaacaaagtcctttgttgaaggatgatgatggaggagttcatgaaggcaagcggactggctttccgttaccacttagtcagcagcgtggccaagctcctcttccaaatcagcagctaccttctactcatcaacatcctggagcccttagtagccagccaaatatacctggagtcggtgggccattttatcctgccaggaatcttcctgatggaccatcctctgctgagactaataacatgggttttatgaactcacctgctcaaatgcatcaaggtggagcagatacaaactaccagaaaaaaccagttagtggccatacagttccaaatcatgttggtccatcaccaattcgacctccaatggggttcgatatgggtaatagtgttggacactttgaaagagatgaccctcactcttatggaaggtttgatggagcaaaggctctccagcagcagccaaagcttgctgctctcccaacttcacaaaattccatggtcatgcataatggaccgctttatcctcggccagacaattttggtggtcataacatggcacctccgcattcagtaccaaatccatataatcttggtccattgcctattggaacttcagtgaggccaccgtcaagtatgtttgctcctccagattttccaagcgtatcttcagctgatgcataccgtcaacaccatgaagtcactgccatgggtgagaacgttcctgctccgtttatgacatttgaggccactggattccctccagagattctgagagagattataaaatgaggctgaggcttcctgcttcttgtctctgccactgaatcaacaaagagcttcttcatgccttgagttgcttaaatccatgcagctggtttttcaaatcccactccaattcaagctcaaacatggcctgttgcgctgcaaaaccgggacatagtagctattgctaagacagggtctggaaagacgctggggtacctaatccctgcttttatacatctgaggagatgccacaataatccgatgctgggccctacagtattggttttggcccctactcgcgaacttgcttcacaaatacaagccgaagtagttaagtttggtcaatcatctagagtttcttgcacatgcctatatggtggaacttcaaaggtccctcagctaagagaacttgagcgtggagcagatattgtggtagcaacaccagggcgtcttaatgatatcctggagatgaagaggattaacctccatcaggtttcattacttgtgcttgatgaagcagaccgcatgcttgacatggggtttgaaccgcaaatacggaagattgtggatgagcttcctaatgctaggcagactctaatgtacactgccacttggccaaaggaggttacaaaaatagctggggatttactgagagatcctgtccaggtgaacattggcagtatcgatgaacttgttgctaacaaatccatcactcagtatgtagaggtggttccacctatggacaagcagcggcgtctagagcagattcttggagatcaagaaaggggctcaaaaatcatcatattttgctcaactaagaaaatgtgcgatcagcttgctcgtggcattggtcgcaactttaatgctgtaagcattcatggtgataaatcacaggccgaaagagataatgttctcaatcagtttcgaactggcagggcttcagtattagtagccacagatgttgctgctcgtggacttgatatcaaagatattagagtggtaatcaattatgactttccaactgggatagaggactatgtgcatcgcatagggcgtacaggaagagctggcgctactggagtctcgtacacatttttctcagaacaagattggaaatatgcttgtgatttggtgaaactcttgcaaggtgccaaccagcttgtccctccgcagctgcaagacatggctgcacgcagtgcttctggaggtccaagaaaccaggcttctgggatgagtcgctgggatgggcctggtggtcgtggttttgaacctggtgttggtggccctgttggttatggtggtgttagggagggtcctggaggttttggtggtcgtgagggcccaggtggacttggtgttcgagaaagcccagccatgtttggtggccccggtggcttcggtgatcgggaaggccccggtggcttcagtggccatgagggccatggtggctttggtggccgggaacgggagggtcctggtggctttgttggcagaaagggcccaggtggttttggtggacgggatggccctgggtcaactggtcacgcagcagaagccgcagcaggagctggagccgaagcagcagccggagtcacagcaggagcaggagtcgtgaccatggggcagcaccggagcgcaggccccgagcaagatccggcttcgatgtgctgcctcctgcaactggagctgctggacctgcacctgttcccgtacctggaccagcagcaccgcctgttcctgctccggcacctgaacaatcactggctaatacatcttcaatgtcaccgatgtctcctggtggcctagtccagccagctgctgcacctgctggtggccaaccttcccaagggactggcgctgcattccccagttctcctgcaggcgaaacgtttccaggcgcagcagctcagcatcccgcgcctgatgtataatgagtcggacgacatccagtgccctaaatatgtaatccggtgtacaataggagaaatgagtttccgggtagtagtttatatggcaaaaaaatcggcttttccgcaattttctgatctcgtggtgaattgacgtatggatgttgtgtgtttttgtgctgaattcaagaaaaagttatgttgtgcaactatattttgttttgtgtgttttctcgttttacaattttgtgtttctttgaattcttttgttgttgctatttttgcctacaattgcgcgacctgattttgcgtacaattgcgcgacct

SEQ ID NO: 219198 - DNA, 2884 bp, Zea Mays
atggatctactaggagatcgtgaagatgctcttagccttgtttcatggtgcaggagcgaggagaaagaagatccctggagacccggtgagagggtagagcggctcgtcactcttcccaaactgtccctgcctccatttcttttccttttgtttgtcgcctctcccttcgctcgccctgtctgcgctttcgctttcctttcgcctcccaccaccaaaaagaggagcagaggagaggtttgtgtgacagcgtgagcgagcgagtgatgattaacacctcagccggcagacagccgccaaagcagtagcgtaagaaagagagttagtagagcccagatcgagggagggaggagtagcaccgagcacgagcatctccactccacgcgcgccccatgcccgtccgctccacctccatgagcgtcagctgagcaagacaaggaaggggaatctctccctcattcgccttgccgtcttgatctgtcggctcccggcggcaacaccctacaggtttcatctatggggcaagatgctggcttcaaacgcgaggatcattctggattgggatcaggtcctcaaactttgaaggtctcctgctgcactagtgaagaaaacgagagtcgaaacagaagataccatcagttgaaatgctcagagagcaactcgaggcagttgcacctggactacgtcccaaatttccactgcaggagcttgccaacgagaagccgcaagacgaatgctgagcaaagcaccgtggggaagcgtggttctatgtaccagagctccagcgaaataagcaggatcagaaagatccaggagggcaggaggaaaatagattctgcattcgatggggacgcgttcctgtcctttgatattgtcgatgcatcctctcgccctagcacaagtggagcttatctgcattcccatcagaatcggaggtcgggcgctaagccttctgtggacaccgctaagcgagcgtcaaaggacttcctggaccttcagttccgtgaacatcctgatgagaattttaagctagatcgaccacgcttggatagtaccttgttgaaaaacgatgatggtttcttggagatttctctcgagaaagagatagcaaagggtggcccgtgcagaaatgcagctcctatcctgctaaacactgggtcaggcaaatgcactgacctgcaaaagatgaatggatgccccagtgagaacaactgtggtgacaaggggagagattcagcaagcagttccaaatcaacgcctgtgaaagtaagctcctttgacggatcctgccaatctgacggtgctcaacaccatatcacagagaacaacactaaagctcgatcaagccccttcaagaagatgctggaccctattatgaagtccaaatctcctaggagcccatctatcatggaaagaggaggctccaactccgcaactgggccaggaagcaggaaaaactccgtgtctcgaaaatcactgctgggtgatttttcaagaagtgaacaagcatctaattgccagcccaatgggcaaacacagaagcgtgtaaacaaatctgctttgtcacctgctcatctccaagcggttcttagattggattccaagaacggtgtccaggtttttgaattctgtgttgacggcccaggagaatccatttccgccaggaattggaaaaacggtgatgagttgagctctatatacaccttccatagtggcgggaaacggtccagtgctgctggaaggatctccaaagatggaggctgggatttacccccaatcgttgggcaggtgcaggtttcatcatacttatgctctgaagttggaaaagacggtacggtgaataactctgtcgtcaccgagtttgtttcgtacgacattggtcatgcgaggcggattgttgaggagaagacaggggcacttcaacagccacagaggactagtctgacggaagagaacaagactgggagaaataactcagatgtatcgacatcttgcccgtggtccgaagaagaccttcatccttatttggagattgcggcgactgtgatagaggttccgtttagcagatacaagtccgaagaggtgaagaatggttcatctccttgtactgtcaaagttgttgcacctagtggactgcatggttcgccgagtgacgatgaagccggcggcccatctcccttgctagatagatggaggtacggtgggggttgcgactgtggcggatgggacatggcttgccccatcgacgttattggcaacacatatgataatagctgggctgagtctatagctaccaatgtgaaacatcccatggagctctttgttcagggtagcaaagaagagctccccgtcctttctatgaaggagaacgggagagggcagtttgtggtggatttccatgggcgactatcagcgttacaggcgttttcagtatgcatctctctgctgcactgttctgaagcttcgatcgccatcagcctcaagaaggggaagcagaagctgtattccagctcgctcaagttgctcctcgaggaggacgtgaggcacctgatcgaggcagtcacagctgaagagaagaagaagaagaagcggagtagagaaaaggcgcctcctccgtctgttctgcttgacccgcctttttctcccatcggaagagtgtagtgtagccaccaggcattgaagaacccattgcattgtttatgatttgtcttgatgttcatattttccttttaggatttcatacttgcatggagtgttagattctagcaggcagtaaggttcataatgtactgttgagatgttgaatagaagggggggaaataaagtaggaggagccagttttcttgtgaatggacgaagctaagactacctccaatcatatcgtcat

SEQ ID NO: 219199 - DNA, 1063 bp, Zea Mays
atggatctactaggagatcgtgaagatgctcttagccttgtttcatggtgcaggagcgaggagaaagaagatccctggagacccggtgagagggtagagcggctcgtcactcttcccaaactgtccctgcctccatttcttttccttttgtttgtcgcctctcccttcgctcgccctgtctgcgctttcgctttcctttcgcctcccaccaccaaaaagaggagcagaggagaggtttgtgtgacagcgtgagcgagcgagtgatgattaacacctcagccggcagacagccgccaaagcagtagcgtaagaaagagagttagtagagcccagatcgagggagggaggagtagcaccgagcacgagcatctccactccacgcgcgccccatgcccgtccgctccacctccatgagcgtcagctgagcaagacaaggaaggggaatctctccctcattcgccttgccgtcttgatctgtcggctcccggcggcaacaccctacagggtagcaaagaagagctccccgtcctttctatgaaggagaacgggagagggcagtttgtggtggatttccatgggcgactatcagcgttacaggcgttttcagtatgcatctctctgctgcactgttctgaagcttcgatcgccatcagcctcaagaaggggaagcagaagctgtattccagctcgctcaagttgctcctcgaggaggacgtgaggcacctgatcgaggcagtcacagctgaagagaagaagaagaagaagcggagtagagaaaaggcgcctcctccgtctgttctgcttgacccgcctttttctcccatcggaagagtgtagtgtagccaccaggcattgaagaacccattgcattgtttatgatttgtcttgatgttcatattttccttttaggatttcatacttgcatggagtgttagattctagcaggcagtaaggttcataatgtactgttgagatgttgaatagaagggggggaaataaagtaggaggagccagttttcttgtgaatggacgaagctaagactacctccaatcatatcgtcat

SEQ ID NO: 219200 - DNA, 2879 bp, Zea Mays
atggatctactaggagatcgtgaagatgctcttagccttgtttcatggtgcaggagcgaggagaaagaagatccctggagacccggtgagagggtagagcggctcgtcactcttcccaaactgtccctgcctccatttcttttccttttgtttgtcgcctctcccttcgctcgccctgtctgcgctttcgctttcctttcgcctcccaccaccaaaaagaggagcagaggagaggtttgtgtgacagcgtgagcgagcgagtgatgattaacacctcagccggcagacagccgccaaagcagtagcgtaagaaagagagttagtagagcccagatcgagggagggaggagtagcaccgagcacgagcatctccactccacgcgcgccccatgcccgtccgctccacctccatgagcgtcagctgagcaagacaaggaaggggaatctctccctcattcgccttgccgtcttgatctgtcggctcccggcggcaacaccctacaggtttcatctatggggcaagatgctggcttcaaacgcgaggatcattctggattgggatcaggtcctcaaactttgaaggtctcctgctgcactagtgaagaaaacgagagtcgaaacagaagataccatcagttgaaatgctcagagagcaactcgaggcagttgcacctggactacgtcccaaatttccactgcaggagcttgccaacgagaagccgcaagacgaatgctgagcaaagcaccgtggggaagcgtggttctatgtaccagagctccagcgaaataagcaggatcagaaagatccaggagggcaggaggaaaatagattctgcattcgatggggacgcgttcctgtcctttgatattgtcgatgcatcctctcgccctagcacaagtggagcttatctgcattcccatcagaatcggaggtcgggcgctaagccttctgtggacaccgctaagcgagcgtcaaaggacttcctggaccttcagttccgtgaacatcctgatgagaattttaagctagatcgaccacgcttggatagtaccttgttgaaaaacgatgatggtttcttggagatttctctcgagaaagagatagcaaagggtggcccgtgcagaaatgcagctcctatcctgctaaacactgggtcaggcaaatgcactgacctgcaaaagatgaatggatgccccagtgagaacaactgtggtgacaaggggagagattcagcaagcagttccaaatcaacgcctgtgaaagtaagctcctttgacggatcctgccaatctgacggtgctcaacaccatatcacagagaacaacactaaagctcgatcaagccccttcaagaagatgctggaccctattatgaagtccaaatctcctaggagcccatctatcatggaaagaggaggctccaactccgcaactgggccaggaagcaggaaaaactccgtgtctcgaaaatcactgctgggtgatttttcaagaagtgaacaagcatctaattgccagcccaatgggcaaacacagaagcgtgtaaacaaatctgctttgtcacctgctcatctccaagcggttcttagattggattccaagaacggtgtccaggtttttgaattctgtgttgacggcccaggagaatccatttccgccaggaattggaaaaacggtgatgagttgagctctatatacaccttccatagtggcgggaaacggtccagtgctgctggaaggatctccaaagatggaggctgggatttacccccaatcgttgggcaggtgcaggtttcatcatacttatgctctgaagttggaaaagacggtacggtgaataactctgtcgtcaccgagtttgtttcgtacgacattggtcatgcgaggcggattgttgaggagaagacaggggcacttcaacagccacagaggactagtctgacggaagagaacaagactgggagaaataactcagatgtatcgacatcttgcccgtggtccgaagaagaccttcatccttatttggagattgcggcgactgtgatagaggttccgtttagcagatacaagtccgaagaggtgaagaatggttcatctccttgtactgtcaaagttgttgcacctagtggactgcatggttcgccgagtgacgatgaagccggcggcccatctcccttgctagatagatggaggtacggtgggggttgcgactgtggcggatgggacatggcttgccccatcgacgttattggcaacacatatgataatagctgggctgagtctatagctaccaatgtgaaacatcccatggagctctttgttcagcaaagaagagctccccgtcctttctatgaaggagaacgggagagggcagtttgtggtggatttccatgggcgactatcagcgttacaggcgttttcagtatgcatctctctgctgcactgttctgaagcttcgatcgccatcagcctcaagaaggggaagcagaagctgtattccagctcgctcaagttgctcctcgaggaggacgtgaggcacctgatcgaggcagtcacagctgaagagaagaagaagaagaagcggagtagagaaaaggcgcctcctccgtctgttctgcttgacccgcctttttctcccatcggaagagtgtagtgtagccaccaggcattgaagaacccattgcattgtttatgatttgtcttgatgttcatattttccttttaggatttcatacttgcatggagtgttagattctagcaggcagtaaggttcataatgtactgttgagatgttgaatagaagggggggaaataaagtaggaggagccagttttcttgtgaatggacgaagctaagactacctccaatcatatcgtcat

SEQ ID NO: 219201 - DNA, 695 bp, Zea Mays
ctttacaacaagaacaacacaaaatgtagccaatccaatctggagatgagggacgacggtgacccggaggcgacccttgaggcagatcggaaggcgagcgagagcttcctgaaccacggcccactgcagctggagagaagtttgatgtgccaggacgacgccaatctgggaccgggagtggggaggaacagcgaaaacaaggcgaagcttgggactgacgcccggaagaccaaggagcggaggagcacgcggcggctgaagaggtctgagatggatcgacgcacgaaggcgaagcagcaggagaaggagaacgaaggagccgcactgttccggacacccatgcctgccattgtcaacaagaaggccgtaggacccagatcggcgcggcgtcgccgtgttttcgcagaagctaaccggatcctggatggctgatggtaccagtaccaccatgccttgagctggatgcgtttcaagtctgtctgataggtatggctttgggttggagagcgttgcccccagagctggacgctggtggaccctgctgacctttttagctcggaaggaactactagagtagagagcatgttcatgtgtacgtatgtatatagtatcagtacagtacagtacaaggtataagcatttcccgcttttgttttcatctcaatccatgtgcattggaggcaattggatgggtt

SEQ ID NO: 219202 - DNA, 1029 bp, Zea Mays
agattttgagtcggcatatatctatatttcaaataagtatcggtcattatatttatatgtgaatagcgacgcttcgtcggtcggcaattctcgctaatagcatctcatcgttagtcggaataaagaccaaagaccacagtcgccgcgcacccacgctcgtacactcagctgccgctgcgccaaggagaagctgtgcgcggtccaggcacaggtgcagggtgaacaggaggcggcgacaacactccagaggagggtggatgagctagagagcggcggataggagagggccggtgtgttggcggtggagggcgtggagctgcgcagggcaaacactgtgctagaggagaacaacagggagcttgccttgaggctgcaggacgcgatcgagcaggctactgcatctgcctccgctaatctagctcctaaggttcgacatgccccgtgcctaccatcactctcgatttgaagaagagtctcaagattttgcagatctagaattgttttacttgagattcaagcaatgttggatgtgtctgtctcagatcaattggtattgtgtgtttggtgatcctggtttatcctttgggatggttatgtgatagtatatttgacatcttattttgctggtgagctatgtaattgacccaaaaggcacttcaagcgggcaggaaagtctaaggcccttactaattacttccaagagggaggtcctagaggtagcaagcagatcgtggtggtacctatggatgagcgctatagcaagatcaaaagttcttgtggatggatgttattttgttttgtatttctcgaaaagagaaatttgcaagtgaacttaaaattgtgaagccacatgttctcatatgtggttgtactagctagtatctctgaggtttaacaagtcaaacttagggttgttgtctgcttattttgatctttattacgacaagagcaaacttgtgacctttatgtatgaatgcagtacaattgttattgccatgaatgaaaatatgagctatgtttgaccaaatc

SEQ ID NO: 219203 - DNA, 1150 bp, Zea Mays
cttggcgttattagtcctgccggccggcctggaggggaggatcgatcagcaaggccaatagccaatagccaggagccagtcgccagccagccagccagccgcataaatccatccatctcctccatcttgctctccctctccctgcaggccggcagccgctggaggcacagacgacaaggcatcggccccggatcgagcccgacccctcttctcgtctcgtctcgtctctgcgctgggaacgccggctgccatggctcagcagaagaacgcgcacgtgcccaagttcggcaactgggacagcgacggcaacgtgccgtacacgctcttcttcgagaacgcgcgcaagggcaagggagccggagccgccggcggcaggatgatcaaccccaacgaccccgccgagaacccggaggccttctccgtggccgcgccgtcgccgccgccgggccgccacgagcgccgccccagcgacgcgccgccgccgccgatgtcgcccaacccctactacgccgccgggtcgccgtaccaccgccacgccgccggcgagccgccaaggagggccgccgggtacagcgtcgaccagtcgccggcgcacccctacagctccgagagcgccgggtacggcctcgtcgccagctccgtcgaccgctcccgcgccaagggcgcctcgcgcggcaacgagacgccgacgaggggctcggcggtgcccaagttcggcgactgggacgccaacccggcgtcggcggacggctacacgcacatcttcaacaaggtgagggaggagaagcagacgacccaggcggggaagccagcggcgtacggcaaggacggcatgcgtaccaacggccccaagcagcacgacgacgacggctacgtctcatcgacgctggttcctctgggtctggggatgtaagtctggagaacgaggggcatgaaacgatctccatgatctttcctgtggtagattttcacttcaatttatgaagtgagacatagagttgctgtcatgttagaagtaagcattccattgttgcgttggttcttccgtattgaattgaatttacagtacatgtatcatgtatgtacgattgtacgcaggattggactctgaactccgaggtgaatatatgtgtgtttgtttggtgtccat

SEQ ID NO: 219204 - DNA, 5033 bp, Zea Mays
taaaatactaaatagacactgatcctgaacatggcacaactgtattggctggtcactctcataagcttttgcttttggcaaacacatgcctggaacaagcagtactacttcgttgacatataaataccttgagcaagttggtgttgattttgatgataaaaatagctgggagtatcttttcaagttatattggttggatctgaaagggaagcatttactaacgattgaagagctaaaaagtgcaaagaactattggactgttcctactactgctggtaggagagagaaagaggagtcatctgatgaactatatgatgcaagcaatgaccaagatgctacgtttgacatttcctcaaagaaacaaagacagaataactcttcaggaaaaagaggacaaaaacgtaaaaaagatggtggcattacttcaaggaagcgtggaatctcaattaatagtgctggaagcttaccgaatggatcaacaggtgaagggatgtccttggcaggtgacacaaaatgggcatcatctgagttattggaattcattggtcacatgagaaatggtgatagttcttatatttcccagtttgatgtccaggttcttttgctcgaatatataaagcaaaataacctctctgatcctcgcagaaaaagtcagattatctgtgatgcaaggcttagcaatttgtttagaaaaccacgtgttggtcattttgagatgttaaagcttttggagatgcattatcttgtgaaacaggttccaacattgaatgcagatagtgaaagagcatttgattcatactcggcccaagtaaatcatggaggatataatgagttgtccgataaattaggttctgataagaggaggaaggctcatatgaagattgaaagagaatcgacaattaatccagaggattatgctgccattgacatgcacaatatcaatctgatttacttgcgccgcagtgttatggaggatcttattgatgaggttgctgttttctctgacaaaattgctggggcttttgtgaggataagaatttccggtcttggcaacaagcaagatatgtaccgactggtgaaagttctcggtacacataaagttgcagagcgatacactgttggtaagaagacaacagattatgctcttgagatatctaatttagaaaaaaaagagattatcacaatggacacgatctcaaatcaggatttcacagaggaggaatgcaagcggttacgccagagtatgaagtttggtctaactgcccggttaaaagtgagggatgtctatgataaagctaaaatcttccaatctctgcaatttaaagatttgcagcttctgaacactcctgaagaaacagagcgcatgattaatgaagctcctgaagtacatgttgatccccagatggatccaagttatgaatccgctgaagaacccgattataagaaagctgttgattggaccatgcatcggaacggaccagatctattatttccaggaagaaaagggacaaaattgaattctgtggagaatcatacacaaaatagtctggatgcaagcggtcacattagcagtctacctacagaggatgtggaccatagattaggtgctggaagtaacattaatttaaacaatatggcaccagagcctgcatcacttggagttttatcaaatgacactgagccagaaaaagtttggcactacaaagaccctaatggaaatgttcagggaccgtttactcttttgcagttatccaattgggcaagttttttcccacgtgacctgagaatatggcttacatttgagagtgaggagaactcactactgttgactgaagtgctcccaaagcagcagaaagattttattcagccttcaacagttactaccagtgataaatcaatatgggcaggctctggtcaagatagaattaactcaaatgcaaataactcttcctcccctagcttgtctgctgagtgctatgatccaacaaaatatctaaagcctctaggtggaacgtcaccatcaagatctctgaaagattctcatgctttgcatgaggtccagaatcaggttaacgattcatccacaattctttcttcagctggttcatatgtaccaaccagttctcatgatgaaagggtctcaagagacagggttgatgagtggaacagtagtcaggacaatggtggcatttggaatccaaccatgaatcatagtcggaagagtaatgcacagcaacatcctgacggttttacagggaaggaccaaatgctaactgaatctaaatgtagttcacatatggtctcagttcttaccccacaacaatctgagagagaccctgccacttctcttagtactacaagtcgtccggagtgcaaaaccatgtgccggcaggaaggttcttcatggagttcagctacaaatgctggagttcatgaccttcagttaactattgctttaacaaagccagagacatgttctccaacaaatcctgttgaagacagagattcgagttctgcttctgcggtgtcttgtcagtcaggggctcctgcctgcattccccaacccgatccaacatctacatgtaattcaagtaagattgaggcaaccatggatctgcataaaacatgccagcctgacacatcaaatgaatcattcggccggcttcctgaacctcaaagtggctcactcttttccttgaaaactctaaatcttgagtccgagcaccctagttctacgccaaaactggaggggaaggaaacttccatgaaccagtcaggatcaacatcagtagcacatgagaatttagctacaaagacacgtgtccgcccacctaccagtaaaattgatagcttgcaaccacttaaggaaagatcatgtccaacagaaagggactcaatcactcaattagagcatctgtttgaagagaatgtggtaaagagaaataacgaagtggtcaatcctgtatctgatgctgaagggattgctgtatcagatgtgttggaatcgttaacagaacaagattgtgaaaaatacagtacacatggagcagattgtgaaaaatacagtacacatggagcagcgcctttacaaaatttggtgccagcttcagccgaggaagaacaaccacaatgctccagtcctattgcattgtccccttggggggaaccaagttactatcagggtgaagctgttgattctgctctatggggcgtccaggatggtaatgacatgtggtcaatgccttcaccaacacctggtctccagccttcatcaggtttaagatgctcatctttttctgtgtttgcttccttaaacaactttttaaccttacaaaatcttctgcacgccttggagctgatggaaaaaacgcttcatgcatcatagaggaggcgagagcggaccatggagatggtgcatttgtcgaaacattaccaagacaaggggacgaaaagacggaacatgcaaactcaagtgtctcaggttctggagtgccagaacaggtaaaaccaaaagcaagcactgcatcaggtccatctctagatgggagcacaaaagctttgggttggcaactgctgggctcatctctagaggggagtgcaaaagcttcaggctggaaaccgccagctttatcgattgaagggattgctaatgcctcaggttcgcaagcattgtatcctacgcaagggagcacaaaatcttcaggttgtcagcgatcaagttcatccccagatgggagtagaaaagcctcaggttggcaacagtcaagtacatcaccggtggggagtggaaaagctcatggctggcaacgatcaggttcttttacccagggtggtacaaaagctgcaggctggcaaccctctggttcttctacagatcggagtgcaaaagttgatggctggcaacgaacaagttcatctccggagggaaacagaaaagcttcaggctggcattcatcaggtcgtgagagctcaaagatcacatatggtgccagtgaaaaccgtaaatcattttctagccaccaagcgacgacaccaacagggagacactctttggcaaggaggcagggaagcagcgacaagggtgctgctggttgggaagagagtctaggaaacacttgggaagcatcaaagagacaacagagaaacagcgacaagaatgcaggctgcggagaggctctcggaagcaacaggacctggcacccatcgtctggtaaccccagtcggagcagccaggggaatcaccaacatgacaggcattctcacggcagtgattcgcggcggggtagctcaaactaccctcggaggtccgaccatcgtcatgaccatggcagtggtggttcgtcaagaccctcgtcaagagggcagccccagaggggggtttgtaaatactacgagaatggccactgctggaagggctcgaaatgccagtacctgcaccgatgactgccgtgaccgtgggaagcggaacgccctcacatttttgtatagcagcatatggtctcgtcgtagtcagtaaaaggaggaactgtgtcggcgggaccactagttcgtagtagtacatatccttcagagcaggagcatgactaaagattctccgctttggtgcaggaatgcgccccttttgttcagttaaacggaggtgtgggcatttgcaaacatggattttctccataagccagggtgttgtgcaatcgtacggaataactactgaagagctgcacgtccgattgagaatgacactacggaagaggcgcatgcaaatcgtccgaatgcctacagaagagcggctatcggctggcggtagacatgtgaacggagtgctgtccccaaactgacgcggctaatgggacgaaacctacatcaaacccatccaaacccattgcaaataacttatttttttaacccaacctaatataataatttaactgaataacccacccggaccaatagccagtggttaaacccattatctaaatccatagaagattcatgtttattaaagtggattcgctaccatattccgactttaaaat

SEQ ID NO: 219205 - DNA, 5106 bp, Zea Mays
tcactttgaaactcaaaatgtcataatattttgatttcattcatttggacgaactagaaactgtgattttttagtaactcatgccttaactaaaatactaaatagacactgatcctgaacatggcacaactgtattggctggtcactctcataagcttttgcttttggcaaacacatgcctggaacaagcagtactacttcgttgacatataaataccttgagcaagttggtgttgattttgatgataaaaatagctgggagtatcttttcaagttatattggttggatctgaaagggaagcatttactaacgattgaagagctaaaaagtgcaaagaactattggactgttcctactactgctggtaggagagagaaagaggagtcatctgatgaactatatgatgcaagcaatgaccaagatgctacgtttgacatttcctcaaagaaacaaagacagaataactcttcaggaaaaagaggacaaaaacgtaaaaaagatggtggcattacttcaaggaagcgtggaatctcaattaatagtgctggaagcttaccgaatggatcaacaggtgaagggatgtccttggcaggtgacacaaaatgggcatcatctgagttattggaattcattggtcacatgagaaatggtgatagttcttatatttcccagtttgatgtccaggttcttttgctcgaatatataaagcaaaataacctctctgatcctcgcagaaaaagtcagattatctgtgatgcaaggcttagcaatttgtttagaaaaccacgtgttggtcattttgagatgttaaagcttttggagatgcattatcttgtgaaacaggttccaacattgaatgcagatagtgaaagagcatttgattcatactcggcccaagtaaatcatggaggatataatgagttgtccgataaattaggttctgataagaggaggaaggctcatatgaagattgaaagagaatcgacaattaatccagaggattatgctgccattgacatgcacaatatcaatctgatttacttgcgccgcagtgttatggaggatcttattgatgaggttgctgttttctctgacaaaattgctggggcttttgtgaggataagaatttccggtcttggcaacaagcaagatatgtaccgactggtgaaagttctcggtacacataaagttgcagagcgatacactgttggtaagaagacaacagattatgctcttgagatatctaatttagaaaaaaaagagattatcacaatggacacgatctcaaatcaggatttcacagaggaggaatgcaagcggttacgccagagtatgaagtttggtctaactgcccggttaaaagtgagggatgtctatgataaagctaaaatcttccaatctctgcaatttaaagattggttggaaaatgagaaacagaggctgagccgtcttcgtgatcgtgctagtgaaaccggacgccgaaaagaattgagagagtgtgtagaaaagttgcagcttctgaacactcctgaagaaacagagcgcatgattaatgaagctcctgaagtacatgttgatccccagatggatccaagttatgaatccgctgaagaacccgattataagaaagctgttgattggaccatgcatcggaacggaccagatctattatttccaggaagaaaagggacaaaattgaattctgtggagaatcatacacaaaatagtctggatgcaagcggtcacattagcagtctacctacagaggatgtggaccatagattaggtgctggaagtaacattaatttaaacaatatggcaccagagcctgcatcacttggagttttatcaaatgacactgagccagaaaaagtttggcactacaaagaccctaatggaaatgttcagggaccgtttactcttttgcagttatccaattgggcaagttttttcccacgtgacctgagaatatggcttacatttgagagtgaggagaactcactactgttgactgaagtgctcccaaagcagcagaaagattttattcagccttcaacagttactaccagtgataaatcaatatgggcaggctctggtcaagatagaattaactcaaatgcaaataactcttcctcccctagcttgtctgctgagtgctatgatccaacaaaatatctaaagcctctaggtggaacgtcaccatcaagatctctgaaagattctcatgctttgcatgaggtccagaatcaggttaacgattcatccacaattctttcttcagctggttcatatgtaccaaccagttctcatgatgaaagggtctcaagagacagggttgatgagtggaacagtagtcaggacaatggtggcatttggaatccaaccatgaatcatagtcggaagagtaatgcacagcaacatcctgacggttttacagggaaggaccaaatgctaactgaatctaaatgtagttcacatatggtctcagttcttaccccacaacaatctgagagagaccctgccacttctcttagtactacaagtcgtccggagtgcaaaaccatgtgccggcaggaaggttcttcatggagttcagctacaaatgctggagttcatgaccttcagttaactattgctttaacaaagccagagacatgttctccaacaaatcctgttgaagacagagattcgagttctgcttctgcggtgtcttgtcagtcaggggctcctgcctgcattccccaacccgatccaacatctacatgtaattcaagtaagattgaggcaaccatggatctgcataaaacatgccagcctgacacatcaaatgaatcattcggccggcttcctgaacctcaaagtggctcactcttttccttgaaaactctaaatcttgagtccgagcaccctagttctacgccaaaactggaggggaaggaaacttccatgaaccagtcaggatcaacatcagtagcacatgagaatttagctacaaagacacgtgtccgcccacctaccagtaaaattgatagcttgcaaccacttaaggaaagatcatgtccaacagaaagggactcaatcactcaattagagcatctgtttgaagagaatgtggtaaagagaaataacgaagtggtcaatcctgtatctgatgctgaagggattgctgtatcagatgtgttggaatcgttaacagaacaagattgtgaaaaatacagtacacatggagcagattgtgaaaaatacagtacacatggagcagcgcctttacaaaatttggtgccagcttcagccgaggaagaacaaccacaatgctccagtcctattgcattgtccccttggggggaaccaagttactatcagggtgaagctgttgattctgctctatggggcgtccaggatggtaatgacatgtggtcaatgccttcaccaacacctggtctccagccttcatcagaggaggcgagagcggaccatggagatggtgcatttgtcgaaacattaccaagacaaggggacgaaaagacggaacatgcaaactcaagtgtctcaggttctggagtgccagaacaggtaaaaccaaaagcaagcactgcatcaggtccatctctagatgggagcacaaaagctttgggttggcaactgctgggctcatctctagaggggagtgcaaaagcttcaggctggaaaccgccagctttatcgattgaagggattgctaatgcctcaggttcgcaagcattgtatcctacgcaagggagcacaaaatcttcaggttgtcagcgatcaagttcatccccagatgggagtagaaaagcctcaggttggcaacagtcaagtacatcaccggtggggagtggaaaagctcatggctggcaacgatcaggttcttttacccagggtggtacaaaagctgcaggctggcaaccctctggttcttctacagatcggagtgcaaaagttgatggctggcaacgaacaagttcatctccggagggaaacagaaaagcttcaggctggcattcatcaggtcgtgagagctcaaagatcacatatggtgccagtgaaaaccgtaaatcattttctagccaccaagcgacgacaccaacagggagacactctttggcaaggaggcagggaagcagcgacaagggtgctgctggttgggaagagagtctaggaaacacttgggaagcatcaaagagacaacagagaaacagcgacaagaatgcaggctgcggagaggctctcggaagcaacaggacctggcacccatcgtctggtaaccccagtcggagcagccaggggaatcaccaacatgacaggcattctcacggcagtgattcgcggcggggtagctcaaactaccctcggaggtccgaccatcgtcatgaccatggcagtggtggttcgtcaagaccctcgtcaagagggcagccccagaggggggtttgtaaatactacgagaatggccactgctggaagggctcgaaatgccagtacctgcaccgatgactgccgtgaccgtgggaagcggaacgccctcacatttttgtatagcagcatatggtctcgtcgtagtcagtaaaaggaggaactgtgtcggcgggaccactagttcgtagtagtacatatccttcagagcaggagcatgactaaagattctccgctttggtgcaggaatgcgccccttttgttcagttaaacggaggtgtgggcatttgcaaacatggattttctccataagccagggtgttgtgcaatcgtacggaataactactgaagagctgcacgtccgattgagaatgacactacggaagaggcgcatgcaaatcgtccgaatgcctacagaagagcggctatcggctggcggtagacatgtgaacggagtgctgtccccaaactgacgcggctaatgggacgaaacctacatcaaacccatccaaacccattgcaaataacttatttttttaacccaacctaatataataatttaactgaataacccacccggaccaatagccagtggttaaacccattatctaaatccatagaagattcatgtttattaaagtggattcgctaccatattccgactttaaaat

SEQ ID NO: 219206 - DNA, 1863 bp, Zea Mays
gcgcgacagacgtgcagccagcgccggggcgtccagctaactcgcaaacatttttataacccgagcacgcgtcagacatgggaaacggcggtgggactggcgataagacgaagacgaaggcgacaggagggctcaccggtcgcgaatcctcctcctccagccacgcctcgaaacggcgtcggggcctgcgcggcgagtccatggctgatcgcttcattcccaatgactttcctgacttcgtcgccgaggctgaggcctccgacggcgaggggcaccgccccgcagggcatcggggcctgctctcgcttccgtacaccaggctctccgaccacttcgtccgcgccgcgcgccgcctcaaggacaaggtggttgaggagacgtgggtgaaagccggacggaaggtgacggactacacgctctacacgggctctctcgggacagcgctgctgctgttcaagtccttccaggtcactggagaccgcggggacctcgccctcgccgctgatatcgtccgcgcgtgcgatgatgcatcgcggggcctgccgcgcaggttcttgacattcatatgcgggagggcgggtgtctgcgctcttggggcggtgattgccaagcattgcgatgatcagctgagggtcactcagtatctgagctcctttgatgagataacaatcaccgagaaagttccaaatgagttgctgtatggaagggcaggctatctgtgggcttgtttgttcttgaataagcatctcagcgagaagacgatccctctcgatcacattaattctgtggcgaaggacattattaatgagggaagaggttttgcaagcaaggggagtagccctctgatgtacgaatggcatgggaagaaatactggggggctgcgcatggtcttgctggaatcatgcacgtgctaatgcacaccgaactgaaaccagatgagcaggatgatgtaaagaacaccctgcggtatatgatcaagaacaagtttcctagtggcaattatccctcaagtgaaggcaatgaatcagatcacttggtgcactggtgtcatggtgccccaggtgttgctcttacccttgctaaagcatatgaggtcttccatgatgattatttcgagcaatcagctgcagaggctgctgaggttgtctggaaccgagggcttctgaagagagtcggaatatgccacggtgtaagcgggaatgcctatgcgtttctctcactctacaggctaaccgggaaagctgggatgtcatacctcctcttggacatggttgatccatctgaatcaaggttccctgcgtatgaactttgagatatactattaccctgcgacttgtgaggctgttcgatgatccatcagtcacgaaaactctgtttgtattttctcgtctagtatgtgatgtgtgcttagacctcggtggtctgttgtgtttgtagatttggcgttcgtgatgttgcaaacttgaatcttctgtgaagtatgtgtgaccatcacattctgctaaatagattataatctcaaacaaacaccccctaaggctggttccaacgtcgatatggactgctagtgtgggcgagccggcggtcatatcgaccgcctcagctctaacacccgtcgatttggtcagccggttggttcggttggtaccgacattgttggaactagacccatcagtattggtatcaattggatgacatcagtttcaatattggtcggtaagtcagtatgtcgactagttggtggttcggtcgatattggcatcatttgtaaagcgcagatcgtcttccgtctgtgggtgtaccggactgtttggtgtcatatcggaattgtttgcaacgaccatggatcgattgattggcca

SEQ ID NO: 219207 - DNA, 1833 bp, Zea Mays
atttcaacccttttatttttggttcctggcagtgttgctgtcatgacgaaggcatacccaagtattgaaaggggtgatctgattttgctccaggagattgcgagctacatgatttttgcttgtggagctgtctatgtgatatcggctgaaagttttcatacaaacactccccaaaatattatcatggctattcatgaagtccctactagctgtgtctattataggtccgtactgcggctcgaatgctcgatccctggcttcggctacctcggctggatggacgactggctccggtccccagccctagacaacctccaggacctcgaactaaactcacacagccctcaaaaggttgctgttgttcgtaggaaccgatcagctagacgtctcggtggtctccgcgccaaggttgggtgtttttgggaagtctatcgctgcttccctaaactctatatccctacagcattactttgagacactgttcagaaaatagcactcattttcaagcaattaaaaaaacagcatcaattcgatcaaatgaattcagaaaacagcactccatctatatttttcattttttttatttctcagctcacagaaaatggaccaaattgcctctgtcattttccagtcttattcttttatctattcagtccataagaacaacataaatgcatacaaatatatgagcactatttttatattattaaaaatagtgttaaacatacaaataaacacagagcttctataaaggtggaagtttagatttaaaagttgaacttcaaaactatattctgggatggagggagtatttttatagaacatattattttttaataacacaaatgattgaagtttttgaaaaaaaaaccacgtcaaataaaaaaggaacagaggaagtacattcgaagacctttcggtcaaccaagtatgtctaaatttaatagctcgatgttgaaaatacctaggtttgaagttcgacagttaaatataaacttcttccttcgtaaaaaaaatatttgcctatttgtatgattaacactataaaaatagagccagtatgttttatctatttatgtttttcttatggacacgagataaaaatgggttgtgaaatgaatatgggtaatttggtctatctatatatggtgtaagcaataaaagaatgcaaaatatagatggagtgttgtttttcgaattaatttggtgatcttggtgttgttctacgaattgcttgaaaacaaatgctattttctaaatgtcttctcaaactcccccccacgacaggtccacctgagggattacccactgtcagcgtgaagctcctagctttatctggtgtcaagctctccttgcaagcgctgattgacgtgctcaactgcgttcccaacctggagaagctgtacatcgatgtgattccttccttccttccttctttcttttttaattaattatctgcctgcctgcctgcctttgggattttcaggcagcaagtgtctgcgtgagggacggatggtaccataaacaccggaagcaagtattgcaaaagcctcacgctgagcaggtgcacacgatctgtcgacggccgaccctttccagagctagtttcagtggtagctagcaggtctggtctcagtaatggcaccaatgagatggatagatgcattaggttttcgttttggtttgagatgacaagtatcttctccttgtcccttccctagaaacactgtgatttatgttttgtttcaatgttttgtttagttttaggtaaaactgacaagagattgttgtctggcagtgttgcataaaaaaacgctgtaactgttgctggac

SEQ ID NO: 219208 - DNA, 4051 bp, Zea Mays
ggacaacgtcgaactttggcccagcaagctcacaccccgaaattccacctcaaaaatcaaaaagagaaaaaaagaaagaaaaaaaaggcgaaacccttctctcccccgccccaacccgatctctcgctgcctgcctccctccggtcccccgtggccccgtcccctcttcgccaccgcaccgactcgctcacaaaatcctcacgccggactcctccgccgcctccgccgcgccatgcccgtcggcgcctgattcatgtctcagccccacgccgccgctcccgcctcgaagcgccccttctcgtccaccaccacatccccgtctccgacgtcctcccctgcgacgccgcttatgaagaaggccaagcacccggccgccaccgcctcctccgttgggacggtcgagaagaacggtatccatcttgataccgccgccgccgccgccacgggcgggggccgaacgaacggcgaggaggatgcggaaatggtgctcgtggaccaagatgagctccccgcgcccagcgcgccggcctccgcgggcgttgccgccaacctcttccgaaagaaggccacgcttccgcagccgtcgacctccgcccgcaagcccctccgcatcagaataggcgcgcccccaataccttattatgcgaattgcttactctgcgagtcttgtgcgattgatcgtcatcgtcactgagggggtgtggtcgcaattgattccagtcctgttgtttcggatatgttacttgccatctcgcgggctagcccaaagttttttcatgcctgacattagggttaaaagtcatatatccgtttacatatcacttgtttacctttcactaccagccgccacctggacccacctaaaattagctctttgatggacgcaatatggaaattggctagatctgcacattgtttctggaaaactggtgttttggtagcctattatggcatttcgggttttcttttctcgagagttgattattgttgggacatttcatattttatacctgctcataccatcagactgatcagaagagagatttgccataggaaacataatacttctgttgagcggctgcgtttagttgtttgcttctgtatatttcaagtactttgtaaattgccacacggttcacctgtctttctaactagccgttcataagcatttgattaacacatatgtaaacgagagagaaaccgagaaggatctgttttccactgagaagaattaggcacacaaatctagtcaaaggggaatataatcttggtggtggactggtatacagacacctcacccccagcaactgagctggagtcagttcctgtttgattaattgtacccctagtaccatggtttggcttggcattcgttggcacctatgtgtgacaacctccaatattgggaaatgacagcccaattcctttgaaacaactcattatgatgtacttcagcacacactatttgctgattccttttacttgctacgacaccagttgctggcaaattcatattgaacgcatgtatgcaaatcttataaatcacgagtcactagcaaagacatgctgaacatgtgtatttgaaaatttgaatatcagaattcattgggtttccttttcacaacctttgcttaatgccatagcactatgtctaaatgccattctggccatcatgcactcattaggtcaaccaaaactgccaaaaaacttcgaagaggatacatggacgattttgaaggatgctatcacagctatttttctcaagcagaaactttcttgtgatgttgagaaactctatcaggctgctggtgatctttgtctacacaagctaggggcaaacctatacgaacgaatcaagaaagaatgtgaaatacacatagctgaaaagatatcagcattagtgggccaaagcccagatttggttgtatttttgtctctggtccaaagaacatggcaagatttttgtgatcagatgttgattattcgcggtattgctttacttcttgatgtaaaatatgtcaagaatgtagcaaatatttgttcagtatgggatatggggctgcagctgtttcgcaagcatctatcactatccccagagattgaacacaaaactgtaactggccttctcagattgattgagagtgagaggcttggtgaagcaatagataggacattacttagtcatcttttgaagatgcttaccgctcttggaatgtattctgagagttttgaaaagccctttcttgagtgcacttctgaattttatgctacggaaggtgttaaatatatgcaacaatctgatattccagactacctgaagcatgtagagtcgaggttgcaagaagaacatgaaaggtgcattctgtatttggaagctaacacgaggaagccactgatcgcaactactgaaacacaattgctagaccgtcatacatctgcaattattgagaaggggttcgcaatgctcatggatgcaaatcgtataaatgacctcttgaggatgtacaaccttttccagagggttaatgctgttgagctgctaaaacaagcacttagttcatatatccgggctacaggccagggcattattatggatgaagaaaaggacagagagttagttccatttcttcttgattttaaggcatccctcgacaaaatattggaagaaagttttgctaaaaatgaggctttctccaataccatgaaagattcgtttgagcaccttatcaatctaagacagaaccgtcctgcggaattgattgcaaagtttcttgatgagaaacttcgagctggcaataaagggacatcagaagaagagctggagggcatacttgataaagttttggtcatgtttcggtttatacaaggtaaagatgtatttgaggcattctacaagaaagatctagctaagaggttgctgcttgggaagagcgcatcaatagatgctgaaaaatcgatgatcacaaaactcaaaactgagtgtggaagtcagtttaccaataagctggagggaatgttcaaggacattgaattatccaaagaaataaacgattcattcaggcaatcatctcaagctaggacaaagcttccctcaggcattgaaatgagtgttcatgtgcttacaacaggctattggcctacatatccaccaatggacgtgaaactcccacacgaactgaatgtgtatcaggatatatttaaagagttctatttgagcaagtacagtggaaggcgtttaatgtggcatgcctatcagttgaaactatctgagatcaataattatgttttcccgtaacttattgctgccatcagagtgtggttttgatgttgttcaatgacgcacaaaaattaagcttccttgacatcaaagattccactggtatcgaggataaagaattgagacggacactgcaatcgcttgcatgtggtaaagttcgggttctccaaaagataccaaaagggagagatgtagaagataaggatgactttgtattcaatgaagattttagtgctcccctctatcgcataaaggtaaatgcaattcaaatgaaggagacggtagaagaaaacacgagcaccactgagagagtgttccaggatcggcagtatcaggttgatgcggccatagttcgaataatgaagacgcggaaggtcctgagccacacccttctaataaccgagctttaccagcagctgatatcaagaaaagaatagagagcttaatagaccgggagtacctggagcgggacaggagtaacccccagatctacaactatctggcttgacagagctttggaggatcattaaagagaccgctcactttattatcagaaaagacactgtaaattggtttgttttccagttccttgttctttcctgtttttcttctctgggagggagttgtaactgttgcaacgtgtctgtatacgagaacgtctttttttcagtattagtataaaatgtataagcataatgcatgtatctgtttacattacatgtatgcttgtcagttcgtgtcgtcttccctggtgcgcgacgatctggataatat

SEQ ID NO: 219209 - DNA, 3008 bp, Zea Mays
ggacaacgtcgaactttggcccagcaagctcacaccccgaaattccacctcaaaaatcaaaaagagaaaaaaagaaagaaaaaaaaggcgaaacccttctctcccccgccccaacccgatctctcgctgcctgcctccctccggtcccccgtggccccgtcccctcttcgccaccgcaccgactcgctcacaaaatcctcacgccggactcctccgccgcctccgccgcgccatgcccgtcggcgcctgattcatgtctcagccccacgccgccgctcccgcctcgaagcgccccttctcgtccaccaccacatccccgtctccgacgtcctcccctgcgacgccgcttatgaagaaggccaagcacccggccgccaccgcctcctccgttgggacggtcgagaagaacggtatccatcttgataccgccgccgccgccgccacgggcgggggccgaacgaacggcgaggaggatgcggaaatggtgctcgtggaccaagatgagctccccgcgcccagcgcgccggcctccgcgggcgttgccgccaacctcttccgaaagaaggccacgcttccgcagccgtcgacctccgcccgcaagcccctccgcatcagaataggtcaaccaaaactgccaaaaaacttcgaagaggatacatggacgattttgaaggatgctatcacagctatttttctcaagcagaaactttcttgtgatgttgagaaactctatcaggctgctggtgatctttgtctacacaagctaggggcaaacctatacgaacgaatcaagaaagaatgtgaaatacacatagctgaaaagatatcagcattagtgggccaaagcccagatttggttgtatttttgtctctggtccaaagaacatggcaagatttttgtgatcagatgttgattattcgcggtattgctttacttcttgatgtaaaatatgtcaagaatgtagcaaatatttgttcagtatgggatatggggctgcagctgtttcgcaagcatctatcactatccccagagattgaacacaaaactgtaactggccttctcagattgattgagagtgagaggcttggtgaagcaatagataggacattacttagtcatcttttgaagatgcttaccgctcttggaatgtattctgagagttttgaaaagccctttcttgagtgcacttctgaattttatgctacggaaggtgttaaatatatgcaacaatctgatattccagactacctgaagcatgtagagtcgaggttgcaagaagaacatgaaaggtgcattctgtatttggaagctaacacgaggaagccactgatcgcaactactgaaacacaattgctagaccgtcatacatctgcaattattgagaaggggttcgcaatgctcatggatgcaaatcgtataaatgacctcttgaggatgtacaaccttttccagagggttaatgctgttgagctgctaaaacaagcacttagttcatatatccgggctacaggccagggcattattatggatgaagaaaaggacagagagttagttccatttcttcttgattttaaggcatccctcgacaaaatattggaagaaagttttgctaaaaatgaggctttctccaataccatgaaagattcgtttgagcaccttatcaatctaagacagaaccgtcctgcggaattgattgcaaagtttcttgatgagaaacttcgagctggcaataaagggacatcagaagaagagctggagggcatacttgataaagttttggtcatgtttcggtttatacaaggtaaagatgtatttgaggcattctacaagaaagatctagctaagaggttgctgcttgggaagagcgcatcaatagatgctgaaaaatcgatgatcacaaaactcaaaactgagtgtggaagtcagtttaccaataagctggagggaatgttcaaggacattgaattatccaaagaaataaacgattcattcaggcaatcatctcaagctaggacaaagcttccctcaggcattgaaatgagtgttcatgtgcttacaacaggctattggcctacatatccaccaatggacgtgaaactcccacacgaactgaatgtgtatcaggatatatttaaagagttctatttgagcaagtacagtggaaggcgtttaatgtggcatgcctatcagttgaaactatctgagatcaataattatgttttcccgtaacttattgctgccatcagagtgtggttttgatgttgttcaatgacgcacaaaaattaagcttccttgacatcaaagattccactggtatcgaggataaagaattgagacggacactgcaatcgcttgcatgtggtaaagttcgggttctccaaaagataccaaaagggagagatgtagaagataaggatgactttgtattcaatgaagattttagtgctcccctctatcgcataaaggtaaatgcaattcaaatgaaggagacggtagaagaaaacacgagcaccactgagagagtgttccaggatcggcagtatcaggttgatgcggccatagttcgaataatgaagacgcggaaggtcctgagccacacccttctaataaccgagctttaccagcagcttaagttccctgttaagccagctgatatcaagaaaagaatagagagcttaatagaccgggagtacctggagcgggacaggagtaacccccagatctacaactatctggcttgacagagctttggaggatcattaaagagaccgctcactttattatcagaaaagacactgtaaattggtttgttttccagttccttgttctttcctgtttttcttctctgggagggagttgtaactgttgcaacgtgtctgtatacgagaacgtctttttttcagtattagtataaaatgtataagcataatgcatgtatctgtttacattacatgtatgcttgtcagttcgtgtcgtcttccctggtgcgcgacgatctggataatat

SEQ ID NO: 219210 - DNA, 1517 bp, Zea Mays
agattacgggcccgagccatcgtcatcgagacatcgaccgactccgactccgactccatccacggtctccttccgagatccctcttctcctcccgcccccgcctgaccgcctccctcctcactccggccccttccgcatgtcaatccatgggctgatactcgaagtcagagtcaccgggtgccggaagctgcgggacacggagttcttcacccgccaggacccctacgtcgtcgtcgagtacgccaccaccaagctccgcactcgcacctgcaccgatggaggaagaaacccaactttcgatgagaagttccatatacccctcattgaagggctccgcgagttgaatgttattgtgtggaatagtaatacgttaactcatgatgacttcattggaagcggaagagtatatctgcacaaggtgctgacaaatggctatgatgactcctcatggccgcttcaaacacgccacatgagatctgctggggaagtgaagctcattatgcatgttgatgtctcagcaatgaagaacaagatgggtagaagtgtcgccgcatcaagtgcacatcctgttcctgcactttcaatgccagccccatctccaaccccagccccagccccatctccagcttcggccgcaacccctgctccagcaccagcactagcatcagcgattccatacacgggagtctcaccttcatatccaccggtttcagcatatcctggtgcaaccgcataccctgcttacccaacttctagccatgcaccatataccactgctgaatatccaccacctccgcagcaaccataccaacccccacctgctggataccctccatcctatccaccacaaccatatgagcaatcttacccaccgcaaccatatgagggatcttacccaccacaaccatatgagcgatcttacccaccgcaaccatatgggcaacaaccatacccacccccgccagcagcagagtcgccgtacccaccagcgccttaccctggtacttatccaccaagaccctattgatatagcagcgtcagtaatgaaatcagtttaaggtcagattccaatcgattggtgacaaattggagctgatggggtttcgttaagtgcaacggatggaaatgtattccttgatcagatcgtgtcaacagctcagtgaccagtcatatgtacaataggtagcttgcagattgtgtcagtgaaatccatcctatattgctttgcagtggtggtttagagaccagaactagcttccttcttctcctatcttggaatcacatctgactgatctgtgaccacacaattgtacatgtagtagggtaacctgtgaagtctgctgcttttccaaaacaacaataaatctgaatgtatttgtaacagtcaataaatttgcttcggtggtgaaagctgttggtgtgtgtgagaagtatttgtaacaataaatttgtttttccatgccttttcttctctggcacatggatttatcgctgctaaacttctgtggtagtggtg

SEQ ID NO: 219211 - DNA, 2494 bp, Zea Mays
ggcgattaatcgctattttcccgaaccgacttggacgacctgactggtgctatgaaactcggaaaagatgcaattgttctcacacaaactaaatcctccagatcggtggcctttctttctcagtcttttaatgaagaaaaggataatcttgagatccctgtggtggcatatcgaaaggaagggcagtatatggaagttgatttgagtgtgcagtctgatgctactgcagaatataacttgaacgctattaagaatttttcttccttcaacgagtatttcattggagaaaagttgggcctatttggtgaagatactgggacacaaatctacatatggaatttagacacatggggtactgattacacattggagtggaattctggtaagtcttcagaaaatcctgtgcaccatggtcgtggagacatattaatccgttcaagaagagtcagatcacgtccaggacaaacaagtaacaaggtgctgttggattattctcttcagtcctatctggaagttatgttcttgaatcctcggatgaagatatctgtccaagggtctttggtcaaaagccgcccgttggcgaagacccttaacaagacttctgttgtgtctggtgaaattatggaaaggactattatattgactctgggaaggagcaaggtagaatgggacagaacaaactgtggaatcttcttgtattggcatggtcgtttgatagagtcttacaagcgggttggaggccaaaagcatagtactgacatggggcgtggagtaataggagttgcagatatcacaaatctcattgatgatgaagatggtaattcatgggttctgaacaataaacagggatttcaagattgtgaaatgtatgctaaactggaggagtggcttggtaggaaagtggatgaatactgggatacgaaatttgacagtctcacgctgagaaaaggggatgagcaccacaatactgattctgactgggttcagtgctacagctgtcgtaaatggagaatgttgaatgcaggcttcaatgtagacaatcttcctgaggaatggttctgctacatgccaccattcaatggcaaatgtgagattcctgaacaacaagcgggaccagacatcattgtgataggtgagaagagatctggacatgatgaacaaaaaaaggctgccctgcaaggaggtacaccggaggaggaaatgaggcatgagaaccacgagattcagatgattactcaagatgaatttgtgaagaatgttcaggatatgccggaggttgtccacaagcgaaagaaaatttcaagtggcaccccatcaaagccccaaaaaaaccgcgatgatgatctggaaggcgtgtcctcacaaactgaagatgacgtccctctcactaggttaaagaggctaaggagagggcctgcaaggactaacaaaaggtgacagaaagtgaaaatacacgccggtgcaatgcttcatttggactggacggattttggacttaacgagactgatgcatgaatcatgatgacatgagaccttcgtttagcacactgccagctataattctctagcttttgtgtagtagaatttggaaacatgcgttgctgttggattaggcgtctgtttgtaaataggtgtccctcgcattcaaatgttgcagcttaggccctgggatccattagctactattagttagctagctaatagactaagggggtgtttgaatgtattagagctaatagttagttagctaaaaagttgctagtggaattagctagctaacaaatagatagctaactattaactaatttactaaaaatagctaatagttgaactattagtcagggtgttcggatgtctccaactaattttagccactaactattagctctagtgcattcaaacactccctaaaggggtatttgaacgtactagagctaatagttagaggttgtttaaatgcactagaactaatagttagtggctaaaattagttgatgcatccaaacactctagctaatagttcaactattaagggtgtgtttggtttgaggttaaagtaagatgagtcgggggcgccaccgtcccctcaattttttgggatcacgccgcccccaaaaatcactccggtgttcacatcacccccgcttgactctcaaccaaacactatagaaaacgtggtcgtctcatttcatccctctttgtacattcaaccaaacgcaccataactatttttggtaaattagttaataggtaggtagttatttgttatctagctaattccactgacaaattttagcaaactaactattagttctagtgcatttaaacaccctcttagttgactaagtgaaattagctagctaaaaaatagttatctaactattagctaatttgctaaaatagataatagctaaattactatctagactgtttggatgtcatcaactaattttagcagctaactattatctctagtgtgttaagcactccctag

SEQ ID NO: 219212 - DNA, 5157 bp, Zea Mays
gtatggtgcacggttctgccatcgtctcctctccgcgacgcacgcctccctctcctccgccccaccctcctccccacgccatcggcaccgccatcatcagatccggcccaagacgcctctgccccacgcgcccgagtcgtcgaggcacactcctgcccgcctccggcgtccacgcacatctccgcctcacctcggcgcccgagtcgtcgcacgcgttcgaggtggcgtccatcccggcaccggcctcacgcaccatctacagctcccaactctgctcctctcagttctccctctgcattccaccttctctcccttcctctccaagcaccgtcctcctcgcctagatccgtacaagctgcaaataacctctccggtggcaagacagatggagtcgatctccggcgaggatgctccgaagcacaacctgatcctgtccgcgctcgtctccaacctacagtgcatgctcgccgcccgccgcccgttcacggcagaggtcagcaccgccgccacagctagcgaggctgaggccttggctcaggaagcagaggcgtccgatgcccccacgggagatgggacgctggcgaggcccatcgtgctgctgacctgtgccggaggggaaccggtcggcgggtctcgcggcgctcgtcgacgccctcgttgccgccggccgctgcgatgtccacgtgtgtgcccccgaatcgtacatgctgtgacttagaaaaccaaaccacagcgggaccggtgctcggatagggtccaacggcgatgcaagcaaggagtggcatgcggccggaggggcgcagatcggctcctgcacgtgcagcgcagccgcgtgacagtgaagcagggaggccgcgataggcggcacagggagggtgcgacggaggcaaagtgcaagcacctggggacttcaggtaagtagaaaaccaacactgaatttgtcggttctctgttttgtgattgaccgattggtttgttgatctcagaaacaaaaaattgtttcaccgtcaagcaccaatttttaggtaggtcagtgttttgggatgattctccgatgcatcaatagcaaccttgtgcttggcaaagttatttgccctgataatgttgtaggtttagtgaaaagaaatatactgacatatccatcgatccatcgatgcccaatggagattgacctctatcaagatttagttacgtgtctcaatagggcaatatttctgtgagttgtatactgtggattcctcatctgcatcatgaattgatcgcactatttatgccctatttttcaaaccatggtttctgtaattctttgcaccatggtatttttctcaaatgattttatctttcacaacccggactgaagtcactgaagcagaaagaaagagtacaagtctactactgcagaaagcaaggaggatgccaacagaagcagatttcatgtttggatcgggtattgacctttttgtgttctcctcaactcattatttagctacatatcttattaaatcttaatatttggtcattagctaccaacttgcactattattgtgaaaatccattaactttagccaatgaaatggttagactatcaccacgtaggtgatattagtggcattaagttattaatctgtggcaaattctattatcaactattttcttggctaatcattacaatatataatgaagaatactatggcttgaagggatatttatacagttggctatgtatacggtctgcccaagcgcccaacaatgaatgatgtggtgaaggaacttgagatcatcagatagaatgaaggggcacaattgctaaactcaacgtctttatcagttgaacaatttggaaaaaaagagaagagatccttatgcatttgcctatggatgatggaagcaacaacaacacttttgactacaacagtgggagttcaattaagttgttcacccaagtagatagttgtctccactctttcaacaagttattggagtgattatatatgtctgctccatatgaatgccttttcgttttagtatcacatctgaaattaccaaccttttagatcgggtattgacatctttgtgttctcctcaactcattatttagctacatatcttattaaatcttaatctttggtcattagctaccagcttgcactattattgtgaaaatccattaactttagtaagtgaaatggttagactatcaccacgtaggtgatattagtggcgttaagtgattaatcagtggcaaatcctattatcaactattttcttggctaatcattacaatatataatgaagaataccatggcttgcagtgatatttatacagttggctatgtatacagtctgcctaggcgcccaacaatgaatgaagtggtgaaggaacttgagatcatcagatagaatgaaggggcacaattgttaaactcagcgtctttattagttgaacaatttggaaacaaaaagagaagagatccttatgcatttgcctatggatgatggaagcaacaacaacacttttgactacaacagtgggagttcaattaagttgttcacccaagtagataattgtctccactctttcaacaagttattggagtgattatatatgtctgctccatatgaatgccttttcattttagtatcacatctgaaattaccaaccttttagatcgggtattgacattttttgtgttctcctcaactcactatttagctacatatcttattaaatcttaatcttttgtcattagctaccatattgcactattattgtgaaaatccattaactttagtcagtgaaatggttagactatcaccacgtaggtgatattagtggaattaagtgattaatcagtggcaaatcctattatcaactattttcttggctaatcattacaatatataatgaagaatactatggcttgaagggatatttatacagttggctatgctgcttacatgatccatttagctgtctttggatttttggggtaactctccaatatctcacatgaggttctttgtgatagctgttacttaatctgtggtgatctatgtaaatgtggcaacacttgcagttcctcgagcccttgtgcatggatatatcgtttagttgtgtctaataatttgtaattagtggcaacatctttttgttattttggttttatctgctttttattgttataagatctcgattgcaaactggcagttagtacaccattaggttttcctttgtcgtatcaagctaataatgtgtgaagcagggttcccattctgatctttagttttttgtgattttaatagcaataaccttttttcgcaaaaaagtaacaaactttatgcagaatgcggtccgtatagttcccagtatccttttgtacttagatttagtttgatatatggttatgtttattgacagaatgctttttagctttgcagataaaatcttaagcaaaatgggagaaggtttgggttttctgcaatctgtcgtctcctcttctgctgggtatctccgttattattctaatgaagagggctatgagttggattttcgtaggtacatttgagcgtgttttggaatgctgggaccgtgaaacacatgaatatgttgccataaaagttgttcgcagtatccacaagtactctgatgctacaatgattgagatagatgtgctcaatcgccttgtagaaaatgaaaaatatagatctctgtgagtatctcagagacctaattgcttaaagtataaccctattctatttttgacttgacagttcctcttcaatttgtcagctgtgctcaaatttagagatggcttgactatcgtaatcatatatgcatggatgcgttactttatgtttgcttgtatttaatatagaaggctcccttgccttcgttcgatcatgtggtatttgaaagtgatgtctctataaatgaagtaaggtagggcaatgcttatgttactgttgtcagttattagctttttaaaccatgcatctgtcaatgtgtcctgtttcaatagggtcttattataggacgtgatggcactgaattaggatgtttgttcttttgctacctttgttaaacaacatcagatcattcgtattgtatccttcctcggattgcttcttttgttctactacaaatatgcccaacatggcagggagaggtatgctcctaaatttcttattttgtgcattgtgaaatgattgttctaacaacatcaagtttgtgttcttcatataatctatctcagattgctctgtgttttgcaggtctcgaggtcaagcctggacccactgtcaagtgtgtgcttggacatgactttatcctgcactttccactgctgcacttggggaatcaaagaaaagtgaaagtaccatgtcaaagttgatgaccagaagcttgctattggaaccctctctattgaaaaatacccctagatagaaattgatttggttttcaataaagagtgtgagttgtcacacacatagaaaactacctgtgtatttttctttggttacaaggttgagcaaccaatcgaggaagatgaatatcctttttaacattgatttttttagttttatttcatgtaagactgatctaaacaatttctttgtggagtattttgtttccttgatctcatttttgcttcttgcctcttacataatggatcttgattctgaagatgaagagaaggagctaaacattccagtaatcaaggaaaatggcaaaggtgatgggaaggcagttgctgcagcttcaaaatcaagtcttgggcttgaaaaaaagcaaggatgagtatgagtctgatgattctgatgagggagaaggtgaaaccggagaatgaggagatgtggttgttcatggacgacagcatcaagaaacctgcaacatgcaacctgattttaagaaatctgccacctgcaacatgactgggcagtggtatctctgagatataatgtggacaacggcaaagaatactatgcatacacaacaaaagagtcctacaacctgattttaagtccatttgtagcaaaccatcttggaagccattaactcgttgaatttgaagctgatgtgcagttttatttttatgtcagttttactgatgcagttagttcctaagaagatccatggcaacttgtttcacgctgatg

SEQ ID NO: 219213 - DNA, 2202 bp, Zea Mays
ataataataaaaaaaactggaaacgaggggtggtggtccagcaccggaggtcgtcaagggcgcgcggcatgatcagctgaacacggacgcacgcacgcgtgcggcgtgcctgggtgccctgggaccgtccgtccgtgttgcgaggggcgagggtgacgcctgcctgcgccgcgccgtggggcgcactagcagtttccgccctccacgccccacaatgccagcagccagatcccgtcggcgtgcccgtgcccgtgctcgcggccgcagccttgcgcccttgccggtgccggtggcgccacccagcagcagcagcagcgtggcaggcaaggtgctccgtggccccgtccctggcgcgcgtgcccgtggcaggcgccggcccgaggaggcgaagaagtcacggtcagatcggcggctctgaccgatgcccgccggcagacacgacaaggctgacctcagctttctactctactacctgcaggagtgcaggctgcaggcgcacacgcaactcgcagccgaccacgccccccgcaggccgcgatgccgccgccgccgcagcagcagcccccgcaccggcacgccaagacggactcggaggtgacgtccagcatggcggcgtcgtccccgccgcgtgcggcctactacgtgcagtcgccgagccacgacgacggcgagaacaagacggccgcgtcctccttccactcgtcccctgcggcatccccgccgcggtcggcgtccaggcactcctcctcctcctcccgcttctccgccagcgcaaagggcaccgcctccggcgccggcggcggccggcgacgcggcagcgcgtgggcgaaggaggcggccatcgaggaggagggcctgctcggcgtggacgacggcagcggcggcgatggagacggccgcggcgggatccccaggcgggcgcgctacttgctcggcttcgcgggcgccttcctcggcctgttcctcctcttcgcgctcgtcctctggggcgccagccgcaaccagcgccccgtcgtggccctgcgcgccgtcacgttccaccgcttcgtcgtccaggccggcaccgacgcgtcgctcgtgcccaccgagatggcctcgctcaacgccaccgtcagcctcaccttccgcaacgtcggtaccttcttcggcgtccacgtctccgccgaccccgtcacgctccactacgcgcagctccagctcgcgtcgggcaacatgaagtacttctaccagccccggaggagccagcggagcctggcggtggcggtggtcggcgacaaggtgcccctgtacggcggcggggcggggctgagcagcaccccgacgacgctgccgccgccgaggaagcgcgcgccgccggtggtggtgccgccgccgcccgtgccgctgcggctggccgtgcgggtgcggtcgcgcgcgttcgtgctggggagcctggtcaagcccaagttctacagcgaggcgcagtgcagcgtcaccatggaccaggccaggctcggtaagccagtctccctcaacaaggcatgcacctacacacactagcttggctaggctacatacatacgcctgctgccgtgggtcgtctcgtcgccaccatgcatggtcgtcgcgtcgtgaactttgcccttcttcttgaacaacacacactctctctcagtctctctctcccttcgcttttctgcgtgcgtgcgtttgttggtcgcttgtcttgtacatagaaatttttagtttctggtgtacgtaggagagttttgagtgagatggaataagaatcaggcattatttccctcatacggcgtttccgattgcgtgacatgccgtggagggcatgtaaaatgtcggtgaaattcaatgcgcctgtttggtgaaattcaatgcgctcgaagcagacgtaagattctggtgaaatacacctaaaaattcacggccgcgcatgtaatatagcttcttcaggtgaagtttggaccccggccgacagtcaccgaccgcaagtgctcatccggtgaggtttgtcagttagattcaaatccactaccgttcatataaatccgattcttttttttagatctgacaaatgtaacacggagccttcgcaatgaatgaatgaatgattgaataaacaaataaataaaaaccgagcctccctacctccttaaaaaaaagagaaaacaaccacaaagataagatggatctgagataaatgag

SEQ ID NO: 219214 - DNA, 1345 bp, Zea Mays
cggcgtgcctgggtgccctgggaccgtccgtccgtgttgcgaggggcgagggtgacgcctgcctgcgccgcgccgtggggcgcactagcagtttccgccctccacgccccacaatgccagcagccagatcccgtcggcgtgcccgtgcccgtgctcgcggccgcagccttgcgcccttgccggtgccggtggcgccacccagcagcagcagcagcgtggcaggcaaggtgctccgtggccccgtccctggcgcgcgtgcccgtggcaggcgccggcccgaggaggcgaagaagtcacggtcagatcggcggctctgaccgatgcccgccggcagacacgacaaggctgacctcagatgaagtacttctaccagccccggaggagccagcggagcctggcggtggcggtggtcggcgacaaggtgcccctgtacggcggcggggcggggctgagcagcaccccgacgacgctgccgccgccgaggaagcgcgcgccgccggtggtggtgccgccgccgcccgtgccgctgcggctggccgtgcgggtgcggtcgcgcgcgttcgtgctggggagcctggtcaagcccaagttctacagcgaggcgcagtgcagcgtcaccatggaccaggccaggctcggtaagccagtctccctcaacaaggcatgcacctacacacactagcttggctaggctacatacatacgcctgctgccgtgggtcgtctcgtcgccaccatgcatggtcgtcgcgtcgtgaactttgcccttcttcttgaacaacacacactctctctcagtctctctctcccttcgcttttctgcgtgcgtgcgtttgttggtcgcttgtcttgtacatagaaatttttagtttctggtgtacgtaggagagttttgagtgagatggaataagaatcaggcattatttccctcatacggcgtttccgattgcgtgacatgccgtggagggcatgtaaaatgtcggtgaaattcaatgcgcctgtttggtgaaattcaatgcgctcgaagcagacgtaagattctggtgaaatacacctaaaaattcacggccgcgcatgtaatatagcttcttcaggtgaagtttggaccccggccgacagtcaccgaccgcaagtgctcatccggtgaggtttgtcagttagattcaaatccactaccgttcatataaatccgattcttttttttagatctgacaaatgtaacacggagccttcgcaatgaatgaatgaatgattgaataaacaaataaataaaaaccgagcctccctacctccttaaaaaaaagagaaaacaaccacaaagataagatggatctgagataaatgag

SEQ ID NO: 219215 - DNA, 1870 bp, Zea Mays
ctacacgagcagctttcctgcgacacatggtttgcccaaccgccccggagcacacggttcaggttcaccgaccccggagcatgccatcggccagccgagacgcgatccttctgaaacacagcgactttctactctactacctgcaggagtgcaggctgcaggcgcacacgcaactcgcagccgaccacgccccccgcaggccgcgatgccgccgccgccgcagcagcagcccccgcaccggcacgccaagacggactcggaggtgacgtccagcatggcggcgtcgtccccgccgcgtgcggcctactacgtgcagtcgccgagccacgacgacggcgagaacaagacggccgcgtcctccttccactcgtcccctgcggcatccccgccgcggtcggcgtccaggcactcctcctcctcctcccgcttctccgccagcgcaaagggcaccgcctccggcgccggcggcggccggcgacgcggcagcgcgtgggcgaaggaggcggccatcgaggaggagggcctgctcggcgtggacgacggcagcggcggcgatggagacggccgcggcgggatccccaggcgggcgcgctacttgctcggcttcgcgggcgccttcctcggcctgttcctcctcttcgcgctcgtcctctggggcgccagccgcaaccagcgccccgtcgtggccctgcgcgccgtcacgttccaccgcttcgtcgtccaggccggcaccgacgcgtcgctcgtgcccaccgagatggcctcgctcaacgccaccgtcagcctcaccttccgcaacgtcggtaccttcttcggcgtccacgtctccgccgaccccgtcacgctccactacgcgcagctccagctcgcgtcgggcaacatgaagtacttctaccagccccggaggagccagcggagcctggcggtggcggtggtcggcgacaaggtgcccctgtacggcggcggggcggggctgagcagcaccccgacgacgctgccgccgccgaggaagcgcgcgccgccggtggtggtgccgccgccgcccgtgccgctgcggctggccgtgcgggtgcggtcgcgcgcgttcgtgctggggagcctggtcaagcccaagttctacagcgaggcgcagtgcagcgtcaccatggaccaggccaggctcggtaagccagtctccctcaacaaggcatgcacctacacacactagcttggctaggctacatacatacgcctgctgccgtgggtcgtctcgtcgccaccatgcatggtcgtcgcgtcgtgaactttgcccttcttcttgaacaacacacactctctctcagtctctctctcccttcgcttttctgcgtgcgtgcgtttgttggtcgcttgtcttgtacatagaaatttttagtttctggtgtacgtaggagagttttgagtgagatggaataagaatcaggcattatttccctcatacggcgtttccgattgcgtgacatgccgtggagggcatgtaaaatgtcggtgaaattcaatgcgcctgtttggtgaaattcaatgcgctcgaagcagacgtaagattctggtgaaatacacctaaaaattcacggccgcgcatgtaatatagcttcttcaggtgaagtttggaccccggccgacagtcaccgaccgcaagtgctcatccggtgaggtttgtcagttagattcaaatccactaccgttcatataaatccgattcttttttttagatctgacaaatgtaacacggagccttcgcaatgaatgaatgaatgattgaataaacaaataaataaaaaccgagcctccctacctccttaaaaaaaagagaaaacaaccacaaagataagatggatctgagataaatgag

SEQ ID NO: 219216 - DNA, 1174 bp, Zea Mays
cctccccttcgtttctctttccctccgcttccgctcccgtccttcctcccctcaccgggacccccagacagcgcgcgccggcgcaatgcggtgggacgcgtcggaagcagaggtagcccttgagcggatctgggaactccatgaccgcctcagcgacgccatcctcgccgcctcccgcgcgcacctcttcctgctcgctccccagcctcctcccgtgccgtccgcgccacccgtcaaaggggcccaccgagtcagcggcggtaggaacggctgcgtcttcgtcaagggcggaggagaggcgctggccgccgccgcggagtccgtgtccgaggtcaggagcctgcacgccatccgctctgcgctcgaggacgtcgaggaccacctcgagtttttacacactgttcaatcacgacatcaggcagagcgagattctgcaattgctagactggagcaaagccgtctagtccttgctacgaggttagcagaacatcaagggaagaagcatagaatcatcgatgaggtcttggcatttgttggtgaagtgagtgacaagagtcaatttatctcatttgaagatgtttgtgctacccatagccgatcagaggatgatgcagaggacaacaggggcaacggttcaaggattatgtcaaacatgttatctagcagtttgtctttagccaagaattcatttcgactggacaagattggtggtgctctcggtaacgctgcaatgtttgcagtaagtgtgcttgctttcttccagctgcatcaaattacatttggaagtaaaactccagccatggaatacaggaagagaatcgagtacagtattcaaccaaggagctcacaatcgaatgggaaaggaaaacttctggaggtttacctagcaagaggctgaagaattattagatcattctgtttggctgtacagagttttaaccaaagttcgtttttgtcggttttattagggcgctgatcattctttacaatggactggaccctgttccaggcaattagggaacttactgtctgattcttataaatagagtttgaagggaattgcgtattctatctcaaattgtgaatggctttgtgcttagagatggtcagatggattgtttgtaaaccatgttcaagctaacttgaactgccgttatgcactactttcttgcca

SEQ ID NO: 219217 - DNA, 2310 bp, Zea Mays
  misc_feature (1)..(1): n is a, c, g, or t
nctttgagtgttgataccgcgaaagggtctctagctgagttggttaggtggtctgagtagcactccttaggtcctgactttgactccccatgggagcgaatttcaggctgtggttaaaaaaatcctctcgtctgttccacgccaaagcacaagtctaaggcccggtcccggtcttggtcgtttttcacatgggctacggtgccgctgtgtatgagtggggcaggggttcaggggttttctcgacctgcatgaggtcttcttaatataatgcccgggggctgtcttatccccgcagatcaagtttttttagtgttggtacccctgaagttacccttcaccaggaaaaggggctgaatctaggtgtgcacagatgtgtgatcaactcatagtattagatacatgtcttcagttgaatatatttctctgtacctgtatcctgtgggataaccattcaaaaacgagcagagtatttaatatagtatcaatatgtggatgttttccatgcatgctgctaaaccagctgtacatttaactcttctttcatatacaaactgtagattgaaaaaatgtgaaaattaatgtttccttgatatataattgcaatggatggaatgtaacatgaattaaatgaggtagcatggcaaactgtggttttgagaagttgtcctaatgggccatacatccagttcccatgaccatgattaaactgagatattcatatcataataactagtaactcctggttaaaccttttctatcaagttgtggcaaaagcacaagtgtattattgcactggcatggtctatcaagagggggggttagacctgagccaatgtggatgctgatctattatactgggaaatgaaagtttggggcatttctatagtttttatatcctgctagttaaagcatctccaacaacgtgacctataaaaatgtcctataatttaaaaatgagtatattttatagaatttagggcaccaacaaaacatcttgttccaacagtaaagcctcaaatctagattatagggcagcacactacggtgtagtatatttgaggcacttgagagggtgccctataatttttttgaccaaaatttatgaattgagtcactgttgttgtagttttttctgtgtagagtctcatatttcaatttaaggcaccaatttgaggcattgttggagatgctcttagacaaagaaatagttgaacctacaatgtttatattttatttgtttagcaaatgcagttatggttcattattgaaagtagagtcctggctatggttaggtttgagaatttatgaatcatttcaataccatgcttggtgattaacatgatcagtacggaaaatatcgatcaagcgcactgtcaggtgcccaggtcataggtctgttttaattttccattttggagtgaaaacggacctgttgagtcatcatactgtgctgtgtctgcatgattttcatacagaatttcacataattccatttttttatttggaattaggacaaaattgaaacagagcacaattctgtcacaatagattgactggaaagtttggatgctgtggaaacaccacaaaaatcgtgttcaatagaaccaacgctggtatacagcatgtcttcggacagattttttttatgaggctcacctctggtgtttagcaggtgcaggggttatctcttggaggtggttgccttatgtctttagtcaggccgttttttgtttatcttagaatcgaatgtaactaaaatcctgccacgtgggtgtatttgtgtgtgtttgggtgcgttgtatagtccatgttcttaatggagtgatatacggttctcatgcgtattcaagaaaaaaggaaaccgggaactgggaaggagaggcggctgcatggattatacttgggatattctcgctcatcagacttcaagctgattaccttctcgttgttggagtttgcttgagcctcagcattgcaaatattattgggttcaccaaatgcaataaagatgcgaagaagaacatccaggattggacaaggagtgcacttctatcaggtagtgtcagatcgcatctgcagtcagcatttggtgtctgaacaataacctacgaccttgttatacgtgtagtgctgtataatttacagataacatgattggttactagagcgcgtctgttttttttttgttggctatgtgcatcttgctaggcagagtcggaagaacattttcagagccgtgtatcaactcgatgtataatgcagcttgaataaaatctttctttaacaaaaaaaaactcttgtccgtcagaa

SEQ ID NO: 219218 - DNA, 2061 bp, Zea Mays
gcagtagctaggctgtggtgcagaacgtttcggcggggggcgcagcgcagtggctcgagcacgaggccgataaattagcagccctcggccttggaaatggaatcccaaggcataatttagctactacccctacccccgcgcattggttccgttccatcccaagctaacacaggcatcgtatatatggcgggcgacgacggggcggacgcgtcggagcggctggagagcatcctgacggcggaggcggcggcgtcgccgtgggccgcggccgccatcgagctgcggctgctgacgcggctggcggcgcccgcggtggtgatgtacatgatcaactacctcatgtccatgtccacgcagatcttctcgggccacctcggcaacctggagctcgccgccgcgtcgctcggcaacgccggcgtccagatgttcgcctacggcctaatgctgggcatgggcagcgcggtggagacactgtgcgggcaggcctacggcgcccacaagtacgagatgctgggcatctacctgcagcgctcggccgtgcttctgtgcgtcacgggcgttccgctggccgtcatctacgccttctcggagccaatcctggtgttcctgggtcagtcgccggagatcgcccgcgccgcgtccgtcttcgtgtacggcctcatcccgcagatcttcgcgtacgccatcaacttccccatccagaagttcatgcaggcgcagagcatcgtgctcccgagcgcctacatctccaccgtcacgctggtgctgcacgtggtactcagctgggtcgtcgtctacaaggtcggcctgggcctgctgggggcctccctgctgctcagcctcagctggtgggttatcgtcgccgcccagttcgcgtacatcgtgatgagccccaggtgccgccacacctggaccgggttcacctggcaggcattctcgggcctgtggggcttcttcaagctctccgccgcgtccgcggtcatgctttgccttgagacctggtactaccaggtcctggtgctcattgccgggttgctccccaaccctgagcttgcattggatgccttgtccgtatgcatgactgtcaatgcgtgggtgttcatgatcgcagtgggattcaatgctgccgctagtgtgagagtgagcaatgagcttggtgccggccacccaaaatctgcctacttctcagtgtgggtagtgaccggggtctctacgctgatatctctggtgcttgccattgtgatcctctgcctgcgcaactacatcagctacatcttcacggagggtgaggtggtgtcaaacgcggtggcagatctctgcccactgcttgccatcacgctcgtcctcaacggcatccaacctgttctctcaggtgtcgccgttgggtgtgggtggcaagaattcgtagcctacgtgaacgttggctgctactacatagttggtgttcccctcggcgccatcctcggttttgtcttcaagctcggtgtaaagggcatttggagtggtatgattggaggaactttcatgcagacggctattctagtgtgggccaccttgagaactgattggaacaaagaggtagaggaagcacagaaaaggttaaataaatgggcggattcgaagacgacagagccccttcttgttggtttcggcgatggcaactaatttactgcaagggtggatggatggatccacatcatcctctggcttcaccatcgtcaccatcaggaatctacgaaggatcagaagagacgacggagccccttcttgccggcgttggcgatggcaattaatttactggatggatgaatggatccacattattctctggatggcttcaccattgtcaccatcaggattgctaataaatcatgcggagggttattttagccagtaccaaacgtatttcgaggactctatatttcaatttaataaatatgtaccatttataatgaataagatgagattcttcgtcattatctcttgtatttatgtgtttgtgctgttgcggtgaaggaacagaaaacgagccttccacatcttcctcacacctgacaggag

SEQ ID NO: 219219 - DNA, 1261 bp, Zea Mays
ttctgtaatcagtcatcgtcttttgtcgacaagcccacaagcgttttcctctccgagtcctccctggcctctcaaccactcatcatcgccttcgcaggcatcgccctctcgccgggccgtccgattccgccatggcttccggacccatcgataagagagatggctgagcaaattgcaagtgaccctgtgttcaaccagatggctgaacagcttcagaaaagtgctcagggtgctggagaacagggtattcctgcattggatcctcaacagtatatggaaacaatgcaacaagtcatgcaaaaccctcagtttgtgtcaatggcagagcgtcttgggaatgcccttatgcaggatcctgctatgtccagtatgcttgagaacttgaccagtccagctcataaggagcagcttgaggagaggatggcccgtatcaaggaagatccatccttgaagccaattcttgatgagatagagaatgggggtccatctgcaatggtgaagtattggaatgaccctgaggttcttcaaaagattggccaggcaatgggtgttaaccttcccggagattctagtgtgtccactgtgctctctggacctgaagagactgaggaggaaggaggggatgacgatgagtccattgttcatcacactgcaagtgttggtgatgaagagggtttgaagaaagctttagaaggtggagcagacaaggatgaagaagatgccgagggaagacgggctttacattttgcatgtggctatggtgagttgaagtgtgcagaaattctccttgaggcgggggccgcagttgatgccctagataagaacaagaacactccgttgcactatgctgctgggtatggtcggaaggaatgtgtggatcttctgttgaagtatggtgctgctgtcacgctccagaatctggacgggaaaacccccatcgaggttgccaaactcaacagtcaagatgaggttctcaagttgctagagaaggacgctttcctatagagaagagaaccgccgaataaagtgtatcaagccgtcaaactattggttttgcattggtttatttatctcggtctggtatggttgtctgtagcttgtgaatttgatgttcttttcatagcgaatgccgtttttgaaccagtacttgtgtaagaagtacctaggcttgttcttgtcctccatatatgaatctttcacacttgtcaagaattgattacagttattttcaaggctatttcctccgttcccattctaaatt

SEQ ID NO: 219220 - DNA, 1320 bp, Zea Mays
gctgttctttctattgtggtgttttgcttggttgtgcgtgtggttccttggcgtgctacctgcaacatagatccgcacgatgagagcaaaaattcaaaaccagagaagccatcttcagcagctggtgcaggcctccccaatccgtttgatttttcttctatgagcaacttgctcaattgttgtatgctcgtcatgtgcaggacccatcgataagagagatggctgagcaaattgcaagtgaccctgtgttcaaccagatggctgaacagcttcagaaaagtgctcagggtgctggagaacagggtattcctgcattggatcctcaacagtatatggaaacaatgcaacaagtcatgcaaaaccctcagtttgtgtcaatggcagagcgtcttgggaatgcccttatgcaggatcctgctatgtccagtatgcttgagaacttgaccagtccagctcataaggagcagcttgaggagaggatggcccgtatcaaggaagatccatccttgaagccaattcttgatgagatagagaatgggggtccatctgcaatggtgaagtattggaatgaccctgaggttcttcaaaagattggccaggcaatgggtgttaaccttcccggagattctagtgtgtccactgtgctctctggacctgaagagactgaggaggaaggaggggatgacgatgagtccattgttcatcacactgcaagtgttggtgatgaagagggtttgaagaaagctttagaaggtggagcagacaaggatgaagaagatgccgagggaagacgggctttacattttgcatgtggctatggtgagttgaagtgtgcagaaattctccttgaggcgggggccgcagttgatgccctagataagaacaagaacactccgttgcactatgctgctgggtatggtcggaaggaatgtgtggatcttctgttgaagtatggtgctgctgtcacgctccagaatctggacgggaaaacccccatcgaggttgccaaactcaacagtcaagatgaggttctcaagttgctagagaaggacgctttcctatagagaagagaaccgccgaataaagtgtatcaagccgtcaaactattggttttgcattggtttatttatctcggtctggtatggttgtctgtagcttgtgaatttgatgttcttttcatagcgaatgccgtttttgaaccagtacttgtgtaagaagtacctaggcttgttcttgtcctccatatatgaatctttcacacttgtcaagaattgattacagttattttcaaggctatttcctccgttcccattctaaatt

SEQ ID NO: 219221 - DNA, 1204 bp, Zea Mays
gcgtgtggttccttggcgtgctacctgcaacatagatccgcacgatgagagcaaaaattcaaaaccagagaagccatcttcagcagctggacccatcgataagagagatggctgagcaaattgcaagtgaccctgtgttcaaccagatggctgaacagcttcagaaaagtgctcagggtgctggagaacagggtattcctgcattggatcctcaacagtatatggaaacaatgcaacaagtcatgcaaaaccctcagtttgtgtcaatggcagagcgtcttgggaatgcccttatgcaggatcctgctatgtccagtatgcttgagaacttgaccagtccagctcataaggagcagcttgaggagaggatggcccgtatcaaggaagatccatccttgaagccaattcttgatgagatagagaatgggggtccatctgcaatggtgaagtattggaatgaccctgaggttcttcaaaagattggccaggcaatgggtgttaaccttcccggagattctagtgtgtccactgtgctctctggacctgaagagactgaggaggaaggaggggatgacgatgagtccattgttcatcacactgcaagtgttggtgatgaagagggtttgaagaaagctttagaaggtggagcagacaaggatgaagaagatgccgagggaagacgggctttacattttgcatgtggctatgttgaagtgtgcagaaattctccttgaggcgggggccgcagttgatgccctagataagaacaagaacactccgttgcactatgctgctgggtatggtcggaaggaatgtgtggatcttctgttgaagtatggtgctgctgtcacgctccagaatctggacgggaaaacccccatcgaggttgccaaactcaacagtcaagatgaggttctcaagttgctagagaaggacgctttcctatagagaagagaaccgccgaataaagtgtatcaagccgtcaaactattggttttgcattggtttatttatctcggtctggtatggttgtctgtagcttgtgaatttgatgttcttttcatagcgaatgccgtttttgaaccagtacttgtgtaagaagtacctaggcttgttcttgtcctccatatatgaatctttcacacttgtcaagaattgattacagttattttcaaggctatttcctccgttcccattctaaatt

SEQ ID NO: 219222 - DNA, 1258 bp, Zea Mays
gtggttccttggcgtgctacctgcaacatagatccgcacgatgagagcaaaaattcaaaaccagagaagccatcttcagcagctggtgcaggcctccccaatccgtttgatttttcttctatgagcaacttgctcaatgacccatcgataagagagatggctgagcaaattgcaagtgaccctgtgttcaaccagatggctgaacagcttcagaaaagtgctcagggtgctggagaacagggtattcctgcattggatcctcaacagtatatggaaacaatgcaacaagtcatgcaaaaccctcagtttgtgtcaatggcagagcgtcttgggaatgcccttatgcaggatcctgctatgtccagtatgcttgagaacttgaccagtccagctcataaggagcagcttgaggagaggatggcccgtatcaaggaagatccatccttgaagccaattcttgatgagatagagaatgggggtccatctgcaatggtgaagtattggaatgaccctgaggttcttcaaaagattggccaggcaatgggtgttaaccttcccggagattctagtgtgtccactgtgctctctggacctgaagagactgaggaggaaggaggggatgacgatgagtccattgttcatcacactgcaagtgttggtgatgaagagggtttgaagaaagctttagaaggtggagcagacaaggatgaagaagatgccgagggaagacgggctttacattttgcatgtggctatggtgagttgaagtgtgcagaaattctccttgaggcgggggccgcagttgatgccctagataagaacaagaacactccgttgcactatgctgctgggtatggtcggaaggaatgtgtggatcttctgttgaagtatggtgctgctgtcacgctccagaatctggacgggaaaacccccatcgaggttgccaaactcaacagtcaagatgaggttctcaagttgctagagaaggacgctttcctatagagaagagaaccgccgaataaagtgtatcaagccgtcaaactattggttttgcattggtttatttatctcggtctggtatggttgtctgtagcttgtgaatttgatgttcttttcatagcgaatgccgtttttgaaccagtacttgtgtaagaagtacctaggcttgttcttgtcctccatatatgaatctttcacacttgtcaagaattgattacagttattttcaaggctatttcctccgttcccattctaaatt

SEQ ID NO: 219223 - DNA, 1189 bp, Zea Mays
gctgattgaatcagtaggagagagatgagagcaaaaattcaaaaccagagaagccatcttcagcagctggacccatcgataagagagatggctgagcaaattgcaagtgaccctgtgttcaaccagatggctgaacagcttcagaaaagtgctcagggtgctggagaacagggtattcctgcattggatcctcaacagtatatggaaacaatgcaacaagtcatgcaaaaccctcagtttgtgtcaatggcagagcgtcttgggaatgcccttatgcaggatcctgctatgtccagtatgcttgagaacttgaccagtccagctcataaggagcagcttgaggagaggatggcccgtatcaaggaagatccatccttgaagccaattcttgatgagatagagaatgggggtccatctgcaatggtgaagtattggaatgaccctgaggttcttcaaaagattggccaggcaatgggtgttaaccttcccggagattctagtgtgtccactgtgctctctggacctgaagagactgaggaggaaggaggggatgacgatgagtccattgttcatcacactgcaagtgttggtgatgaagagggtttgaagaaagctttagaaggtggagcagacaaggatgaagaagatgccgagggaagacgggctttacattttgcatgtggctatggtgagttgaagtgtgcagaaattctccttgaggcgggggccgcagttgatgccctagataagaacaagaacactccgttgcactatgctgctgggtatggtcggaaggaatgtgtggatcttctgttgaagtatggtgctgctgtcacgctccagaatctggacgggaaaacccccatcgaggttgccaaactcaacagtcaagatgaggttctcaagttgctagagaaggacgctttcctatagagaagagaaccgccgaataaagtgtatcaagccgtcaaactattggttttgcattggtttatttatctcggtctggtatggttgtctgtagcttgtgaatttgatgttcttttcatagcgaatgccgtttttgaaccagtacttgtgtaagaagtacctaggcttgttcttgtcctccatatatgaatctttcacacttgtcaagaattgattacagttattttcaaggctatttcctccgttcccattctaaatt

SEQ ID NO: 219224 - DNA, 1610 bp, Zea Mays
ttggagtggaagcaaccaggaagagcacacggaagaagagtagtgagcacggaaccccaccaggcagaggcagtaagccaccagctgcagccgccagcacagcgcagggcagagggagagggagggcaccggcacaccatggccgtggggggccttctgcggggcctcgtttcgccccccgcctggctaccctgccatgagctcttcgcctcctggcaccactggcttccctccctcccgcgcctccgcccgcccgcatccgacggcttcaagcttctcttggtgctgctgctcttctccgccgctctagccgaggtccgctacatcgcctcctcctccatggcgcccacgcttcgtccaggcgaccgagccgtcgccgagaaggtcaatccgccttgtctgctcgcccctttccttcccttcccttcccactgcttttatttctagtgctacaataagggcaatgcgtgcgctgttctttcaattcttagactagtactgtatacatggatccctgcttcttagattggtttggtagtgtagtagatccacgctgcctgcctgataccacaggttacatacttgttccggaggccatctattggggatatagtgtttttcaaagtaccgactgctgtgcagaattatggtgtcaataaggatgttgtctttattaagagagtattggcaacaccaggagacttcattgaggtccgacaagggcagcttattgtaaatggtgtcgcactaaaggagcattacgcagcagcaacgtcattgtacacaatggaagcaatggtccagagatctttaaaagtcacaagaaagaagatgatcaaaaactggactggctgctccatgttgttgacttcttgagtgccccgttgtaatcaatcgatcaatgggcctcagatggtggatgatctttttcttattggatggatgggtgggtacctggatcctcagtcagctgaaagtaagtattctcgtactcctgcagcgccttcctgaaggtcacgtatttgtcatgggtgacaaccgcaataacagctgtgattctcgtgcctgggggcctcttcccgttgccaacatcgttggaaggtacatgacatcatttacaagatcctctttccagtaactggggttccactcaatgttcgtcctcataaatcaatcatagttagagagttgtggagccaggcggctgctatcttgtcaatttgtagcgatgtttgttgtatatgattctcacttaatttggacatgcatgattgtgtacttgtgttgttataaagtaagcatgttttgttgttgtatatgatcgcacttaatttggacatgcatgattgtgtacttgtgttgttataaagtaagcatgttttgttccaacactccacaaattgggcgctatttttaatgggaatttcacagcactctttctaacaccgccacatcatcaaaattagtaactaaggatgtctttcaatgcaaggtttcacctcactattctatagactaaatatcaattaaatgttgcaactcagtaaccaatagaaattagtaaaatatgtgaaggtaaagcagattactctctcaaatggaggtttgtg

SEQ ID NO: 219225 - DNA, 1888 bp, Zea Mays
cttatctttgaatagatgacataattggagaatctgtccatatatctatgcgatgttctgtatttactacaagcaccattataggataatagtgttcttccatagtcccttgcatcggttgggctttaatttcaatagtcttgcatcggttggtatttaatagtcttgcatcggttgggctttttctgaagcgctaatagtgttcttccatagtcccttgtccttatgtcctttgtggaaggtcgaggatattttaggttcaaaccatgtataatttcatttctgccccaattaggtggctacaacttacctgcgtagacaaaatataagtatgtgcaataatatagctagcagagtcgatcttccctatgctatagagcatgtaaattacttataatttgtctaacaaaaactgacccaatcctagaaatagggatggcaaacagtaggactagaattcagctgcaaaatgccagggaccatataagtcaggatttcctcttcttggacctactgaagcaggtaaaggtgctttttctagaacaacatttcatcttcccatcagtgaggttagttgtcctctaaaaattttagtttttatccctgctatcaaaggtttaacatgccttgttattatgtcataccatgatgaaattaaacccatgataaaattaaaaaccatgtacacggatcatagaaacccactaacagaattatagaaaccacataagcagaatagaaaacggttctctgaaaatgaagaacattattgttgtgttctaaatcaggatttggtgttacaccaggtgttcgacgcgattccttgcattatttttcagttgtaacataccacaagattatgtggttttgggattatttatttctcaggaacagtttattaattagtttcattttattcttatcagcatgctctctctcatgagacattgattagtgtattatgtattctggatgatgtgtgttgtgccataccatgtatttgttctgaagaacaattaattcattagctatttgggctattatgtctagaatatggttgcttagatcttccaacttatagtgtgtttgtagcttctgtagaaatatattcaatgtgtgttcacatatttttagagatttggacaccttacaaaggataaggattacgaggatccaccagactctgcatcggcgtgcccacgcgccagatggccattgaggaacactaccgatgcaggcgccatctttggtagctgaggacaaattaaagtttgccttcctgtgaattttctaccttttccaaatttaaagtcattaagagttcaagattgtgatgatttgtagtactgaattggaggcttttatcccctgcaatttatgtggtacaagtaagggtgttgtgtgagaaggcaaaggagattctaatggaggaaagaaatgttcagtttgtgggtagatgtggatcataatcagctactctatctgtagcagtgcgagtatttccaacaccaacaccgacgatacagagcccgggggaagtagcaagattttgagctcctacagttagacagccgccagacccagtcacgacgactgatgttggaaaccagcggcgcgcctacttcagttgagtgcaaagctaccaacatctgatccatgcttttgggttctttgtatctgtatctatcaattcattaagtgcagacaatccatgtttctgccaccaaatggggcatattttccctctggtccagttttaacttgagaacaattgaacaaatgtccaatgtgatgtctgatttctcaacattgtctttcccaaatgtaaagaaaatatgtatgatagcgcactaatcatccttctgacagttggatgactgcaatgttc

SEQ ID NO: 219226 - DNA, 1459 bp, Zea Mays
ggaagaagccatctatggaattgtttgaaatgatttgagcatttaatcccttatctttgaatagatgacataattggagaatctgtccatatatctatgcgatgttctgtatttactacaagcaccattataggataatagtgttcttccatagtcccttgcatcggttgggctttaatttcaatagtcttgcatcggttggtatttaatagtcttgcatcggttgggctttttctgaagcgctaatagtgttcttccatagtcccttgtccttatgtcctttgtggaaggtcgaggatattttaggttcaaaccatgtataatttcatttctgccccaattaggtggctacaacttacctgcgtagacaaaatataagtatgtgcaataatatagctagcagagtcgatcttccctatgctatagagcatgtaaattacttataatttgtctaacaaaaactgacccaatcctagaaatagggatggcaaacagtaggactagaattcagctgcaaaatgccagggaccatataagtcaggtaataactaccaggaaagtgaagctatctatttctagctgcacactatatagctgaccagtgcatttctgactttgtatgctttaggatttcctcttcttggacctactgaagcaggtaaaggtgctttttctagaacaacatttcatcttcccatcagtgagagatttggacaccttacaaaggataaggattacgaggatccaccagactctgcatcggcgtgcccacgcgccagatggccattgaggaacactaccgatgcaggcgccatctttggtagctgaggacaaattaaagtttgccttcctgtgaattttctaccttttccaaatttaaagtcattaagagttcaagattgtgatgatttgtagtactgaattggaggcttttatcccctgcaatttatgtggtacaagtaagggtgttgtgtgagaaggcaaaggagattctaatggaggaaagaaatgttcagtttgtgggtagatgtggatcataatcagctactctatctgtagcagtgcgagtatttccaacaccaacaccgacgatacagagcccgggggaagtagcaagattttgagctcctacagttagacagccgccagacccagtcacgacgactgatgttggaaaccagcggcgcgcctacttcagttgagtgcaaagctaccaacatctgatccatgcttttgggttctttgtatctgtatctatcaattcattaagtgcagacaatccatgtttctgccaccaaatggggcatattttccctctggtccagttttaacttgagaacaattgaacaaatgtccaatgtgatgtctgatttctcaacattgtctttcccaaatgtaaagaaaatatgtatgatagcgcactaatcatccttctgacagttggatgactgcaatgttc

SEQ ID NO: 219227 - DNA, 4156 bp, Zea Mays
aaaccctaaaaccccaccgctgttcgcgtcctcgtttctctcaatctctctcctctcctcgcctctccttggtgtccgtgttcacgccgtcgctagcgcctgccgcggcgaagcttctgccctccccggcgccgggctcgggtcgtcgtcggccaggcagctgctacgcgtgaacacggtcacaccagtaccacgtgacgtgaacggtgaactcgtgaagaacagagccgccactgaggaaccctagcgacggcggcgtgctaccggtgacattgtccccctcggtccctcctccatccccgacgcagcggcgccagcctgcaggaagcctattcgagacaaggtcgatctttgctgccttggcgagcttcagccgaatcaaggtcgagcatggcggcaggccagtaaatagagcaacacaaaacccttcaaatcaatggagacctctgcagcaaccccgacccggccgccacaccaggcggccacttccccatcgccatcgccctcgtcgtcgttgaggctgtggaggccagcggcgcagcgcaacatgcgcaatcagtggtcccatctgagcgccgccaaggagcagtggctggccgccgttgctgacggtcgtgcccacgcctccgcgctcgtcaacgtccacctctcctgcaggaacatgccggcgatggatttgggggtgctcaaggatatgccggggatccgcgataaggcgaactccaagttggcgcttagagaggagcaatacagcggcatgcttctgtcggcctacaaggagatggtctgtcagctgtcctacttggttgaagcttcccattctatgcgctgtttttctaaagcggctccaaattgctccatcacacagttttctgaccgccaagataatttgaatgattcaggggatggtggaggagccccagtattcaaatggttctccgtattagaatttggtgggttaatcatctcttgcttctatggattaagtcaccactatgatctttcgtctgttgggtgtgacaatgatctcctaacccatctatatctgagactactcagagcactatatattctcacatttgaggatgccgatcaatatctgagacagtacacacattcatgtttacatgttttaaatccacatgataaaaatatattatgtttcctttaatcacctcagagagtcttgcccaggagcttgttcagatgtttgtttcagagcaaaagttgaagaggctgctactcttggaatttctctcgattgctttaaaggaaggtgtagaactccagacatcattaaattggggtgatgaactatatgatgaacgtttagggagtcagagacctggcaatctccctctgcatgaagttttacaggtttatttaaccacttggcatgctaatatgaacatcaaccggagtagaattggtgaaatatttgagcttgttgaggaggagatgaagattaaactgtcttgaagattccgattcattttgttgggctatccatcaaggaagaagaaatggaaaagaaagatcaatcagttcactattcaccaggattctatatccagtgtctttatctgccttagtagaagccttcagagcttacctatgatcttagaatatagtactggtctccttgtgacccataatttttttaaaaaatttaatgttgggttacactggaatcatattgggaagagcgttggaccaacatatgttattgaaatgagatttctaagttatcaggatcattcgcctagcttcagggtttagatgggcgtcgaggcagcaatcgaggcaaggaggaggcgggggtgggggatgctacaccgaccgtgacgtcgcctactgtcttggaccttctgtgcgccctccttgacaccctcgacgctccacggagctcggaggcggtgaccgtcgaggaggtcggtccctcgaggcgacccggggaaccggttgaaaagtacatcatcccgcctcctatcgttggggcgggtggcgacctcgttcgtgccggatcggacctctcgacatggggagggccgaccctgaggtggatggccaccgagggcaacccctacttcgtccttaatgacacggaggagagggagatgtgggcggagtttcgagcaatggctcaggggcttatggcgaagtccgtggccaagtcgatctccatccgcagcgagcgcgacatatgggccgtgctgcagcgctatcaggccatgttgtgttgcgcaaacgagtagctgacgctgaagagggccgaggcggcgaacctatcgtcgttgtgtgctgagttgaaagacgaggtcgcgactgagcgcgagaaggtgtcgtcgctggaggaggaggtgcgacgcctgagataaggccttcgggtggtgactggtgaacgagacgagtctcggcatcaagccaccgaggcttctcttcaagctgactctcacgaaggacctgggggccgagtggagtacggtccaaggcctaagggcctaaatgggagagctcgaaagggatttggatgctgccattcacacctctaaaactcacccaggccgtcgaccaaaagatggtcgagctgaaggacctgtccgacgcggtggtggagtttggtcgagacctttgcgtcgcggacgttcccttgggtgagtacttgcggagccgcatgcgagccctgagtggctacgtgcggagcgaactccgtgaggccgtccatcttggggtgaagcaagtgttggtcgtagtcgcctcccactatgagattaatctcgagcgggcatgcgaaggctacgtcttgttggacgagcgcaacctcgccgaggccgagatgcagaggctcaccgatgttgtcgaggggtcgggctcagtgtaacaccccgtccaatcccggaccggcggtacttactcctggcagctctctaggatcatttatcatccacacaaaccaacatgggtcttttgtgcgcactttgtcctcactcatgtgcacccgataaaacttcccagtcggtcactaatcctaaattgctccaagccaaacacgcttaacttggaggttcttttgagatatgcttccgaaaaagaagatgtatcttgttggtatggatactctattaattctattaagccttgggccaggatatcaccatctcagggcctaggatatcacaatccacccccttagaagaccgacgtcctcgtcggtcaacctcaatccaggaacctcccctcttagccacatgtgtgtctagtgtcgtcatattccatgccatgtgaccacttagggcccacatgcgccatgtgccatatatccgaaccccctagcccacacacgctcgtgaaacctcaagggtcggctctgataccacttgtaacaccctatccaatccctagaccggcggtacttactcctggcagctctctaggatcatatatcatctccacagaccaacacaagtctttgtgtgcgctttgttctcactcatgcgcacccgagaaaacttcccggtcggtcacttatcccaaattgctccaagccaaacacacttaacttggaggttctttcgaaataggcttccgaaaaagaagatgcaccttgttggtatggatactctattaattctattaagccttcggccaggatatcaccatcctaggggctaggatatcacacttagcattggcgtgccacttcgaggatgaggtggttctgccggtgcagtcccctcctgtcgaatctcactccgctgtggcgcctcccggcgtccccgaggttgacgctgtgcctcataccgcgcagactcttcatttgccctgaggggttataaggaatattttgagttgcgtgtataagtcgtgtattgaacactttgtttttgtatcttgtttatttgctatgttattttttcgcttgttttgtgcccgccgttttgcctttccacagagtcctcatcggaacgtgagttaccttatgggaggatagtgagtgaggataccatgtccttgaggcgtaggtgctcctgcgccccggctaccattttctaatcgggatgtatcttgttccttaggatcctgttttatgactagagcgagggcacgaaacactttaaagaaaagctgcgagaaaaataagatagagggggttccc

SEQ ID NO: 219228 - DNA, 4389 bp, Zea Mays
ctaaaccctaaaaccccaccgctgttcgcgtcctcgtttctctcaatctctctcctctcctcgcctctccttggtgtccgtgttcacgccgtcgctagcgcctgccgcggcgaagcttctgccctccccggcgccgggctcgggtcgtcgtcggccaggcagctgctacgcgtgaacacggtcacaccagtaccacgtgacgtgaacggtgaactcgtgaagaacagagccgccactgaggaaccctagcgacggcggcgtgctaccggtgacattgtccccctcggtccctcctccatccccgacgcagcggcgccagcctgcaggaagcctattcgagacaaggtcgatctttgctgccttggcgagcttcagccgaatcaaggtcgagcatggcggcaggccagtaaatagagcaacacaaaacccttcaaatcaatggagacctctgcagcaaccccgacccggccgccacaccaggcggccacttccccatcgccatcgccctcgtcgtcgttgaggctgtggaggccagcggcgcagcgcaacatgcgcaatcagtggtcccatctgagcgccgccaaggagcagtggctggccgccgttgctgacggtcgtgcccacgcctccgcgctcgtcaacgtccacctctcctgcaggaacatgccggcgatggatttgggggtgctcaaggatatgccggggatccgcgataaggcgaactccaagttggcgcttagagaggagcaatacagcggcatgcttctgtcggcctacaaggagatggggatggtggaggagccccagtattcaaatggttctccgtattagaatttggtgggttaatcatctcttgcttctatggattaagtcaccactatgatctttcgtctgttgggtgtgacaatgatctcctaacccatctatatctgagactactcagagcactatatattctcacatttgaggatgccgatcaatatctgagacagtacacacattcatgtttacatgttttaaatccacatgataaaaatatattatgtttcctttaatcacctcagagagtcttgcccaggagcttgttcagatgtttgtttcagagcaaaagttgaagaggctgctactcttggaatttctctcgattgctttaaaggaaggtgtagaactccagacatcattaaattggggtgatgaactatatgatggtgaatcaaataaacttcagagtattggccttcagtcaggagatgcctactcaccgcctgaaaattggtgtgcagaacgtttagggagtcagagacctggcaatctccctctgcatgaagttttacaggtttatttaaccacttggcatgctaatatgaacatcaaccggagtagaattggtgaaatatttgagcttgttgaggaggagatgaagattaaactgtcttgaagattccgattcattttgttgggctatccatcaaggaagaagaaatggaaaagaaagatcaatcagttcactattcaccaggattctatatccagtgtctttatctgccttagtagaagccttcagagcttacctatgatcttagaatatagtactggtctccttgtgacccataatttttttaaaaaatttaatgttgggttacactggaatcatattgggaagagcgttggaccaacatatgttattgaaatgagatttctaagttatcaggatcattcgcctagcttcaggtttgttctgtgctgttgtagatgtgtattatttacttcattggcctgctgtacagatcttggtgacatgctcgtggaaaacgcatattgcttttagtggtttttttattacgcttatggattgtaggtcttctggttattattatttttattgttattgttgttattattattattattattattattattattattattattattattattattattattattattattattattattattattttgttgttgttgttgttgttgttgttagggtttagatgggcgtcgaggcagcaatcgaggcaaggaggaggcgggggtgggggatgctacaccgaccgtgacgtcgcctactgtcttggaccttctgtgcgccctccttgacaccctcgacgctccacggagctcggaggcggtgaccgtcgaggaggtcggtccctcgaggcgacccggggaaccggttgaaaagtacatcatcccgcctcctatcgttggggcgggtggcgacctcgttcgtgccggatcggacctctcgacatggggagggccgaccctgaggtggatggccaccgagggcaacccctacttcgtccttaatgacacggaggagagggagatgtgggcggagtttcgagcaatggctcaggggcttatggcgaagtccgtggccaagtcgatctccatccgcagcgagcgcgacatatgggccgtgctgcagcgctatcaggccatgttgtgttgcgcaaacgagtagctgacgctgaagagggccgaggcggcgaacctatcgtcgttgtgtgctgagttgaaagacgaggtcgcgactgagcgcgagaaggtgtcgtcgctggaggaggaggtgcgacgcctgagataaggccttcgggtggtgactggtgaacgagacgagtctcggcatcaagccaccgaggcttctcttcaagctgactctcacgaaggacctgggggccgagtggagtacggtccaaggcctaagggcctaaatgggagagctcgaaagggatttggatgctgccattcacacctctaaaactcacccaggccgtcgaccaaaagatggtcgagctgaaggacctgtccgacgcggtggtggagtttggtcgagacctttgcgtcgcggacgttcccttgggtgagtacttgcggagccgcatgcgagccctgagtggctacgtgcggagcgaactccgtgaggccgtccatcttggggtgaagcaagtgttggtcgtagtcgcctcccactatgagattaatctcgagcgggcatgcgaaggctacgtcttgttggacgagcgcaacctcgccgaggccgagatgcagaggctcaccgatgttgtcgaggggtcgggctcagtgtaacaccccgtccaatcccggaccggcggtacttactcctggcagctctctaggatcatttatcatccacacaaaccaacatgggtcttttgtgcgcactttgtcctcactcatgtgcacccgataaaacttcccagtcggtcactaatcctaaattgctccaagccaaacacgcttaacttggaggttcttttgagatatgcttccgaaaaagaagatgtatcttgttggtatggatactctattaattctattaagccttgggccaggatatcaccatctcagggcctaggatatcacaatccacccccttagaagaccgacgtcctcgtcggtcaacctcaatccaggaacctcccctcttagccacatgtgtgtctagtgtcgtcatattccatgccatgtgaccacttagggcccacatgcgccatgtgccatatatccgaaccccctagcccacacacgctcgtgaaacctcaagggtcggctctgataccacttgtaacaccctatccaatccctagaccggcggtacttactcctggcagctctctaggatcatatatcatctccacagaccaacacaagtctttgtgtgcgctttgttctcactcatgcgcacccgagaaaacttcccggtcggtcacttatcccaaattgctccaagccaaacacacttaacttggaggttctttcgaaataggcttccgaaaaagaagatgcaccttgttggtatggatactctattaattctattaagccttcggccaggatatcaccatcctaggggctaggatatcacacttagcattggcgtgccacttcgaggatgaggtggttctgccggtgcagtcccctcctgtcgaatctcactccgctgtggcgcctcccggcgtccccgaggttgacgctgtgcctcataccgcgcagactcttcatttgccctgaggggttataaggaatattttgagttgcgtgtataagtcgtgtattgaacactttgtttttgtatcttgtttatttgctatgttattttttcgcttgttttgtgcccgccgttttgcctttccacagagtcctcatcggaacgtgagttaccttatgggaggatagtgagtgaggataccatgtccttgaggcgtaggtgctcctgcgccccggctaccattttctaatcgggatgtatcttgttccttaggatcctgttttatgactagagcgagggcacgaaacactttaaagaaaagctgcgagaaaaataagatagagggggttccc

SEQ ID NO: 219229 - DNA, 1810 bp, Zea Mays
aaaaccccaccgctgttcgcgtcctcgtttctctcaatctctctcctctcctcgcctctccttggtgtccgtgttcacgccgtcgctagcgcctgccgcggcgaagcttctgccctccccggcgccgggctcgggtcgtcgtcggccaggaagcctattcgagacaaggtcgatctttgctgccttggcgagcttcagccgaatcaaggtcgagcatggcggcaggccagtaaatagagcaacacaaaacccttcaaatcaatggagacctctgcagcaaccccgacccggccgccacaccaggcggccacttccccatcgccatcgccctcgtcgtcgttgaggctgtggaggccagcggcgcagcgcaacatgcgcaatcagtggtcccatctgagcgccgccaaggagcagtggctggccgccgttgctgacggtcgtgcccacgcctccgcgctcgtcaacgtccacctctcctgcaggaacatgccggcgatggatttgggggtgctcaaggatatgccggggatccgcgataaggcgaactccaagttggcgcttagagagcggcatgcttctgtcggcctacaaggagatggtctgtcagctgtcctacttggttgaagcttcccattctatgcgctgtttttctaaagcggctccaaattgctccatcacacagttttctgaccgccaagataatttgaatgattcaggggatggtggaggagccccagtattcaaatggttctccgtattagaatttgagagtcttgcccaggagcttgttcagatgtttgtttcagagcaaaagttgaagaggctgctactcttggaatttctctcgattgctttaaaggaaggtgtagaactccagacatcattaaattggggtgatgaactatatgatggtgaatcaaataaacttcagagtattggccttcagtcaggagatgcctactcaccgcctgaaaattggtgtgcagaacgtttagggagtcagagacctggcaatctccctctgcatgaagttttacaggtttatttaaccacttggcatgctaatatgaacatcaaccggagtagaattggtgaaatatttgagcttgttgaggaggagatgaagattaaactgtcttgaagattccgattcattttgttgggctatccatcaaggaagaagaaatggaaaagaaagatcaatcagttcactattcaccaggattctatatccagtgtctttatctgccttagtagaagccttcagagcttacctatgatcttagaatatagtactggtctccttgtgacccataatttttttaaaaaatttaatgttgggttacactggaatcatattgggaagagcgttggaccaacatatgttattgaaatgagatttctaagttatcaggatcattcgcctagcttcagggtttagatgggcgtcgaggcagcaatcgaggcaaggaggaggcgggggtgggggatgctacaccgaccgtgacgtcgcctactgtcttggaccttctgtgcgccctccttgacaccctcgacgctccacggagctcggaggcggtgaccgtcgaggaggtcggtccctcgaggcgacccggggaaccggttgaaaagtacatcatcccgcctcctatcgttggggcgggtggcgacctcgttcgtgccggatcggacctctcgacatggggagggccgaccctgaggtggatggccaccgagggcaacccctacttcgtccttaatgacacggaggagagggagatgtgggcggagtttcgagcaatggctcagg

SEQ ID NO: 219230 - DNA, 1990 bp, Zea Mays
ctaaaaccccaccgctgttcgcgtcctcgtttctctcaatctctctcctctcctcgcctctccttggtgtccgtgttcacgccgtcgctagcgcctgccgcggcgaagcttctgccctccccggcgccgggctcgggtcgtcgtcggccaggcagctgctacgcgtgaacacggtcacaccagtaccacgtgacgtgaacggtgaactcgtgaagaacagagccgccactgaggaaccctagcgacggcggcgtgctaccggtgacattgtccccctcggtccctcctccatccccgacgcagcggcgccagcctgcaggaagcctattcgagacaaggtcgatctttgctgccttggcgagcttcagccgaatcaaggtcgagcatggcggcaggccagtaaatagagcaacacaaaacccttcaaatcaatggagacctctgcagcaaccccgacccggccgccacaccaggcggccacttccccatcgccatcgccctcgtcgtcgttgaggctgtggaggccagcggcgcagcgcaacatgcgcaatcagtggtcccatctgagcgccgccaaggagcagtggctggccgccgttgctgacggtcgtgcccacgcctccgcgctcgtcaacgtccacctctcctgcaggaacatgccggcgatggatttgggggtgctcaaggatatgccggggatccgcgataaggcgaactccaagttggcgcttagagaggtagagcaatacagcggcatgcttctgtcggcctacaaggagatggtctgtcagctgtcctacttggttgaagcttcccattctatgcgctgtttttctaaagcggctccaaattgctccatcacacagttttctgaccgccaagataatttgaatgattcaggggatggtggaggagccccagtattcaaatggttctccgtattagaatttgagagtcttgcccaggagcttgttcagatgtttgtttcagagcaaaagttgaagaggctgctactcttggaatttctctcgattgctttaaaggaaggtgtagaactccagacatcattaaattggggtgatgaactatatgatggtgaatcaaataaacttcagagtattggccttcagtcaggagatgcctactcaccgcctgaaaattggtgtgcagaacgtttagggagtcagagacctggcaatctccctctgcatgaagttttacaggtttatttaaccacttggcatgctaatatgaacatcaaccggaaattggtgaaatatttgagcttgttgaggaggagatgaagattaaactgtcttgaagattccgattcattttgttgggctatccatcaaggaagaagaaatggaaaagaaagatcaatcagttcactattcaccaggattctatatccagtgtctttatctgccttagtagaagccttcagagcttacctatgatcttagaatatagtactggtctccttgtgacccataatttttttaaaaaatttaatgttgggttacactggaatcatattgggaagagcgttggaccaacatatgttattgaaatgagatttctaagttatcaggatcattcgcctagcttcagggtttagatgggcgtcgaggcagcaatcgaggcaaggaggaggcgggggtgggggatgctacaccgaccgtgacgtcgcctactgtcttggaccttctgtgcgccctccttgacaccctcgacgctccacggagctcggaggcggtgaccgtcgaggaggtcggtccctcgaggcgacccggggaaccggttgaaaagtacatcatcccgcctcctatcgttggggcgggtggcgacctcgttcgtgccggatcggacctctcgacatggggagggccgaccctgaggtggatggccaccgagggcaacccctacttcgtccttaatgacacggaggagagggagatgtgggcggagtttcgagcaatggctcagg

SEQ ID NO: 219231 - DNA, 1579 bp, Zea Mays
atgaaggaacagcttccagtgcctcttgtaccgatcatcggcaagggagtgctagaggaggaggttatggtgagttttgtcacgactaatggtgagcccacgactacgaccacgtcaaagctggtctggtggaacctcgtggatcagatgacgatgacgctgacatcctgcacctctgctgcgatgctgccgaccaggacacgggcatctccgtcgcgcgcgctctacaagtctggatccatcatcgtgctcggcaagactaacttccttaggccaggcatggatcccataaccatatggacagccacaaagaaaagtggcctgattagctacaagaagatcttgttccatggactcgatctctggactgcactatcgttgcctcagcccctaggtcgtgctgccctctggcctcctcatcgtacaattcaccaacatctccaatgtaagtgcagcaggttcagtaatgaactcagaagtggcatcagaatactccaagagttttttgttctttttgcctggatatataccgagggcaatgcattcaaaactcctatagatgacgaatcccatctctccctcttttcctggacacggatcctagtctcttcttcaagcaagagatggagctttctttggtcgggctccaaaatgctaggaaaacatcacttgcagcagctcgcagcgacacccccgcctcctcatcatggaagctacaagaacactttgagtaggtgaagaggatttgcgacactaccacattgtctttggccaagcatcatctcagtgataagataacaagccaactggatatttcaaaattgagtgacaagctacagtaagggaaggtagactcaagtgcattgacaccaaaggagaagtatgaaacttggaaggagattaaaattatgagtttcagaaaaatagtttctccaatgtgggcaatgacattgcttagcttgtatgttagagttcatgtcaccatattaggtagaatctgacacctttaatggaaatggacacaagaccttggttgcaatggatgattatcttgtcactgacaaaatcactgcattcatagtgcaaatgcaacatgcagcaactgaagtccttaaagaaaagcaaccaaaagaccgtatgaaatggaccaagtattgcagacaatattacaaatattggacacgttcatggctctttctgaagatactcatggataaattatcttgtacctgagaatcccccttatttttgcacaattggtggctgtgtccagtagtggctttgatgattcatcaatcctaaacgattttagaaagctataccaactaatgtgtggaggacctgggcaaggggtggtagtcgcgctagttcgctatccacggtggcaagccgcctactcgaagatcccgcctccgaggacgccactgcggggaggacatgggcacgaatcttgaactaaaactaggggggtgtctatgtaagttatactttctctcacatttgcatcaaaatttgttttccgataatcaacatatcttgacatgtttctatgtactttctctcacattgagagtttttt

SEQ ID NO: 219232 - DNA, 2101 bp, Zea Mays
gtgtctctgtatcatataattctggagtcaaacattttacattgcatgcatactcaactaaaaagtctttatttaaaaagacatgcagagttcagaaagatttctgctttatagcctctacccttgacgaggccattttgtgggtgacatgctttgctgaacaaagtatatatgttaacttactacctcgccttggagcatctagtatcaatcaagactcagaaaatcccctcagtgagtctttatttgaccagccaccgattaaatgcaaatctccgcaaagagtacttgttatattgaaccctcgatctggacatggtagatcaagtaaagttttccatgagaaagctgaacctatatttaagcttgcaggttttcagatggaagttgttaaaactactcatgctgggcatgcaaaatctcttgtatctacatttgatttcagtgcatgccctgatggaatcgtgtgcgtgggtggtgatggaattgtgaatgaggtgctcaatggtcttctcattaggagtgatagagcagaagctgtatcaattccagttggaataattcctgcagggtctgacaactcacttgtctggactgttttgggagttagagatcctatttctgcatcattattaattgttaagggtggtttcacagctctagatatcttggctgtcgagtgggttcaatctgggcaaatacattttggctcaactgtttcatactatggttttgttagtgatgtcctggaactttctgagaaatatcagaagaaatttggtccacttcgatattttgtggctggaatactgaaatttttatgtttgcctagctacttctatgaactggaatatcttccttcgccaaaggagatggccgtgaatggaaaaggtacagatcaagacaaggcccacctgtccaatgtctataccgatgtgatgcacagcagatcaaagaaagaaggaattccaagagcctccagtttgtccagtattgattctattatgactccaagtcggatgtcgcttggggatgttgatacatcaggtagtacagtggcaagcactgaaccatcagactatgtacgtggtctcgatccgaaagcaaaacgcttgtctctgggaagaagtaacattgtttcagaacctgaagaagtgctacaccctcaaccacatcatggatcattctggccaagaaccaggtccaaagcaagggctgatagaaattcagttggtataacgtctactaatgacacacggtcgtcttgggcagccccatcaatgcatgataaggaagacatttcctcaacaatatcagacccaggacctatttgggactgtgaaccaaagtgggacacagggccaaaatgggatagtgagctaacttgggagcctgaccaccccattgaacttcctggaccacaagaggacatgggaattggagcaccgatggaacttgtgccaaatttggatgagaaatgggtagttaggaaagggcactttcttggtgtcctagtatgcaaccattcatgcatgacagtgcaaagtctgagttcacaggttgttgcaccgaaggccatccatgatgacaacagcttggacttacttttagttggtggaaaaggaagatggaaattgctgagatttttcatacttctgcaattcggtcgccatctctctttgccttacgtcgaatatgtaaaggtgaagtcagttaagcttaaacctggtgcaaacactcacaatggctgtggcatagatggcgagctttgccgtgtcaagggacaggtactctgctccctgcttccggagcaatgcagactgattggccggcgatgtagacaatctatttaagcgctgtgttgaatttcatggatcctggggttctttccacttctaacaaatgtttatataactatactttctgatgggattaagcttgggttggtgttgcaaatgttgagagtttgaaccagaagcaatgttgtgaggtttctgtatatttgagcggttataggatgatatgctgattctgtttaattatgttgattttgcttatatatattcaatagagtaatttagtcccacttcggcgtggcggg

SEQ ID NO: 219233 - DNA, 2853 bp, Zea Mays
ccacaccacccctcccaacccaccttctgcctggctgccttctgcctccccttcggctccggtccttcctctcaagtcccacacccgtgtcccaccgcaccggccctcaagcagggcagggcagggcagctacctccaagtctccaaccccccaaccccaacagacgggacgccgcctcgtgtccggcacgccgttccctcccgtccccgctccttcccctcgctaaaacccatcgaatcgaccgacgcacgtcctgacactcctgctcccctgtcgccaccgcgtcgcgcgcgggcagaggcctctctcgccatctcgcggccgcggcaccccacagctatcctaccacccgacctcccaccaccgccgccgccgccggcctgctcccaaccacaagtccaggaggacgccccttcgatccgccgcagggaggcaggcgcccgcgcccccgccccccgccaggctccatctccggatccgatcgcccgccggctcggttcaatccgtttacttaattatactgaccttctcatatggcgttggatccgtgatgcctcctccattcctgaagctatttggaattcattgcctgaatcagtgttctgaagtgctatctaacagtcagaaatggatggatccgagcttgaaaatcctacttctagaagctcatcccagaaatctagccgacgttcgagtagtaggcgttctcaaaagtcagctggacagcattctttgaccggtgctcaagagaaaagaagcaaatcgaaatcttcaaggcagaaacacttggttattgacgacaaagaggctaaaaaagggaaaaaacatgaccacaaaattgacgtggcagatgagaggtccaattttctaggttatgaagtgtatgctggaaagctgattcttcaaaagaaaaatagaagtgcgagtgataataatcagttaccgtcaaacggaaaagctgatgcaattgatgctagactcacaagtaaagctctgatctggggcagctctgtactcctactggaggatgttgtctctgtatcatataattctggagtcaaacattttacattgcatgcatactcaactaaaaagtctttatttaaaaagacatgcagagttcagaaagatttctgctttatagcctctacccttgacgaggccattttgtgggtgacatgctttgctgaacaaagtatatatgttaacttactacctcgccttggagcatctagtatcaatcaagactcagaaaatcccctcagtgagtctttatttgaccagccaccgattaaatgcaaatctccgcaaagagtacttgttatattgaaccctcgatctggacatggtagatcaagtaaagttttccatgagaaagctgaacctatatttaagggtggtttcacagctctagatatcttggctgtcgagtgggttcaatctgggcaaatacattttggctcaactgtttcatactatggttttgttagtgatgtcctggaactttctgagaaatatcagaagaaatttggtccacttcgatattttgtggctggaatactgaaatttttatgtttgcctagctacttctatgaactggaatatcttccttcgccaaaggagatggccgtgaatggaaaaggtacagatcaagacaaggcccacctgtccaatgtctataccgatgtgatgcacagcagatcaaagaaagaaggaattccaagagcctccagtttgtccagtattgattctattatgactccaagtcggatgtcgcttggggatgttgatacatcaggtagtacagtggcaagcactgaaccatcagactatgtacgtggtctcgatccgaaagcaaaacgcttgtctctgggaagaagtaacattgtttcagaacctgaagaagtgctacaccctcaaccacatcatggatcattctggccaagaaccaggtccaaagcaagggctgatagaaattcagttggtataacgtctactaatgacacacggtcgtcttgggcagccccatcaatgcatgataaggaagacatttcctcaacaatatcagacccaggacctatttgggactgtgaaccaaagtgggacacagggccaaaatgggatagtgagctaacttgggagcctgaccaccccattgaacttcctggaccacaagaggacatgggaattggagcaccgatggaacttgtgccaaatttggatgagaaatgggtagttaggaaagggcactttcttggtgtcctagtatgcaaccattcatgcatgacagtgcaaagtctgagttcacaggttgttgcaccgaaggccatccatgatgacaacagcttggacttacttttagttggtggaaaaggaagatggaaattgctgagatttttcatacttctgcaattcggtcgccatctctctttgccttacgtcgaatatgtaaaggtgaagtcagttaagcttaaacctggtgcaaacactcacaatggctgtggcatagatggcgagctttgccgtgtcaagggacaggtactctgctccctgcttccggagcaatgcagactgattggccggcgatgtagacaatctatttaagcgctgtgttgaatttcatggatcctggggttctttccacttctaacaaatgtttatataactatactttctgatgggattaagcttgggttggtgttgcaaatgttgagagtttgaaccagaagcaatgttgtgaggtttctgtatatttgagcggttataggatgatatgctgattctgtttaattatgttgattttgcttatatatattcaatagagtaatttagtcccacttcggcgtggcggg

SEQ ID NO: 219234 - DNA, 3114 bp, Zea Mays
ctcccaacccaccttctgcctggctgccttctgcctccccttcggctccggtccttcctctcaagtcccacacccgtgtcccaccgcaccggccctcaagcagggcagggcagggcagctacctccaagtctccaaccccccaaccccaacagacgggacgccgcctcgtgtccggcacgccgttccctcccgtccccgctccttcccctcgctaaaacccatcgaatcgaccgacgcacgtcctgacactcctgctcccctgtcgccaccgcgtcgcgcgcgggcagaggcctctctcgccatctcgcggccgcggcaccccacagctatcctaccacccgacctcccaccaccgccgccgccgccggcctgctcccaaccacaagtccaggaggacgccccttcgatccgccgcagggaggcaggcgcccgcgcccccgccccccgccaggctccatctccggatccgatcgcccgccggctcggttcaatccgtttacttaattatactgaccttctcatatggcgttggatccgtgatgcctcctccattcctgaagctatttggaattcattgcctgaatcagtgttctgaagtgctatctaacagtcagaaatggatggatccgagcttgaaaatcctacttctagaagctcatcccagaaatctagccgacgttcgagtagtaggcgttctcaaaagtcagctggacagcattctttgaccggtgctcaagagaaaagaagcaaatcgaaatcttcaaggcagaaacacttggttattgacgacaaagaggctaaaaaagggaaaaaacatgaccacaaaattgacgtggcagatgagaggtccaattttctaggttatgaagtgtatgctggaaagctgattcttcaaaagaaaaatagaagtgcgagtgataataatcagttaccgtcaaacggaaaagctgatgcaattgatgctagactcacaagtaaagctctgatctggggcagctctgtactcctactggaggatgttgtctctgtatcatataattctggagtcaaacattttacattgcatgcatactcaactaaaaagtctttatttaaaaagacatgcagagttcagaaagatttctgctttatagcctctacccttgacgaggccattttgtgggtgacatgctttgctgaacaaagtatatatgttaacttactacctcgccttggagcatctagtatcaatcaagactcagaaaatcccctcagtgagtctttatttgaccagccaccgattaaatgcaaatctccgcaaagagtacttgttatattgaaccctcgatctggacatggtagatcaagtaaagttttccatgagaaagctgaacctatatttaaggttttcagatggaagttgttaaaactactcatgctgggcatgcaaaatctcttgtatctacatttgatttcagtgcatgccctgatggaatcgtgtgcgtgggtggtgatggaattgtgaatgaggtgctcaatggtcttctcattaggagtgatagagcagaagctgtatcaattccagttggaataattcctgcagggtctgacaactcacttgtctggactgttttgggagttagagatcctatttctgcatcattattaattgttaagggtggtttcacagctctagatatcttggctgtcgagtgggttcaatctgggcaaatacattttggctcaactgtttcatactatggttttgttagtgatgtcctggaactttctgagaaatatcagaagaaatttggtccacttcgatattttgtggctggaatactgaaatttttatgtttgcctagctacttctatgaactggaatatcttccttcgccaaaggagatggccgtgaatggaaaaggtacagatcaagacaaggcccacctgtccaatgtctataccgatgtgatgcacagcagatcaaagaaagaaggaattccaagagcctccagtttgtccagtattgattctattatgactccaagtcggatgtcgcttggggatgttgatacatcaggtagtacagtggcaagcactgaaccatcagactatgtacgtggtctcgatccgaaagcaaaacgcttgtctctgggaagaagtaacattgtttcagaacctgaagaagtgctacaccctcaaccacatcatggatcattctggccaagaaccaggtccaaagcaagggctgatagaaattcagttggtataacgtctactaatgacacacggtcgtcttgggcagccccatcaatgcatgataaggaagacatttcctcaacaatatcagacccaggacctatttgggactgtgaaccaaagtgggacacagggccaaaatgggatagtgagctaacttgggagcctgaccaccccattgaacttcctggaccacaagaggacatgggaattggagcaccgatggaacttgtgccaaatttggatgagaaatgggtagttaggaaagggcactttcttggtgtcctagtatgcaaccattcatgcatgacagtgcaaagtctgagttcacaggttgttgcaccgaaggccatccatgatgacaacagcttggacttacttttagttggtggaaaaggaagatggaaattgctgagatttttcatacttctgcaattcggtcgccatctctctttgccttacgtcgaatatgtaaaggtgaagtcagttaagcttaaacctggtgcaaacactcacaatggctgtggcatagatggcgagctttgccgtgtcaagggacaggtactctgctccctgcttccggagcaatgcagactgattggccggcgatgtagacaatctatttaagcgctgtgttgaatttcatggatcctggggttctttccacttctaacaaatgtttatataactatactttctgatgggattaagcttgggttggtgttgcaaatgttgagagtttgaaccagaagcaatgttgtgaggtttctgtatatttgagcggttataggatgatatgctgattctgtttaattatgttgattttgcttatatatattcaatagagtaatttagtcccacttcggcgtggcggg

SEQ ID NO: 219235 - DNA, 1395 bp, Zea Mays
tttctgcatcattattaattgttaagggtggtttcacagctctagatatcttggctgtcgagtgggttcaatctgggcaaatacattttggctcaactgtttcatactatggttttgttagtgatgctacttctatgaactggaatatcttccttcgccaaaggagatggccgtgaatggaaaaggtacagatcaagacaaggcccacctgtccaatgtctataccgatgtgatgcacagcagatcaaagaaagaaggaattccaagagcctccagtttgtccagtattgattctattatgactccaagtcggatgtcgcttggggatgttgatacatcaggtagtacagtggcaagcactgaaccatcagactatgtacgtggtctcgatccgaaagcaaaacgcttgtctctgggaagaagtaacattgtttcagaacctgaagaagtgctacaccctcaaccacatcatggatcattctggccaagaaccaggtccaaagcaagggctgatagaaattcagttggtataacgtctactaatgacacacggtcgtcttgggcagccccatcaatgcatgataaggaagacatttcctcaacaatatcagacccaggacctatttgggactgtgaaccaaagtgggacacagggccaaaatgggatagtgagctaacttgggagcctgaccaccccattgaacttcctggaccacaagaggacatgggaattggagcaccgatggaacttgtgccaaatttggatgagaaatgggtagttaggaaagggcactttcttggtgtcctagtatgcaaccattcatgcatgacagtgcaaagtctgagttcacaggttgttgcaccgaaggccatccatgatgacaacagcttggacttacttttagttggtggaaaaggaagatggaaattgctgagatttttcatacttctgcaattcggtcgccatctctctttgccttacgtcgaatatgtaaaggtgaagtcagttaagcttaaacctggtgcaaacactcacaatggctgtggcatagatggcgagctttgccgtgtcaagggacaggtactctgctccctgcttccggagcaatgcagactgattggccggcgatgtagacaatctatttaagcgctgtgttgaatttcatggatcctggggttctttccacttctaacaaatgtttatataactatactttctgatgggattaagcttgggttggtgttgcaaatgttgagagtttgaaccagaagcaatgttgtgaggtttctgtatatttgagcggttataggatgatatgctgattctgtttaattatgttgattttgcttatatatattcaatagagtaatttagtcccacttcggcgtggcggg

SEQ ID NO: 219236 - DNA, 618 bp, Zea Mays
aaaaaattcggtatttgccacgggcaggcagcgagacgatggcaagcctactcaggcgatccgcggtacccgcgcgccagctcctcctcctcctcccgcgccacctcgcagccgccggctccgcccccgcctcgtcccgttcgttttcccgcttccacccccgcgacgacgatgacagctctatgttcgatccaccggagccgccggtgaactggggcatgaacatagttccggagaagaaggctttcgtcgtggagaggttcgggaagtatctcaagaccctcgactccgggttccacctgctgatccccgccgtcgaccgtattgcctacgtgcactcgctcaaggaggagaccatccccattcccgaccagaacgcaatcaccaaggacaacgtcaccatacagatcgacagcgtcatatatatcaagatcatggacccctaccttgcttcctatggtgtggaggatccaatctatgctgtcctacaacttgcacaaacaaccatgagaagtgaacttgggaagataaccttagacaagacttttgaggagagagatgcattaaatgagaaaattgtggaaactgaatgcattgcattagatgatctctaggagg

SEQ ID NO: 219237 - DNA, 1216 bp, Zea Mays
caatggctgtagcaagctcaagaggctgcacaattcacatgcaagatcatggacccctaccttgcttcctatggtgtggaggatccaatctatgctgtcctacaacttgcacaaacaaccatgagaagtgaacttgggaagataaccttagacaagacttttgaggagagagatgcattaaatgagaaaattgtgagtgccatcaatgaagcagccacagattggggcttgaagtgtattcgctatgagatcagggacataactcctccaacagggattaggcaggctatggagatgcaggctgaagcaaaaaggagaaaacgcgcccaaatccttgaatcagaagggaagaaacaggcccaaatccttgaatcagaagggaagaaaactgcccaggtccttgaatctgaaggagctatgttagatctagcaaaccgtgcgaagggtgcggccgaagcaattcttgccaagtcagaagctactgctcgtggaatgagattggtttcagatgcgatgacaactgaaggcagtgccaaggctgctagcctaaaacttgcagagcaatatatcgaagcattctcaaatctagcacaaaagacaaatacaatgctgctcccaggcgacagtgccagcccagcatctttcgtggcccaggcgatgaagacgtatcagcaaatccattcccatagtcaggcattgaagtaccaccctcagatagaagggctggaggaatcaggagagaccagccctgctgctccatcttctgaggcaagcaagacaccaccatttgtcggggaagcagattctaaccataccttctcgctgcaacgcccaagaataagaagtgagcttccctcaagtgcttgaagcccttttcttgtctactgttctgcaacataggagtgtcactgataaacaccagtaggtttagttttctttagtcagagaagctgatgtgcgtcgaaggggatagacccgtaggcatttccatttggtttcgggaagctaaatgcgaccggagagagtttttgattctggtgaagtttatacgttggttccttcatatattttaaaatgaagtttgtaaaaaggcaagacgttggtgaaacaaatcgcacacgatggcaaatgcttagttcatggccactgttgctcttgttttgcgcagctcacttgggtgccgtttggttcccaaaatgtaacgtaaatggtaacg

SEQ ID NO: 219238 - DNA, 2312 bp, Zea Mays
tcatgctgctaataaggttcgatgtatgcggctcgctctaccgagggtggtttgccccttcggacgggcgaataccgaaatgcggacgggcgaataccgaaagacgccttgtgacagcaaacacggaaactgagaacacgagcagaaggcactcgatcgcataggtacagacgtacagtagcacagccgcgcacactaccaccagtcggacacccgccccgagctccggctatggaggaagccgccgccgccgccgctgcttgggcgtctaatgccgccacgcccgtcccatccgagcccatgagatcccctcctgatgctgaagcctccgttgatcctaccgctgttggtgacgatgagcacgactccaaggaggtcgttctgcgcaggtacttcctccaggagtgggagctggtctcagcgatcctccaccgtgtcgtcgccggcggcggcgttgccgaatccgccgatgtccataggatccgctctatcatggacaaatatcaagaagagggtcaactattagagccataccttgagaacattgtttcaccacttatgtcgttggttcggtcaaagacaatggaacttggtgctagtactgatgaacttcttgacattatcaagcctctgtgtatcatcatctacacccttgtcacagtgtgcgggtacaagagtgtcatcagattcttccctcaccaggtttcagatcttgagctcgcagttgctcttcttgagaagtgtcatacaatgagttcagctactgctcttaggcaagagagcacaggagaaatggagactaaatgtgttgttctattgtggctttatatactggtcctgatcccatttgacatatccactgtggatacaagcattgctactgctgataacgtcgatgggcctgaggtcgttccactggtgacaagaatactggacatctgtaaggattatctctccagttctggtccaatgagaaggatgtcaggattattgcttgcaaggctcttgactcgtcctgacatggcaaaagctttcagcagttttatggactgggcacacaagatgttactgtctgtatcagatgactttgttgatcaatttagatccattggtatagtggaagctttagcatcaatatttaagattggtaaccgtagagcactgcatgatgctgtttctggtacttggagtgattgttcacttgtgatgaagactaatgtctcagccaggagtccacttcttagaaaattcctggtgaaactggcccagagagttggtctcatcagcttgcctccacgtttaccatcatggcagtataagtcaattagcagttcgttgggtgcaaacctttcaagttatacagctggagaagtgtattcaagtggatcaagggaacaagttaacattgatcaaataggcatgtgttttttggaagaagatatggatgttccagaaatagcagaagagattatcgacttgctattgactggtttgagggattcagatacaattgtaaggtggtctgctgccaagggaattggtaggataactgcatgtttaacacctgcattgtcggaagatgtgctatcatcaatattgcaacttttttctcctggagagggtgatggctcctggcatggaggctgtttagccttggctgaacttgctcggagagggttattgttaccttctagctttcctgatgttgttcctgttataataaaggctttacactatgatgtaagaagaggtccacatagcattgggtcacatgtaagagatgcagcagcatatgtatgttgggcatttggtcgagcttataccaattatgatatgaaggctgttttggaacaacttgctccccaccttctaaccgttgcttgttatgatcgagaggttaattgtagaagagctgcttctgctgcctttcaagagaatgttggaagacagggaactttcccacatggcattgatattgtgaatacgacagattactttgcactggcttcccgatcaaactcttatctgaatgttgctgtttctgttgctcagtgcaaggagtatctttatccctttgcagatgagctgctttgcaataaaataactcactgggtatataattctctgcaattgtttatggtttaaatgagattgcatctttagtgtttctggtttccacactttttgcctgtgctgcaattgctattaacttcctgagttctacactccttacctggaccgagttctgcactccttaactggaactggtagctgacttgggaaactgaagttaaaatcattagcaatgtaaa

SEQ ID NO: 219239 - DNA, 2375 bp, Zea Mays
taaggttcgatgtatgcggctcgctctaccgagggtggtttgccccttcggacgggcgaataccgaaatgcggacgggcgaataccgaaagacgccttgtgacagcaaacacggaaactgagaacacgagcagaaggcactcgatcgcataggtacagacgtacagtagcacagccgcgcacactaccaccagtcggacacccgccccgagctccggctatggaggaagccgccgccgccgccgctgcttgggcgtctaatgccgccacgcccgtcccatccgagcccatgagatcccctcctgatgctgaagcctccgttgatcctaccgctgttggtgacgatgagcacgactccaaggaggtcgttctgcgcaggtacttcctccaggagtgggagctggtctcagcgatcctccaccgtgtcgtcgccggcggcggcgttgccgaatccgccgatgtccataggatccgctctatcatggacaaatatcaagaagagggtcaactattagagccataccttgagaacattgtttcaccacttatgtcgttggttcggtcaaagacaatggaacttggtgctagtactgatgaacttcttgacattatcaagcctctgtgtatcatcatctacacccttgtcacagtgtgcgggtacaagagtgtcatcagattcttccctcaccaggtttcagatcttgagctcgcagttgctcttcttgagaagtgtcatacaatgagttcagctactgctcttaggcaagagagcacaggagaaatggagactaaatgtgttgttctattgtggctttatatactggtcctgatcccatttgacatatccactgtggatacaagcattgctactgctgataacgtcgatgggcctgaggtcgttccactggtgacaagaatactggacatctgtaaggattatctctccagttctggtccaatgagaaggatgtcaggattattgcttgcaaggctcttgactcgtcctgacatggcaaaagctttcagcagttttatggactgggcacacaagatgttactgtctgtatcagatgactttgttgatcaatttagatccattggtatagtggaagctttagcatcaatatttaaggagctttttgcacacacaattattttttgtggttatcaacagggaatgggatgtgagcatttggtttcacaattacataccgctaatttagtttgatgtcttccttttggttcctcttgttgcagattggtaaccgtagagcactgcatgatgctgtttctggtacttggagtgattgttcacttgtgatgaagactaatgtctcagccaggagtccacttcttagaaaattcctggtgaaactggcccagagagttggtctcatcagcttgcctccacgtttaccatcatggcagtataagtcaattagcagttcgttgggtgcaaacctttcaagttatacagctggagaagtgtattcaagtggatcaagggaacaagttaacattgatcaaataggcatgtgttttttggaagaagatatggatgttccagaaatagcagaagagattatcgacttgctattgactggtttgagggattcagatacaattgtaaggtggtctgctgccaagggaattggtaggataactgcatgtttaacacctgcattgtcggaagatgtgctatcatcaatattgcaacttttttctcctggagagggtgatggctcctggcatggaggctgtttagccttggctgaacttgctcggagagggttattgttaccttctagctttcctgatgttgttcctgttataataaaggagaactgcacatcatattatattaagaagagaaaggggggaggcaaatagatccaggatacaacaaccatctcatggaggccaaaaacagagacaaaaaactattcataagaaaactataaaactaccacatcctgttattctcaagcggggcaaggagataggagatccctttatccctagcttattgccagagacgacgctcatctctagcctgagtaagagcaagggtgagatttggtgcaagtccgtcaaacacgcaccggttatggtagttctagataatccaagcgcccatgatgataagagacttaatccttgttgtgcttgcccgttaaccgcaactgaaacagacctccaccactccaagaagcttggagcatcaggctgagataaggactggagacgaacaaaacaaggccaatttgctgctgaaattagatattacaagggcttttgattctgtttcttggccttttttgattgaggtcatgaagaagctgggttttaggcaaatttggagagctttgatatgtg

SEQ ID NO: 219240 - DNA, 2278 bp, Zea Mays
cgaataccgaaagacgccttgtgacagcaaacacggaaactgagaacacgagcagaaggcactcgatcgcataggtacagacgtacagtagcacagccgcgcacactaccaccagtcggacacccgccccgagctccggctatggaggaagccgccgccgccgccgctgcttgggcgtctaatgccgccacgcccgtcccatccgagcccatgagatcccctcctgatgctgaagcctccgttgatcctaccgctgttggtgacgatgagcacgactccaaggaggtcgttctgcgcaggtacttcctccaggagtgggagctggtctcagcgatcctccaccgtgtcgtcgccggcggcggcgttgccgaatccgccgatgtccataggatccgctctatcatggacaaatatcaagaagagggtcaactattagagccataccttgagaacattgtttcaccacttatgtcgttggttcggtcaaagacaatggaacttggtgctagtactgatgaacttcttgacattatcaagcctctgtgtatcatcatctacacccttgtcacagtgtgcgggtacaagagtgtcatcagattcttccctcaccaggtttcagatcttgagctcgcagttgctcttcttgagaagtgtcatacaatgagttcagctactgctcttaggcaagagagcacaggagaaatggagactaaatgtgttgttctattgtggctttatatactggtcctgatcccatttgacatatccactgtggatacaagcattgctactgctgataacgtcgatgggcctgaggtcgttccactggtgacaagaatactggacatctgtaaggattatctctccagttctggtccaatgagaaggatgtcaggattattgcttgcaaggctcttgactcgtcctgacatggcaaaagctttcagcagttttatggactgggcacacaagatgttactgtctgtatcagatgactttgttgatcaatttagatccattggtatagtggaagctttagcatcaatatttaagattggtaaccgtagagcactgcatgatgctgtttctggtacttggagtgattgttcacttgtgatgaagactaatgtctcagccaggagtccacttcttagaaaattcctggtgaaactggcccagagagttggtctcatcagcttgcctccacgtttaccatcatggcagtataagtcaattagcagttcgttgggtgcaaacctttcaagttatacagctggagaagtgtattcaagtggatcaagggaacaagttaacattgatcaaataggcatgtgttttttggaagaagatatggatgttccagaaatagcagaagagattatcgacttgctattgactggtttgagggattcagtatgttcttatccttatattatgctgtgaagttttgacttgttctccagaacgtggatacaattgtaaggtggtctgctgccaagggaattggtaggataactgcatgtttaacacctgcattgtcggaagatgtgctatcatcaatattgcaacttttttctcctggagagggtgatggctcctggcatggaggctgtttagccttggctgaacttgctcggagagggttattgttaccttctagctttcctgatgttgttcctgttataataaaggctttacactatgatgtaagaagaggtccacatagcattgggtcacatgtaagagatgcagcagcatatgtatgttgggcatttggtcgagcttataccaattatgatatgaaggctgttttggaacaacttgctccccaccttctaaccgttgcttgttatgatcgagaggttaattgtagaagagctgcttctgctgcctttcaagagaatgttggaagacagggaactttcccacatggcattgatattgtgaatacgacagattactttgcactggcttcccgatcaaactcttatctgaatgttgctgtttctgttgctcagtgcaaggagtatctttatccctttgcagatgagctgctttgcaataaaataactcactgggtatataattctctgcaattgtttatggtttaaatgagattgcatctttagtgtttctggtttccacactttttgcctgtgctgcaattgctattaacttcctgagttctacactccttacctggaccgagttctgcactccttaactggaactggtagctgacttgggaaactgaagttaaaatcattagcaatgtaaa

SEQ ID NO: 219241 - DNA, 2139 bp, Zea Mays
cggaaactgagaacacgagcagaaggcactcgatcgcataggtacagacgtacagtagcacagccgcgcacactaccaccagtcggacacccgccccgagctccggctatggaggaagccgccgccgccgccgctgcttgggcgtctaatgccgccacgcccgtcccatccgagcccatgagatcccctcctgatgctgaagcctccgttgatcctaccgctgttggtgacgatgagcacgactccaaggaggtcgttctgcgcaggtacttcctccaggagtgggagctggtctcagcgatcctccaccgtgtcgtcgccggcggcggcgttgccgaatccgccgatgtccataggatccgctctatcatggacaaatatcaagaagagggtcaactattagagccataccttgagaacattgtttcaccacttatgtcgttggttcggtcaaagacaatggaacttggtgctagtactgatgaacttcttgacattatcaagcctctgtgtatcatcatctacacccttgtcacagtgtgcgggtacaagagtgtcatcagattcttccctcaccaggtttcagatcttgagctcgcagttgctcttcttgagaagtgtcatacaatgagttcagctactgctcttaggcaagagagcacaggagaaatggagactaaatgtgttgttctattgtggctttatatactggtcctgatcccatttgacatatccactgtggatacaagcattgctactgctgataacgtcgatgggcctgaggtcgttccactggtgacaagaatactggacatctgtaaggattatctctccagttctggtccaatgagaaggatgtcaggattattgcttgcaaggctcttgactcgtcctgacatggcaaaagctttcagcagttttatggactgggcacacaagatgttactgtctgtatcagatgactttgttgatcaatttagatccattggtatagtggaagctttagcatcaatatttaagattggtaaccgtagagcactgcatgatgctgtttctggtacttggagtgattgttcacttgtgatgaagactaatgtctcagccaggagtccacttcttagaaaattcctggtgaaactggcccagagagttggtctcatcagcttgcctccacgtttaccatcatggcagtataagtcaattagcagttcgttgggtgcaaacctttcaagttatacagctggagaagtgtattcaagtggatcaagggaacaagttaacattgatcaaataggcatgtgttttttggaagaagatatggatgttccagaaatagcagaagagattatcgacttgctattgactggtttgagggattcagatacaattgtaaggtggtctgctgccaagggaattggtaggataactgcatgtttaacacctgcattgtcggaagatgtgctatcatcaatattgcaacttttttctcctggagagggtgatggctcctggcatggaggctgtttagccttggctgaacttgctcggagagggttattgttaccttctagctttcctgatgttgttcctgttataataaaggagaactgcacatcatattatattaagaagagaaaggggggaggcaaatagatccaggatacaacaaccatctcatggaggccaaaaacagagacaaaaaactattcataagaaaactataaaactaccacatcctgttattctcaagcggggcaaggagataggagatccctttatccctagcttattgccagagacgacgctcatctctagcctgagtaagagcaagggtgagatttggtgcaagtccgtcaaacacgcaccggttatggtagttctagataatccaagcgcccatgatgataagagacttaatccttgttgtgcttgcccgttaaccgcaactgaaacagacctccaccactccaagaagcttggagcatcaggctgagataaggactggagacgaacaaaacaaggccaatttgctgctgaaattagatattacaagggcttttgattctgtttcttggccttttttgattgaggtcatgaagaagctgggttttaggcaaatttggagagctttgatatgtg

SEQ ID NO: 219242 - DNA, 2958 bp, Zea Mays
cggaaactgagaacacgagcagaaggcactcgatcgcataggtacagacgtacagtagcacagccgcgcacactaccaccagtcggacacccgccccgagctccggctatggaggaagccgccgccgccgccgctgcttgggcgtctaatgccgccacgcccgtcccatccgagcccatgagatcccctcctgatgctgaagcctccgttgatcctaccgctgttggtgacgatgagcacgactccaaggaggtcgttctgcgcaggtacttcctccaggagtgggagctggtctcagcgatcctccaccgtgtcgtcgccggcggcggcgttgccgaatccgccgatgtccataggatccgctctatcatggacaaatatcaagaagagggtcaactattagagccataccttgagaacattgtttcaccacttatgtcgttggttcggtcaaagacaatggaacttggtgctagtactgatgaacttcttgacattatcaagcctctgtgtatcatcatctacacccttgtcacagtgtgcgggtacaagagtgtcatcagattcttccctcaccaggtttcagatcttgagctcgcagttgctcttcttgagaagtgtcatacaatgagttcagctactgctcttaggcaagagagcacaggagaaatggagactaaatgtgttgttctattgtggctttatatactggtcctgatcccatttgacatatccactgtggatacaagcattgctactgctgataacgtcgatgggcctgaggtcgttccactggtgacaagaatactggacatctgtaaggattatctctccagttctggtccaatgagaaggatgtcaggattattgcttgcaaggctcttgactcgtcctgacatggcaaaagctttcagcagttttatggactgggcacacaagatgttactgtctgtatcagatgactttgttgatcaatttagatccattggtatagtggaagctttagcatcaatatttaagattggtaaccgtagagcactgcatgatgctgtttctggtacttggagtgattgttcacttgtgatgaagactaatgtctcagccaggagtccacttcttagaaaattcctggtgaaactggcccagagagttggtctcatcagcttgcctccacgtttaccatcatggcagtataagtcaattagcagttcgttgggtgcaaacctttcaagttatacagctggagaagtgtattcaagtggatcaagggaacaagttaacattgatcaaataggcatgtgttttttggaagaagatatggatgttccagaaatagcagaagagattatcgacttgctattgactggtttgagggattcagtatgttcttatccttatattatgctgtgaagttttgacttgttctccagaacgtggtagtaatatttacccagttatatgatcttttatattgtaccccatttttattttctttctctttgcttgccggctaatatcttcttttccccacaagggccttcacctgccagtctacctccactgcatttcatatcttaataaatacataacattgcctagattgtcctgtactggagcaaaaacacacacagccttttattgtttggatttctagaattattcgacaatataactgaactttaaatccattaatcaattagtggtttgattgctaaaaatcgagttggtgaaatttttctgtgtagattcctgtatgctactatggtttgtgaacatggttgcttcatacaatcaacacaactgcctctaactctaaggacataaatgcaggattaatggtggtatctgaattgaaataagctctcctgactgtgtatatgagaaactatgtacacaatttgaagtcatgattcactgcttcatgtacttaggaaaacagtagggagtctggtctttgtacttgctattatgtttttttttgcatgttaaaataccaaagtattattgggccatgaaatgcaaatactatcatttgtcttcccagatgaagttatactaagagataagttttttagttattcatctttcccatttatagcctcaaacactgctgtttttgaaaggcgaacactctttgattctgtgtcaggatacaattgtaaggtggtctgctgccaagggaattggtaggataactgcatgtttaacacctgcattgtcggaagatgtgctatcatcaatattgcaacttttttctcctggagagggtgatggctcctggcatggaggctgtttagccttggctgaacttgctcggagagggttattgttaccttctagctttcctgatgttgttcctgttataataaaggctttacactatgatgtaagaagaggtccacatagcattgggtcacatgtaagagatgcagcagcatatgtatgttgggcatttggtcgagcttataccaattatgatatgaaggctgttttggaacaacttgctccccaccttctaaccgttgcttgttatgatcgagaggttaattgtagaagagctgcttctgctgcctttcaagagaatgttggaagacagggaactttcccacatggcattgatattgtgaatacgacagattactttgcactggcttcccgatcaaactcttatctgaatgttgctgtttctgttgctcagtgcaaggagtatctttatccctttgcagatgagctgctttgcaataaaataactcactgggtatataattctctgcaattgtttatggtttaaatgagattgcatctttagtgtttctggtttccacactttttgcctgtgctgcaattgctattaacttcctgagttctacactccttacctggaccgagttctgcactccttaactggaactggtagctgacttgggaaactgaagttaaaatcattagcaatgtaaa

SEQ ID NO: 219243 - DNA, 2086 bp, Zea Mays
cggaaactgagaacacgagcagaaggcactcgatcgcataggtacagacgtacagtagcacagccgcgcacactaccaccagtcggacacccgccccgagctccggctatggaggaagccgccgccgccgccgctgcttgggcgtctaatgccgccacgcccgtcccatccgagcccatgagatcccctcctgatgctgaagcctccgttgatcctaccgctgttggtgacgatgagcacgactccaaggaggtcgttctgcgcaggtacttcctccaggagtgggagctggtctcagcgatcctccaccgtgtcgtcgccggcggcggcgttgccgaatccgccgatgtccataggatccgctctatcatggacaaatatcaagaagagggtcaactattagagccataccttgagaacattgtttcaccacttatgtcgttggttcggtcaaagacaatggaacttggtgctagtactgatgaacttcttgacattatcaagcctctgtgtatcatcatctacacccttgtcacagtgtgcgggtacaagagtgtcatcagattcttccctcaccaggtttcagatcttgagctcgcagttgctcttcttgagaagtgtcatacaatgagttcagctactgctcttaggcaagagagcacaggagaaatggagactaaatgtgttgttctattgtggctttatatactggtcctgatcccatttgacatatccactgtggatacaagcattgctactgctgataacgtcgatgggcctgaggtcgttccactggtgacaagaatactggacatctgtaaggattatctctccagttctggtccaatgagaaggatgtcaggattattgcttgcaaggctcttgactcgtcctgacatggcaaaagctttcagcagattggtaaccgtagagcactgcatgatgctgtttctggtacttggagtgattgttcacttgtgatgaagactaatgtctcagccaggagtccacttcttagaaaattcctggtgaaactggcccagagagttggtctcatcagcttgcctccacgtttaccatcatggcagtataagtcaattagcagttcgttgggtgcaaacctttcaagttatacagctggagaagtgtattcaagtggatcaagggaacaagttaacattgatcaaataggcatgtgttttttggaagaagatatggatgttccagaaatagcagaagagattatcgacttgctattgactggtttgagggattcagatacaattgtaaggtggtctgctgccaagggaattggtaggataactgcatgtttaacacctgcattgtcggaagatgtgctatcatcaatattgcaacttttttctcctggagagggtgatggctcctggcatggaggctgtttagccttggctgaacttgctcggagagggttattgttaccttctagctttcctgatgttgttcctgttataataaaggctttacactatgatgtaagaagaggtccacatagcattgggtcacatgtaagagatgcagcagcatatgtatgttgggcatttggtcgagcttataccaattatgatatgaaggctgttttggaacaacttgctccccaccttctaaccgttgcttgttatgatcgagaggttaattgtagaagagctgcttctgctgcctttcaagagaatgttggaagacagggaactttcccacatggcattgatattgtgaatacgacagattactttgcactggcttcccgatcaaactcttatctgaatgttgctgtttctgttgctcagtgcaaggagtatctttatccctttgcagatgagctgctttgcaataaaataactcactgggtatataattctctgcaattgtttatggtttaaatgagattgcatctttagtgtttctggtttccacactttttgcctgtgctgcaattgctattaacttcctgagttctacactccttacctggaccgagttctgcactccttaactggaactggtagctgacttgggaaactgaagttaaaatcattagcaatgtaaa

SEQ ID NO: 219244 - DNA, 915 bp, Zea Mays
ccactactataagcttcttacggatataaaatcattgaagaagatgcaaggttcatgtgcttaccttttcaccaatagcaccctggattagggtcatgtcggcagatatgctggagactacttgtccagtagtcatttctacatcaaagaatggcatatcctgtctgaggaccgacttgagatacaatgatcgaatacgagtagcctgcctctccccagtcattgtccaacatgatatctctggacttgcagactatatatagcttgcatagggggcagtaccttgctgactcggggaacaatggtgtccggggtggcgcccccaaaggcatcgaccatctgcccgaagatgatcgtcatgaccaccatcgacatgccgttgcccagcgccccaaccatgccggccagcatcagcagaacgtccgttctgtcggcacacttaaacatgctgtggaacggaaccttagccattgtcaccatcttctcgccactctcctccactttcccacccttcactgcatcgccagcggaagcttttacgacgctttcttctgccatgtcgtgcttggctgcctagcaccggctgggttctccctgctgcatatggctccggctgctctgctctatggagagttccttttgtagtgccgttctacaagcaacttgctttgcaggagctgtttgcctgttttctcgctttttctttatgttagctggatttgcaagaacgataatggcacagacaagcgtccaaactgactgacagaggtgctgggttcactgtggagtatcccgttgtaccgtagttgcttgcaagcattttttttaaaattaataatgtcgtgatctgttatccttagcttcagtcggcattcgagtcaaatctgttagattagttatgtttgatgcgacgat

SEQ ID NO: 219245 - DNA, 841 bp, Zea Mays
gcaggtttgttgaaattatggcaactgtattctcaagggatgcatggcgctgtgtatggcatatgattcagaacgacttggtccatggatggggccttgattttgctcttaggaaatgtgtggagccagcccatgagaaaattggagtggttgactcccagtggattgttcatcaagtcatcccttcgcttggtaaccagggcaaggcagagaatggaaaagcaccatgggaaggggttagagcacgctgtcgtaaagaatgggggatgttccaaacaaggttgactgatgctgagaaagcatattacttggagcacgggatcacaccaccaaaatcgacggtagcttagctgcacgcaccgacagtagcttagctgcactgcatgcctgcatacaggcacctcgcgagtcacgccaaggtttctgttttgtgaacctagcgccttcctgtccgataagcaactgactctgtagagatgcagcaccacagccagatttgtacagaatcgatgtacgtttttactcttcttaatcttctttacttgttttcaaccgtagcgacgagagtagctcttgtgtaagtaaccgatttagcatgaatccggtggctcttttttttttgatatattgcccaaatgcaatatcgatatggtcatttcgtttcattgttttaataacaagcaaatggttgctttgggacagcccttgtgccttcagtgcctcattttcatgctctagccagttatcagaatgacagccctgaaacatcttgctgcatagccagatgcaaacagttatccacatatggtgtggtgtgattagttgcttgcattacccatca

SEQ ID NO: 219246 - DNA, 1546 bp, Zea Mays
ccactgccttgttctttcttgctccgctccccacgcgtacgcgctctcgtggcgacgactgggtgatcgccgccgccgccgccgccaccacgcaccaccaggccttcaccggcgacaaacaccaccaacagatttatgttccaacaaaccctaaaggtgctgaaaggcttccaccgggcattgtagtgtctgaaacagacctttatctccggagattgtggggtgaacctagtgaggatcttactaccaaaccaagataccttgttacatttacagtgggatactctcaaaaggcaaacattgatgcagcggtgaaaaagttttcagataacttcacaattatgttgttccattatgatggtcggacaactgagtgggatgaatttgagtggtcaaaaagggccgtccatgtgagtgtcacaaagcaaaccaaatggtggtatgccaaacgatttctacatcctgacattgttgcccgctacgactacatatttatctgggatgaagatcttggtgtcgaacattttaatgcagaggcgtacattaagcttgttaggaagcatgggcttgagatctctcagcctggtttggagcccgataaaggtttgacatggcaaatgactaaacgaagaggtgatcaggaagtccacaaagtaactgaggagagacctggctggtgtagcgaccctcacctgccaccatgtgcagcgtttgttgaaattatggcaactgtattctcaagggatgcatggcgctgtgtatggcatatgattcagaacgacttggtccatggatggggccttgattttgctcttaggaaatgtgtggagccagcccatgagaaaattggagtggttgactcccagtggattgttcatcaagtcatcccttcgcttggtaaccagggcaaggcagagaatggaaaagcaccatgggaaggggttagagcacgctgtcgtaaagaatgggggatgttccaaacaaggttgactgatgctgagaaagcatattacttggagcacgggatcacaccaccaaaatcgacggtagcttagctgcacgcaccgacagtagcttagctgcactgcatgcctgcatacaggcacctcgcgagtcacgccaaggtttctgttttgtgaacctagcgccttcctgtccgataagcaactgactctgtagagatgcagcaccacagccagatttgtacagaatcgatgtacgtttttactcttcttaatcttctttacttgttttcaaccgtagcgacgagagtagctcttgtgtaagtaaccgatttagcatgaatccggtggctcttttttttttgatatattgcccaaatgcaatatcgatatggtcatttcgtttcattgttttaataacaagcaaatggttgctttgggacagcccttgtgccttcagtgcctcattttcatgctctagccagttatcagaatgacagccctgaaacatcttgctgcatagccagatgcaaacagttatccacatatggtgtggtgtgattagttgcttgcattacccatca

SEQ ID NO: 219247 - DNA, 1893 bp, Zea Mays
cccgttctgggttttacccctgcgccactgccttgttctttcttgctccgctccccacgcgtacgcgctctcgtggcgacgactgggtgatcgccgccgccgccgccgccaccacgcaccaccaggccttcaccggcgacaaacaccaccaacagacacaagtgcttcagtcattatagtgccagtaccattctgccagcgagttcctttgccacaaaaagataacactcggatatctcatggcaaaacctgggattttaggccgcagtgcacagagatcaaatgagggcatgcgaatcatattctcagcagttattggtgttatgctagggtacttgtttggcatttccttccctaccgttaatataacaaagcttcacttcccttccagcattatctcctatatcgaggacagaaactctggcatcacaacccaaacattattgaatcatgcatggacgtctgcagctactcataagaagaacaattcagcttctaactctgatgaaattcctaagatttatgttccaacaaaccctaaaggtgctgaaaggcttccaccgggcattgtagtgtctgaaacagacctttatctccggagattgtggggtgaacctagtgagtgggatactctcaaaaggcaaacattgatgcagcggtgaaaaagttttcagataacttcacaattatgttgttccattatgatggtcggacaactgagtgggatgaatttgagtggtcaaaaagggccgtccatgtgagtgtcacaaagcaaaccaaatggtggtatgccaaacgatttctacatcctgacattgttgcccgctacgactacatatttatctgggatgaagatcttggtgtcgaacattttaatgcagaggcgtacattaagcttgttaggaagcatgggcttgagatctctcagcctggtttggagcccgataaaggtttgacatggcaaatgactaaacgaagaggtgatcaggaagtccacaaagtaactgaggagagacctggctggtgtagcgaccctcacctgccaccatgtgcagcgtttgttgaaattatggcaactgtattctcaagggatgcatggcgctgtgtatggcatatgattcagaacgacttggtccatggatggggccttgattttgctcttaggaaatgtgtggagccagcccatgagaaaattggagtggttgactcccagtggattgttcatcaagtcatcccttcgcttggtaaccagggcaaggcagagaatggaaaagcaccatgggaaggggttagagcacgctgtcgtaaagaatgggggatgttccaaacaaggttgactgatgctgagaaagcatattacttggagcacgggatcacaccaccaaaatcgacggtagcttagctgcacgcaccgacagtagcttagctgcactgcatgcctgcatacaggcacctcgcgagtcacgccaaggtttctgttttgtgaacctagcgccttcctgtccgataagcaactgactctgtagagatgcagcaccacagccagatttgtacagaatcgatgtacgtttttactcttcttaatcttctttacttgttttcaaccgtagcgacgagagtagctcttgtgtaagtaaccgatttagcatgaatccggtggctcttttttttttgatatattgcccaaatgcaatatcgatatggtcatttcgtttcattgttttaataacaagcaaatggttgctttgggacagcccttgtgccttcagtgcctcattttcatgctctagccagttatcagaatgacagccctgaaacatcttgctgcatagccagatgcaaacagttatccacatatggtgtggtgtgattagttgcttgcattacccatca

SEQ ID NO: 219248 - DNA, 2068 bp, Zea Mays
caactacagcaccggacccgttctgggttttacccctgcgccactgccttgttctttcttgctccgctccccacgcgtacgcgctctcgtggcgacgactgggtgatcgccgccgccgccgccgccaccacgcaccaccaggccttcaccggcgacaaacaccaccaacagacacaagtgcttcagtcattatagtgccagtaccattctgccagcgagttcctttgccacaaaaagataacactcggatatctcatggcaaaacctgggattttaggccgcagtgcacagagatcaaatgagggcatgcgaatcatattctcagcagttattggtgttatgctagggtacttgtttggcatttccttccctaccgttaatataacaaagcttcacttcccttccagcattatctcctatatcgaggacagaaactctggcatcacaacccaaacattattgaatcatgcatggacgtctgcagctactcataagaagaacaattcagcttctaactctgatgaaattcctaagatttatgttccaacaaaccctaaaggtgctgaaaggcttccaccgggcattgtagtgtctgaaacagacctttatctccggagattgtggggtgaacctagtgaggatcttactaccaaaccaagataccttgttacatttacagtgggatactctcaaaaggcaaacattgatgcagcggtgaaaaagttttcagataacttcacaattatgttgttccattatgatggtcggacaactgagtgggatgaatttgagtggtcaaaaagggccgtccatgtgagtgtcacaaagcaaaccaaatggtgagttgttcttttgtgtgtttgcaatgatcaggcccccattagaatgcaggatgccgcccgccctccattcttgtgtttttatggaaatgaaccggttcctgtcatcctgtgaatttcctaaacaattcctatgaattttctgcgttccaaaggggcccctcagtctctatgcatttgtccatcaaagatcttggtgtcgaacattttaatgcagaggcgtacattaagcttgttaggaagcatgggcttgagatctctcagcctggtttggagcccgataaaggtttgacatggcaaatgactaaacgaagaggtgatcaggaagtccacaaagtaactgaggagagacctggctggtgtagcgaccctcacctgccaccatgtgcagcgtttgttgaaattatggcaactgtattctcaagggatgcatggcgctgtgtatggcatatgattcagaacgacttggtccatggatggggccttgattttgctcttaggaaatgtgtggagccagcccatgagaaaattggagtggttgactcccagtggattgttcatcaagtcatcccttcgcttggtaaccagggcaaggcagagaatggaaaagcaccatgggaaggggttagagcacgctgtcgtaaagaatgggggatgttccaaacaaggttgactgatgctgagaaagcatattacttggagcacgggatcacaccaccaaaatcgacggtagcttagctgcacgcaccgacagtagcttagctgcactgcatgcctgcatacaggcacctcgcgagtcacgccaaggtttctgttttgtgaacctagcgccttcctgtccgataagcaactgactctgtagagatgcagcaccacagccagatttgtacagaatcgatgtacgtttttactcttcttaatcttctttacttgttttcaaccgtagcgacgagagtagctcttgtgtaagtaaccgatttagcatgaatccggtggctcttttttttttgatatattgcccaaatgcaatatcgatatggtcatttcgtttcattgttttaataacaagcaaatggttgctttgggacagcccttgtgccttcagtgcctcattttcatgctctagccagttatcagaatgacagccctgaaacatcttgctgcatagccagatgcaaacagttatccacatatggtgtggtgtgattagttgcttgcattacccatca

SEQ ID NO: 219249 - DNA, 1967 bp, Zea Mays
cggatccagtgcaggctgtgcagtacaactacagcaccggacccgttctgggttttacccctgcgccactgccttgttctttcttgctccgctccccacgcgtacgcgctctcgtggcgacgactgggtgatcgccgccgccgccgccgccaccacgcaccaccaggccttcaccggcgacaaacaccaccaacagacacaagtgcttcagtcattatagtgccagtaccattctgccagcgagttcctttgccacaaaaagataacactcggatatctcatggcaaaacctgggattttaggccgcagtgcacagagatcaaatgagggcatgcgaatcatattctcagcagttattggtgttatgctagggtacttgtttggcatttccttccctaccgttaatataacaaagcttcacttcccttccagcattatctcctatatcgaggacagaaactctggcatcacaacccaaacattattgaatcatgcatggacgtctgcagctactcataagaagaacaattcagcttctaactctgatgaaattcctaagatttatgttccaacaaaccctaaaggtgctgaaaggcttccaccgggcattgtagtgtctgaaacagacctttatctccggagattgtggggtgaacctagtgaggatcttactaccaaaccaagataccttgttacatttacagtgggatactctcaaaaggcaaacattgatgcagcggtgaaaaagataacttcacaattatgttgttccattatgatggtcggacaactgagtgggatgaatttgagtggtcaaaaagggccgtccatgtgagtgtcacaaagcaaaccaaatggtggtatgccaaacgatttctacatcctgacattgttgcccgctacgactacatatttatctgggatgaagatcttggtgtcgaacattttaatgcagaggcgtacattaagcttgttaggaagcatgggcttgagatctctcagcctggtttggagcccgataaaggtttgacatggcaaatgactaaacgaagaggtgatcaggaagtccacaaagtaactgaggagagacctggctggtgtagcgaccctcacctgccaccatgtgcagcgtttgttgaaattatggcaactgtattctcaagggatgcatggcgctgtgtatggcatatgattcagaacgacttggtccatggatggggccttgattttgctcttaggaaatgtgtggagccagcccatgagaaaattggagtggttgactcccagtggattgttcatcaagtcatcccttcgcttggtaaccagggcaaggcagagaatggaaaagcaccatgggaaggggttagagcacgctgtcgtaaagaatgggggatgttccaaacaaggttgactgatgctgagaaagcatattacttggagcacgggatcacaccaccaaaatcgacggtagcttagctgcacgcaccgacagtagcttagctgcactgcatgcctgcatacaggcacctcgcgagtcacgccaaggtttctgttttgtgaacctagcgccttcctgtccgataagcaactgactctgtagagatgcagcaccacagccagatttgtacagaatcgatgtacgtttttactcttcttaatcttctttacttgttttcaaccgtagcgacgagagtagctcttgtgtaagtaaccgatttagcatgaatccggtggctcttttttttttgatatattgcccaaatgcaatatcgatatggtcatttcgtttcattgttttaataacaagcaaatggttgctttgggacagcccttgtgccttcagtgcctcattttcatgctctagccagttatcagaatgacagccctgaaacatcttgctgcatagccagatgcaaacagttatccacatatggtgtggtgtgattagttgcttgcattacccatca

SEQ ID NO: 219250 - DNA, 2008 bp, Zea Mays
tccagctctgctgcaagcctttcgacggatccagtgcaggctgtgcagtacaactacagcaccggacccgttctgggttttacccctgcgccactgccttgttctttcttgctccgctccccacgcgtacgcgctctcgtggcgacgactgggtgatcgccgccgccgccgccgccaccacgcaccaccaggccttcaccggcgacaaacaccaccaacagacacaagtgcttcagtcattatagtgccagtaccattctgccagcgagttcctttgccacaaaaagataacactcggatatctcatggcaaaacctgggattttaggccgcagcagtgcacagagatcaaatgagggcatgcgaatcatattctcagcagttattggtgttatgctagggtacttgtttggcatttccttccctaccgttaatataacaaagcttcacttcccttccagcattatctcctatatcgaggacagaaactctggcatcacaacccaaacattattgaatcatgcatggacgtctgcagctactcataagaagaacaattcagcttctaactctgatgaaattcctaagatttatgttccaacaaaccctaaaggtgctgaaaggcttccaccgggcattgtagtgtctgaaacagacctttatctccggagattgtggggtgaacctagtgaggatcttactaccaaaccaagataccttgttacatttacagtgggatactctcaaaaggcaaacattgatgcagcggtgaaaaagttttcagataacttcacaattatgttgttccattatgatggtcggacaactgagtgggatgaatttgagtggtcaaaaagggccgtccatgtgagtgtcacaaagcaaaccaaatggtggtatgccaaacgatttctacatcctgacattgttgcccgctacgactacatatttatctgggatgaagatcttggtgtcgaacattttaatgcagaggcgtacattaagcttgttaggaagcatgggcttgagatctctcagcctggtttggagcccgataaaggtttgacatggcaaatgactaaacgaagaggtgatcaggaagtccacaaagtaactgaggagagacctggctggtgtagcgaccctcacctgccaccatgtgcagcgtaggagtttgttgaaattatggcaactgtattctcaagggatgcatggcgctgtgtatggcatatgattcagaacgacttggtccatggatggggccttgattttgctcttaggaaatgtgtggagccagcccatgagaaaattggagtggttgactcccagtggattgttcatcaagtcatcccttcgcttggtaaccagggcaaggcagagaatggaaaagcaccatgggaaggggttagagcacgctgtcgtaaagaatgggggatgttccaaacaaggttgactgatgctgagaaagcatattacttggagcacgggatcacaccaccaaaatcgacggtagcttagctgcacgcaccgacagtagcttagctgcactgcatgcctgcatacaggcacctcgcgagtcacgccaaggtttctgttttgtgaacctagcgccttcctgtccgataagcaactgactctgtagagatgcagcaccacagccagatttgtacagaatcgatgtacgtttttactcttcttaatcttctttacttgttttcaaccgtagcgacgagagtagctcttgtgtaagtaaccgatttagcatgaatccggtggctcttttttttttgatatattgcccaaatgcaatatcgatatggtcatttcgtttcattgttttaataacaagcaaatggttgctttgggacagcccttgtgccttcagtgcctcattttcatgctctagccagttatcagaatgacagccctgaaacatcttgctgcatagccagatgcaaacagttatccacatatggtgtggtgtgattagttgcttgcattacccatca

SEQ ID NO: 219251 - DNA, 1541 bp, Zea Mays
atttcggtccggcgggatcgaaactctcgcacccgagagccctttatatccgctagggtttacgcgcatttttgctcctcactgccgcgccgccaccctctacagataaggaagaggaggagggcaggatgtcgcaccgtaagttcgagcacccgaggcacggctccctcggcttccttcccaggaagcgctcctcccgtcaccgcggcaaggtcattccctagggatgacgccaagaagccttgccatctcactgccttccttggctacaaggctggcatgactcacattgtccgtgaggttgagaagccaggatccaaactccataagaaggaaacttgtgaggctgttaccatcattgaaacccctcctcttgtcattgttgggctcgtggcatatgtgaagactcctcgtggcctccgcacactcaactctgtttgggcccaacatcttagcgaagaagtgaggagaaggttctacaagaactggtgcaagagcaagaagaaggctttcacaaagtatgctctcaaatatgaaaatgatgctggcaagaaggaaattcagctgcagcttgagaagatgaagaaatatgcttctgttatccgtgtcattgctcatacccagattaggaagatgaagggtttgaagcagaagaaggctcacctgatggagattcaggtcaatggtggtaccattgctgacaaggtggactatggctacaaattctttgagaaagaggtccctgttgatgctgtcttccagaaggatgagatgattgacatcattggtgtgaccaaggggaaaggttatgagggtgtggtcactcgttggggtgtcacccggcttccccgcaagacccacaggggtctccgcaaagttgcttgtatcggtgcatggcatccggctagggtctcctatacggttgctcgtgctggtcagaatgggtaccaccaccgcactgagatgaacaagaaggtttacaagatcggcaaggctggacaagagacccacgatgcctccacagagtttgacaggactgagaaggacatcactcccatgggtggcttcccccattatggtatcgtgaagggtgactacctgatgatcaagggctgctgtgtgggtccaaagaagagggtggtgaccctccgccagtccctcctgaagcagacttcccggctggcgctggaggagatcaagctcaagttcatcgacacatcgtccaaatttgggcacggtcgcttccagactaccgatgagaagcagaggttctttggcaagctcaaggcgtaaggtgctgcggtgcagcgaagtcccatttctcaaaatcatcaaactgtgatacttttgtttgtaaccttgctgtaccaagttttgtagccatggtccagtcgtctatggattgttccatgcttcagaactgcactgtctatgttttgtgctattttggttgtttaatgccccaatcattgcatatagattctaattgttttggtgtttgatgatcaatataactatttatactaattgtgtttccgaag

SEQ ID NO: 219252 - DNA, 1521 bp, Zea Mays
cacacagggcatttcggttcggggcatttcggtccggcgggatcgaaactctcgcacccgagagccctttatatccgctagggtttacgcgcatttttgctcctcactgccgcgccgccaccctctacagataaggaagaggaggagggcaggatgtcgcaccgtaagttcgagcacccgaggcacggctcagtcattccctagggatgacgccaagaagccttgccatctcactgccttccttggctacaaggctggcatgactcacattgtccgtgaggttgagaagccaggatccaaactccataagaaggaaacttgtgaggctgttaccatcattgaaacccctcctcttgtcattgttgggctcgtggcatatgtgaagactcctcgtggcctccgcacactcaactctgtttgggcccaacatcttagcgaagaagtgaggagaaggttctacaagaactggtgcaagagcaagaagaaggctttcacaaagtatgctctcaaatatgaaaatgatgctggcaagaaggaaattcagctgcagcttgagaagatgaagaaatatgcttctgttatccgtgtcattgctcatacccagattaggaagatgaagggtttgaagcagaagaaggctcacctgatggagattcaggtcaatggtggtaccattgctgacaaggtggactatggctacaaattctttgagaaagaggtccctgttgatgctgtcttccagaaggatgagatgattgacatcattggtgtgaccaaggggaaaggttatgagggtgtggtcactcgttggggtgtcacccggcttccccgcaagacccacaggggtctccgcaaagttgcttgtatcggtgcatggcatccggctagggtctcctatacggttgctcgtgctggtcagaatgggtaccaccaccgcactgagatgaacaagaaggtttacaagatcggcaaggctggacaagagacccacgatgcctccacagagtttgacaggactgagaaggacatcactcccatgggtggcttcccccattatggtatcgtgaagggtgactacctgatgatcaagggctgctgtgtgggtccaaagaagagggtggtgaccctccgccagtccctcctgaagcagacttcccggctggcgctggaggagatcaagctcaagttcatcgacacatcgtccaaatttgggcacggtcgcttccagactaccgatgagaagcagaggttctttggcaagctcaaggcgtaaggtgctgcggtgcagcgaagtcccatttctcaaaatcatcaaactgtgatacttttgtttgtaaccttgctgtaccaagttttgtagccatggtccagtcgtctatggattgttccatgcttcagaactgcactgtctatgttttgtgctattttggttgtttaatgccccaatcattgcatatagattctaattgttttggtgtttgatgatcaatataactatttatactaattgtgtttccgaag

SEQ ID NO: 219253 - DNA, 1861 bp, Zea Mays
aggaaattcaatcatctcttcaatccttggagcttaaaacaaatgaagatgctcatgtggttgaagacgatgtagaggaaacaaaacgacatttgaatgtggttttcattggccatgttgatgctggaaaatcaactaccggaggacaaatattgtttttgagtggtcaagttgatgataggaccatccagaaatatgagaaggaagcaaaggataaaagtcgggaaagttggtatatggcttacatcatggacacaaatgaggaagaaagggttaagggaaagactgttgaagttggtagggcccactttgagacagaacacacaagattcactatcttggatgcaccgggtcacaaaagttatgttccaaatatgataagtggtgcatctcaagctgacattggtgttctggtcatatctgctcgaaaaggtgaattcgaaacaggttatgaaagaggaggacagacccgtgaacatgtactacttgcaaaaactttgggtgttgctaagctggtagttgtaataaataagatggacgaacctactgttaaatggtctaaggaaaggtatgatgagattgaagcaaaaatggttccattcctcaaatcttcagggtacaatgttaagaaagatgtgcaattcttgccaatatctggtcttgtgggaaccaatatgaaaaccaggatggataaaagcatttgtagttggtgggatggcccatgtctttttgaagttctggaccgtattgtagttcctttacgtgaccccaaaggttcagtaaggatgccgattattgataaatataaggatatgggcactgttgcaatgggcaaaatagagtctggcactatcagagagggtgacagtttgttggttatgccaaacaagtcccatgtgaaagtcattggtttgaacttggatgagagcaaagtacgtcgtgctggacctgctgagaatgtccgtgttaaattgtctggagttgaagaggaggatgtaatggctggttttgtactttcaagtgttgctaatcctgttggtgccgttagtgaattcattgctcagttgcagattttagagttgcttgacaatgctattttcactgccggctacaaagctgtgttgcatattcactctgttgtcgaagagtgtgagattgttgagctcatagaggaaattggcatgaagaaaaagaaagaagaagatccaaagaagaaaaagccaaagaggaagcctctttttgtgaagaacggtgcaattgttgtttgccgcattcaggtgaataacttgatatgcatagagaagttctctgatttccctcagcttggaaggtttacacttagaactgaaggaaagacggtagctgtaggcaaagttgttgatattccgcctgctggtagcccaacattctgagcttaagtcaattttgaacaggatggataatcatgaagcagtgcgttcgcttaagatacttttttttgggaagtgagattagttgttgaggttagattttttttcagtccatcttgagaatggtctatgcctttatggtttaggctagcaagtcttagattggttgcataaaattacatctctggttacatgtgaggttgtaaaatcagtatggaattatggatgagtgtaccaaccttaatgtacccgttcaagattatggtggtatctttgcgtacaatgctgtaactatccatttttttttgtgtgtgtgtgaagttaaatataagatgaccacacgtggacaggccgcattaggcctcattcgtttatgtgggattgtaccggaatcattccactccacattattcctcatttcagttgttcaaagtttatataagggtgcgttt

SEQ ID NO: 219254 - DNA, 1160 bp, Zea Mays
ctgcctttatagttcttctttcatggaaagtgacatgcttaatgaaattgttgctatttgctaacccggacatgtacattcaggtgtcaaggaaattcaatcatctcttcaatccttggagcttaaaacaaatgatgctcatgtggttgaagacgatgtagaggaaacaaaacgacatttgaatgtggttttcattggccatgttgatgctggaaaatcaactaccggaggacaaatattgtttttgagtggtcaagttgatgataggaccatccagaaatatgagaaggaagcaaaggataaaagtcgggaaagttggtatatggcttacatcatggacacaaatgaggaagaaagggttaagggaaagactgttgaagttggtagggcccactttgagacagaacacacaagattcactatcttggatgcaccgggtcacaaaagttatgttccaaatatgataagtggtgcatctcaagctgacattggtgttctggtcatatctgctcgaaaaggtgaattcgaaacaggttatgaaagaggaggacagacccgtgaacatgtactacttgcaaaaactttgggtgttgctaagctggtagttgtaataaataagatggacgaacctactgttaaatggtctaaggaaagacggtagctgtaggcaaagttgttgatattccgcctgctggtagcccaacattctgagcttaagtcaattttgaacaggatggataatcatgaagcagtgcgttcgcttaagatacttttttttgggaagtgagattagttgttgaggttagattttttttcagtccatcttgagaatggtctatgcctttatggtttaggctagcaagtcttagattggttgcataaaattacatctctggttacatgtgaggttgtaaaatcagtatggaattatggatgagtgtaccaaccttaatgtacccgttcaagattatggtggtatctttgcgtacaatgctgtaactatccatttttttttgtgtgtgtgtgaagttaaatataagatgaccacacgtggacaggccgcattaggcctcattcgtttatgtgggattgtaccggaatcattccactccacattattcctcatttcagttgttcaaagtttatataagggtgcgttt

SEQ ID NO: 219255 - DNA, 653 bp, Zea Mays
atgctgttgatagcgttgatcaggagaccggcccaggcccatagaacaagcgggtttatggataactgcgtcccttctttcaaaacatctccgagaagaagtttcgctagaccaccaacgaggaacgattcatggaagacggttggatctatcacaaggccaaggccatcacttggaggcaagacgaagcccagcagcagaagaacgaatcccaaggaaaacccggccaatggtccagcagccgctagcttcagtaggtcctcacggttgcggacgatattgacgattctggtaatcccgccgaaagatcctatctgccagctaggaacaaaatatggcacgccgagcttgattccactttccctggcagcaaggatatgtccaatttcgtgcacccctattataaggccagttactagagcaccggatagtccgtctttcaacaactcaagttctcctgtagaacaggtacatttcgaagtagcagagtgaagatggtaactaatccaaatgcagcagcagcaaaccattctgggaccgctgtagtttcaggctgtaatgtctgcttgggtataaccacagcaactggcttctcatcctctgggttgatgagaagaaaaagcttatattcatcaccaaatttgttctgttga

SEQ ID NO: 219256 - DNA, 1137 bp, Zea Mays
atggagttgaggaatcgactcactgaattgaagagaaaaactgccgtagacaagacagaggtcgagcaggcatcgagtgatcttaaggcaaaaactgtgccattgaatttggctcttgtcacgctaaaaaagagacgagctgatgcagtggccatgcacaccaatgccatgaaagttgctcagatgaatctcatggcaaccacctcagattgtatgaaaatgcaatcaaaatctgtaaagcaactttgcagattgttcccaatgcgacgaaacgatcagaatgtttttatggggtcaagtaaagataactttcatggaatgtcaaaaactggagaacagttccttgctggagtgtatcatcaccttccgtcaatattggcatttaccgctcctcacccaaacagctacgaccggattcagccagatacttggagtggagcttatctatgctgggggaaagagaacaaggaggctccattaagaaccgcatgcccacctgaatcaaacccttctgatcactcttcaaaactgaaaaggctaccgcagaacctgcaggaatctgtagaatcactttctgcagataaggttttgcatgagttaattggtgataaacttgtcacaactgctatagttatacggaagggttttatcctcctatataagaagttcaaatggataaataataaaggcagtttggttgacatgaacaaacctcctgaaatgatatctggcaatatgaaggtagggtcagcaaactcgtttgaaagaaaaagacctagaaagggaactcttggccaagcttttggtgtacttgtgcacagctcaagagcacttgctgagccagaggcagctactccaggggacataattatattggatctgagcacctgctccttggactgcttcgtgagggtgaaggttattcgaatgattggtgagaccaccgaagctgttggtgctagagttggcggcggcagcagtggtaataagatgccaactcttgaggagtatggaactaatttaacaaaattagcagaggagggaaaattagatcctgttgttggaaggcagccacaaattgagcatgtcataccgcacattcacaagtctctaatcaacaagtcatccaaagagtga

SEQ ID NO: 219257 - DNA, 1877 bp, Zea Mays
tccctttctccctccaatgccagcgcatccctcttccccctcgtggctcgcggtcgccgctggcgttcctgctccgggccttccacatggtgatgggcgacctgagcacctccgacgacctcgccacgcgccaccacctcacccaccgtccacccatcacctttcctgtaaacctcggcgacctcctcctcaatctcatgatgttgtcctgcaagtctcccccgagccctctcctcaagccctaccacgcccagctaggccacaacagcgccaagatctaggccatgtctccaacttagcaacttattgcagcacaacacgagatctggatggtctgcatcgttgccaccgtggcgcgcaccgagcaggaggacgaggtgccagccctgaccgaccaggcggcccacatagaggtgcgcacacggaggtttactaggtcgacgactacgtctaggtgttcgtcgtggcgtgtactgacctcatcaaccggctccagggcctacgcgagaacctcacgaacgtgaggtctgagtgttttaggtgtcttcagctaggccctgcagagcatccttgttttctcacgttgccatattcagatctctttgattgacacatgacatctgggttttgaggccaagtacatccttaatctcgtgttacttagccccaaacaagcaagtacaaccactatgacagaggctgttatgggagttctgaccagcaagcttggtgtggccttagcaaaaggggcagcagcctatggtgcatctctggatttcaaggaagcgtctactcaatgattttttaaatatctcctgcattcacatagcctcagcctcacatgtatgtggccttgaacagaattgatggataatcactattcaagcactctgctccacagtatcttgtcttggcaccttaacatatgacgacactaattgaagaacaacaaattttgactgaagacgttgacgtggaatcttctgtgccaataggagcaaataaacaaacaggttcgttttctggagtggcctgatgatttggagggttttgttctaaaaggctatggtgagtctgtcattgctcaaggatgttgtccagtcaatggaagaaacaatcaatagctagagaaggccacactacaaaacatcattgagcgcagaaacacgacatggtgctaggtcacaaggtgatgaagacatccacactactgatgcatctataccaatacaagtaccaatttctggtcccattactcgcgctcgtgctcgtcaactcaaccatcaggtgattacactcttgagttcatgtccatcatatttagaccatggagacccgtgcactcttgttttgcttaggaatcagggagaagaccgaaagggaaaaggatttgaacatgctggattcggactgcagaagaacaccaacttgtgacggtcaccacggtcagatgcgggctcggattggaatgttcaagcacaacatggaaagcttatcaagtctactttcatatggatccggaattatagtcatatctgttctgaggccgccgtaatcattgttttcttaccgagacatttcctgccttttctgcctatggtgctgcgtcaccctattttggcccaatgggtcgtatatcaagttaggtccattagggacgcatcctagggttgcagcacgaccccaatacccttgtggtcgtcctcccatgtttataaaccccctagccgccaccaagaacagcgggttttgtttagatcaagtttagctctcgctacttgcttgcaagcgcgcgtgctagttcagccgcccgtcttcttgtcttcggaaccccaccatattggagtttgatttttaaacctacatttggatctggt

SEQ ID NO: 219258 - DNA, 1822 bp, Zea Mays
ctccaatgccagcgcatccctcttccccctcgtggctcgcggtcgccgctggcgttcctgctccgggccttccacatggtgatgggcgacctgagcacctccgacgacctcgccacgcgccaccacctcacccaccgtccacccatcacctttcctgtaaacctcggcgacctcctcctcaatctcatgatgttgtcctgcaagtctcccccgagccctctcctcaagccctaccacgcccagctaggccacaacagcgccaagatctaggccatgtctccaacttagcaacttattgcagcacaacacgagatctggatggtctgcatcgttgccaccgtggcgcgcaccgagcaggaggacgaggtgccagccctgaccgaccaggcggcccacatagaggtgcgcacacggaggtttactaggtcgacgactacgtctaggtgttcgtcgtggcgtgtactgacctcatcaaccggctccagggcctacgcgagaacctcacgaacgtgaggtctgagattcttcacctgaaaacaagatctctttgattgacacatgacatctgggttttgaggccaagtacatccttaatctcgtgttacttagccccaaacaagcaagtacaaccactatgacagaggctgttatgggagttctgaccagcaagcttggtgtggccttagcaaaaggggcagcagcctatggtgcatctctggatttcaaggaagcgtctactcaatgattttttaaatatctcctgcattcacatagcctcagcctcacatgtatgtggccttgaacagaattgatggataatcactattcaagcactctgctccacagtatcttgtcttggcaccttaacatatgacgacactaattgaagaacaacaaattttgactgaagacgttgacgtggaatcttctgtgccaataggagcaaataaacaaacaggttcgttttctggagtggcctgatgatttggagggttttgttctaaaaggctatggtgagtctgtcattgctcaaggatgttgtccagtcaatggaagaaacaatcaatagctagagaaggccacactacaaaacatcattgagcgcagaaacacgacatggtgctaggtcacaaggtgatgaagacatccacactactgatgcatctataccaatacaagtaccaatttctggtcccattactcgcgctcgtgctcgtcaactcaaccatcaggtgattacactcttgagttcatgtccatcatatttagaccatggagacccgtgcactcttgttttgcttaggaatcagggagaagaccgaaagggaaaaggatttgaacatgctggattcggactgcagaagaacaccaacttgtgacggtcaccacggtcagatgcgggctcggattggaatgttcaagcacaacatggaaagcttatcaagtctactttcatatggatccggaattatagtcatatctgttctgaggccgccgtaatcattgttttcttaccgagacatttcctgccttttctgcctatggtgctgcgtcaccctattttggcccaatgggtcgtatatcaagttaggtccattagggacgcatcctagggttgcagcacgaccccaatacccttgtggtcgtcctcccatgtttataaaccccctagccgccaccaagaacagcgggttttgtttagatcaagtttagctctcgctacttgcttgcaagcgcgcgtgctagttcagccgcccgtcttcttgtcttcggaaccccaccatattggagtttgatttttaaacctacatttggatctggt

SEQ ID NO: 219259 - DNA, 2790 bp, Zea Mays
ccagcatataaaaagccggagcctgattggaccgagcactgccctcccacgctccactcccgacacctgttccgtttaaaatctccggcgtcgacgtggccgcgtgcgcagccacaaaccctccctcccgccgcaattaacaatccgctaatcagctcggcgcagcccgaaccctccctctaatcgcccgctaaaccgctccctccctccgccaaaaggccagtccgggggcttttcctatctccacttgttggcgacttggtagtagactcgcggatacgatccttctagacacttcgacgcgcccgttataaaggccggcgcatccgggccatgaccacacagccccttgctcattggctagggcggggaaggaaattgcgggaggatgcgaagccattggtgtattgcatatggtggcaccaagcatgaggcaggaactgcattacttgcaagaaagtcacaaaatccattgcaagatcatacttgtggctttcttgcaagttgtgcagttgttgcctcaagcttgctgcctccctttgccagagctatcggtaaaacaggaagtactgtcagtttccgagctacaaacaagctataagtttagaaaaataatttagaaatgtacaacaaagtctagtaatacattgttaaagataaatcaatactcaataagttcctcatgctttggatttggggataacatacctgttttatttacatgctaatatttggaccaacaaaaaataccttaggaacagccatttgagaaaaaaacaaagccttttagtcctaagcaagttagcatagcttagagttgcaacttctacatgagcacaataaacagaaaagaaagagaaaaggaaaataaatatatatggcaccaaaagctattaccatgttataatataaatttaatgaccgaaattataaacatttttacaatcttagcaaacctctcaacgtgtagtctgaatcgacagaacatcagtagagtaatttttgttacatttatagtccccaatgtcgtttcaaggcaaagtttgtttggtttctctgttttcctaaacactggcttctcaattgcattctcaatgtgcatctgtactagtttgacatctgtggctattgtgattcttcctggaatatcatctgtccatcacctttaaagcataacattaccctgatggccatgtgatctgtaggtccctagaaaggaaaatcgtgatttggaaaggaaattcatcaacaaacctgagtcggaaggatgcttaggaagcgggtactccctatgttccagattatagttcatttagatttgatgattcaatcaattatttctggggtggtctacagccaatgcatagtctctatctgtgtgtgtgttttgtgtttcccgtgcactctattcctttcgagaggcactctatgtcaggtgcctgaaatatggtttagcttcaggcaatgaagtggacgtcggatggagatccgagtgtccacgatgacagagaccgggttttgaatctctcgtctctccatctctcatgcgttcccaacttccaactccaatgccgtctccgctggctgatcagtgatcacctctgaccctctctggtgatgtgtacccattgttaatctctccaatgaagctaccctgcctgaccaggcccacaggctgtctcctgcatacggtggcaacacaccaacactgctggcctgccctaagacacatcttcgcgttgcgtccactggatacctgctttcttagtcagcagcatgccgaaaccctccatttgtgaaacctcagcggtgataggcggtggttgtcgaacgctggcatgaaggtgtgagctcccaactgctgaatcgtgttcctcttttacatgcacgtgtccaacaagaaccaagaaccgagattagcgctacctcagtacactgccggtgcaagataaacgaaggaagctgggattgcatggcactgcggtctgttatgtagccgtggaacagcaagacaaaaagacatggatattccttgtttggattggggtgtttgatccagaaacagtctcattgctaattgtttcattattactacaaatcttggtcgaggcgtgaatatccttgctcttgatataattatagtattttgaatccctattgtgttttttacttaagtgataaatgttgcaaagaaaccattagataattgttgaatgattagttattgattacattgattgattttgatttaatgaatcttaaataaaccagaagattcatgtgtatgaatatttgtgttgggaatttcttggtcacatgttttccgcataataatatcataaaactgtggaatgaaacagcttttgcatattccgctataactttttatagcacccctatcaaatttatggggtgtttggcatgcaaaactcgagtcaaatatttcaactcaagagttacaagttttgtggagtttctaggagctctattacaactttttggagggtctttttgttgctggtatgtaatattttaaaaagcaacatagatatagaaactatctaaacaatcattgccactagttatagactctagagcaaagctgttgtactaaaagtttatagagtagagccgctctagggtggagcagaatcaatgctaaacacgtctttattgttatttttacactagttagatctattttgaaaggttagctctagtctctttctatgctaacaaattttaacaatataccaacttctcccaatagaaagggagcgtcttagcaaa

SEQ ID NO: 219260 - DNA, 2710 bp, Zea Mays
tgccctcccacgctccactcccgacacctgttccgtttaaaatctccggcgtcgacgtggccgcgtgcgcagccacaaaccctccctcccgccgcaattaacaatccgctaatcagctcggcgcagcccgaaccctccctctaatcgcccgctaaaccgctccctccctccgccaaaaggccagtccgggggcttttcctatctccacttgttggcgacttggtagtagactcgcggatacgatccttctagacacttcgacgcgcccgttataaaggccggcgcatccgggccatgaccacacagccccttgctcattggctagggcggggaaggaaattgcgggaggatgcgaagccattggtgtattgcatatggtggcaccaagcatgaggcaggaactgcattacttgcaagaaagtcacaaaatccattgcaagatcatacttgtggctttcttgcaagttgtgcagttgttgcctcaagcttgctgcctccctttgccagagctatcggtaaaacaggaagtactgtcagtttccgagctacaaacaagctataagtttagaaaaataatttagaaatgtacaacaaagtctagtaatacattgttaaagataaatcaatactcaataagttcctcatgctttggatttggggataacatacctgttttatttacatgctaatatttggaccaacaaaaaataccttaggaacagccatttgagaaaaaaacaaagccttttagtcctaagcaagttagcatagcttagagttgcaacttctacatgagcacaataaacagaaaagaaagagaaaaggaaaataaatatatatggcaccaaaagctattaccatgttataatataaatttaatgaccgaaattataaacatttttacaatcttagcaaacctctcaacgtgtagtctgaatcgacagaacatcagtagagtaatttttgttacatttatagtccccaatgtcgtttcaaggcaaagtttgtttggtttctctgttttcctaaacactggcttctcaattgcattctcaatgtgcatctgtactagtttgacatctgtggctattgtgattcttcctggaatatcatctgtccatcacctttaaagcataacattaccctgatggccatgtgatctgtaggtccctagaaaggaaaatcgtgatttggaaaggaaattcatcaacaaacctgagtcggaaggatgcttaggaagcgggattcaatcaattatttctggggtggtctacagccaatgcatagtctctatctgtgtgtgtgttttgtgtttcccgtgcactctattcctttcgagaggcactctatgtcaggtgcctgaaatatggtttagcttcaggcaatgaagtggacgtcggatggagatccgagtgtccacgatgacagagaccgggttttgaatctctcgtctctccatctctcatgcgttcccaacttccaactccaatgccgtctccgctggctgatcagtgatcacctctgaccctctctggtgatgtgtacccattgttaatctctccaatgaagctaccctgcctgaccaggcccacaggctgtctcctgcatacggtggcaacacaccaacactgctggcctgccctaagacacatcttcgcgttgcgtccactggatacctgctttcttagtcagcagcatgccgaaaccctccatttgtgaaacctcagcggtgataggcggtggttgtcgaacgctggcatgaaggtgtgagctcccaactgctgaatcgtgttcctcttttacatgcacgtgtccaacaagaaccaagaaccgagattagcgctacctcagtacactgccggtgcaagataaacgaaggaagctgggattgcatggcactgcggtctgttatgtagccgtggaacagcaagacaaaaagacatggatattccttgtttggattggggtgtttgatccagaaacagtctcattgctaattgtttcattattactacaaatcttggtcgaggcgtgaatatccttgctcttgatataattatagtattttgaatccctattgtgttttttacttaagtgataaatgttgcaaagaaaccattagataattgttgaatgattagttattgattacattgattgattttgatttaatgaatcttaaataaaccagaagattcatgtgtatgaatatttgtgttgggaatttcttggtcacatgttttccgcataataatatcataaaactgtggaatgaaacagcttttgcatattccgctataactttttatagcacccctatcaaatttatggggtgtttggcatgcaaaactcgagtcaaatatttcaactcaagagttacaagttttgtggagtttctaggagctctattacaactttttggagggtctttttgttgctggtatgtaatattttaaaaagcaacatagatatagaaactatctaaacaatcattgccactagttatagactctagagcaaagctgttgtactaaaagtttatagagtagagccgctctagggtggagcagaatcaatgctaaacacgtctttattgttatttttacactagttagatctattttgaaaggttagctctagtctctttctatgctaacaaattttaacaatataccaacttctcccaatagaaagggagcgtcttagcaaa

SEQ ID NO: 219261 - DNA, 2844 bp, Zea Mays
gctccactcccgacacctgttccgtttaaaatctccggcgtcgacgtggccgcgtgcgcagccacaaaccctccctcccgccgcaattaacaatccgctaatcagctcggcgcagcccgaaccctccctctaatcgcccgctaaaccgctccctccctccgccaaaaggccagtccgggggcttttcctatctccacttgttggcgacttggtagtagactcgcggatacgatccttctagacacttcgacgcgcccgttataaaggccggcgcatccgggccatgaccacacagccccttgctcattggctagggcggggaaggaaattgcgggaggatgcgaagccattggtgtattgcatatggtggcaccaagcatgaggcaggaactgcattacttgcaagaaagtcacaagctcattccaatctgattctctaaactttggaggtctcttacacctaggcctgaaagctcctctcccattagttgcctacaacattggaaaagagtttctcacattatcttagaatccattgcaagatcatacttgtggctttcttgcaagttgtgcagttgttgcctcaagcttgctgcctccctttgccagagctatcggtaaaacaggaagtactgtcagtttccgagctacaaacaagctataagtttagaaaaataatttagaaatgtacaacaaagtctagtaatacattgttaaagataaatcaatactcaataagttcctcatgctttggatttggggataacatacctgttttatttacatgctaatatttggaccaacaaaaaataccttaggaacagccatttgagaaaaaaacaaagccttttagtcctaagcaagttagcatagcttagagttgcaacttctacatgagcacaataaacagaaaagaaagagaaaaggaaaataaatatatatggcaccaaaagctattaccatgttataatataaatttaatgaccgaaattataaacatttttacaatcttagcaaacctctcaacgtgtagtctgaatcgacagaacatcagtagagtaatttttgttacatttatagtccccaatgtcgtttcaaggcaaagtttgtttggtttctctgttttcctaaacactggcttctcaattgcattctcaatgtgcatctgtactagtttgacatctgtggctattgtgattcttcctggaatatcatctgtccatcacctttaaagcataacattaccctgatggccatgtgatctgtaggtccctagaaaggaaaatcgtgatttggaaaggaaattcatcaacaaacctgagtcggaaggatgcttaggaagcgggtactccctatgttccagattatagttcatttagatttgatgattcaatcaattatttctggggtggtctacagccaatgcatagtctctatctgtgtgtgtgttttgtgtttcccgtgcactctattcctttcgagaggcactctatgtcaggtgcctgaaatatggtttagcttcaggcaatgaagtggacgtcggatggagatccgagtgtccacgatgacagagaccgggttttgaatctctcgtctctccatctctcatgcgttcccaacttccaactccaatgccgtctccgctggctgatcagtgatcacctctgaccctctctggtgatgtgtacccattgttaatctctccaatgaagctaccctgcctgaccaggcccacaggctgtctcctgcatacggtggcaacacaccaacactgctggcctgccctaagacacatcttcgcgttgcgtccactggatacctgctttcttagtcagcagcatgccgaaaccctccatttgtgaaacctcaggcggtggttgtcgaacgctggcatgaaggtgtgagctcccaactgctgaatcgtgttcctcttttacatgcacgtgtccaacaagaaccaagaaccgagattagcgctacctcagtacactgccggtgcaagataaacgaaggaagctgggattgcatggcactgcggtctgttatgtagccgtggaacagcaagacaaaaagacatggatattccttgtttggattggggtgtttgatccagaaacagtctcattgctaattgtttcattattactacaaatcttggtcgaggcgtgaatatccttgctcttgatataattatagtattttgaatccctattgtgttttttacttaagtgataaatgttgcaaagaaaccattagataattgttgaatgattagttattgattacattgattgattttgatttaatgaatcttaaataaaccagaagattcatgtgtatgaatatttgtgttgggaatttcttggtcacatgttttccgcataataatatcataaaactgtggaatgaaacagcttttgcatattccgctataactttttatagcacccctatcaaatttatggggtgtttggcatgcaaaactcgagtcaaatatttcaactcaagagttacaagttttgtggagtttctaggagctctattacaactttttggagggtctttttgttgctggtatgtaatattttaaaaagcaacatagatatagaaactatctaaacaatcattgccactagttatagactctagagcaaagctgttgtactaaaagtttatagagtagagccgctctagggtggagcagaatcaatgctaaacacgtctttattgttatttttacactagttagatctattttgaaaggttagctctagtctctttctatgctaacaaattttaacaatataccaacttctcccaatagaaagggagcgtcttagcaaa

SEQ ID NO: 219262 - DNA, 2689 bp, Zea Mays
ctccactcccgacacctgttccgtttaaaatctccggcgtcgacgtggccgcgtgcgcagccacaaaccctccctcccgccgcaattaacaatccgctaatcagctcggcgcagcccgaaccctccctctaatcgcccgctaaaccgctccctccctccgccaaaaggccagtccgggggcttttcctatctccacttgttggcgacttggtagtagactcgcggatacgatccttctagacacttcgacgcgcccgttataaaggccggcgcatccgggccatgaccacacagccccttgctcattggctagggcggggaaggaaattgcgggaggatgcgaagccattggtgtattgcatatggtggcaccaagcatgaggcaggaactgcattacttgcaagaaagtcacaaaatccattgcaagatcatacttgtggctttcttgcaagttgtgcagttgttgcctcaagcttgctgcctccctttgccagagctatcggtaaaacaggaagtactgtcagtttccgagctacaaacaagctataagtttagaaaaataatttagaaatgtacaacaaagtctagtaatacattgttaaagataaatcaatactcaataagttcctcatgctttggatttggggataacatacctgttttatttacatgctaatatttggaccaacaaaaaataccttaggaacagccatttgagaaaaaaacaaagccttttagtcctaagcaagttagcatagcttagagttgcaacttctacatgagcacaataaacagaaaagaaagagaaaaggaaaataaatatatatggcaccaaaagctattaccatgttataatataaatttaatgaccgaaattataaacatttttacaatcttagcaaacctctcaacgtgtagtctgaatcgacagaacatcagtagagtaatttttgttacatttatagtccccaatgtcgtttcaaggcaaagtttgtttggtttctctgttttcctaaacactggcttctcaattgcattctcaatgtgcatctgtactagtttgacatctgtggctattgtgattcttcctggaatatcatctgtccatcacctttaaagcataacattaccctgatggccatgtgatctgtaggtccctagaaaggaaaatcgtgatttggaaaggaaattcatcaacaaacctgagtcggaaggatgcttaggaagcgggattcaatcaattatttctggggtggtctacagccaatgcatagtctctatctgtgtgtgtgttttgtgtttcccgtgcactctattcctttcgagaggcactctatgtcaggtgcctgaaatatggtttagcttcaggcaatgaagtggacgtcggatggagatccgagtgtccacgatgacagagaccgggttttgaatctctcgtctctccatctctcatgcgttcccaacttccaactccaatgccgtctccgctggctgatcagtgatcacctctgaccctctctggtgatgtgtacccattgttaatctctccaatgaagctaccctgcctgaccaggcccacaggctgtctcctgcatacggtggcaacacaccaacactgctggcctgccctaagacacatcttcgcgttgcgtccactggatacctgctttcttagtcagcagcatgccgaaaccctccatttgtgaaacctcaggcggtggttgtcgaacgctggcatgaaggtgtgagctcccaactgctgaatcgtgttcctcttttacatgcacgtgtccaacaagaaccaagaaccgagattagcgctacctcagtacactgccggtgcaagataaacgaaggaagctgggattgcatggcactgcggtctgttatgtagccgtggaacagcaagacaaaaagacatggatattccttgtttggattggggtgtttgatccagaaacagtctcattgctaattgtttcattattactacaaatcttggtcgaggcgtgaatatccttgctcttgatataattatagtattttgaatccctattgtgttttttacttaagtgataaatgttgcaaagaaaccattagataattgttgaatgattagttattgattacattgattgattttgatttaatgaatcttaaataaaccagaagattcatgtgtatgaatatttgtgttgggaatttcttggtcacatgttttccgcataataatatcataaaactgtggaatgaaacagcttttgcatattccgctataactttttatagcacccctatcaaatttatggggtgtttggcatgcaaaactcgagtcaaatatttcaactcaagagttacaagttttgtggagtttctaggagctctattacaactttttggagggtctttttgttgctggtatgtaatattttaaaaagcaacatagatatagaaactatctaaacaatcattgccactagttatagactctagagcaaagctgttgtactaaaagtttatagagtagagccgctctagggtggagcagaatcaatgctaaacacgtctttattgttatttttacactagttagatctattttgaaaggttagctctagtctctttctatgctaacaaattttaacaatataccaacttctcccaatagaaagggagcgtcttagcaaa

SEQ ID NO: 219263 - DNA, 2730 bp, Zea Mays
ctccactcccgacacctgttccgtttaaaatctccggcgtcgacgtggccgcgtgcgcagccacaaaccctccctcccgccgcaattaacaatccgctaatcagctcggcgcagcccgaaccctccctctaatcgcccgctaaaccgctccctccctccgccaaaaggccagtccgggggcttttcctatctccacttgttggcgacttggtagtagactcgcggatacgatccttctagacacttcgacgcgcccgttataaaggccggcgcatccgggccatgaccacacagccccttgctcattggctagggcggggaaggaaattgcgggaggatgcgaagccattggtgtattgcatatggtggcaccaagcatgaggcaggaactgcattacttgcaagaaagtcacaaaatccattgcaagatcatacttgtggctttcttgcaagttgtgcagttgttgcctcaagcttgctgcctccctttgccagagctatcggtaaaacaggaagtactgtcagtttccgagctacaaacaagctataagtttagaaaaataatttagaaatgtacaacaaagtctagtaatacattgttaaagataaatcaatactcaataagttcctcatgctttggatttggggataacatacctgttttatttacatgctaatatttggaccaacaaaaaataccttaggaacagccatttgagaaaaaaacaaagccttttagtcctaagcaagttagcatagcttagagttgcaacttctacatgagcacaataaacagaaaagaaagagaaaaggaaaataaatatatatggcaccaaaagctattaccatgttataatataaatttaatgaccgaaattataaacatttttacaatcttagcaaacctctcaacgtgtagtctgaatcgacagaacatcagtagagtaatttttgttacatttatagtccccaatgtcgtttcaaggcaaagtttgtttggtttctctgttttcctaaacactggcttctcaattgcattctcaatgtgcatctgtactagtttgacatctgtggctattgtgattcttcctggaatatcatctgtccatcacctttaaagcataacattaccctgatggccatgtgatctgtaggtccctagaaaggaaaatcgtgatttggaaaggaaattcatcaacaaacctgagtcggaaggatgcttaggaagcgggtactccctatgttccagattatagttcatttagatttgatgattcaatcaattatttctggggtggtctacagccaatgcatagtctctatctgtgtgtgtgttttgtgtttcccgtgcactctattcctttcgagaggcactctatgtcaggtgcctgaaatatggtttagcttcaggcaatgaagtggacgtcggatggagatccgagtgtccacgatgacagagaccgggttttgaatctctcgtctctccatctctcatgcgttcccaacttccaactccaatgccgtctccgctggctgatcagtgatcacctctgaccctctctggtgatgtgtacccattgttaatctctccaatgaagctaccctgcctgaccaggcccacaggctgtctcctgcatacggtggcaacacaccaacactgctggcctgccctaagacacatcttcgcgttgcgtccactggatacctgctttcttagtcagcagcatgccgaaaccctccatttgtgaaacctcaggcggtggttgtcgaacgctggcatgaaggtgtgagctcccaactgctgaatcgtgttcctcttttacatgcacgtgtccaacaagaaccaagaaccgagattagcgctacctcagtacactgccggtgcaagataaacgaaggaagctgggattgcatggcactgcggtctgttatgtagccgtggaacagcaagacaaaaagacatggatattccttgtttggattggggtgtttgatccagaaacagtctcattgctaattgtttcattattactacaaatcttggtcgaggcgtgaatatccttgctcttgatataattatagtattttgaatccctattgtgttttttacttaagtgataaatgttgcaaagaaaccattagataattgttgaatgattagttattgattacattgattgattttgatttaatgaatcttaaataaaccagaagattcatgtgtatgaatatttgtgttgggaatttcttggtcacatgttttccgcataataatatcataaaactgtggaatgaaacagcttttgcatattccgctataactttttatagcacccctatcaaatttatggggtgtttggcatgcaaaactcgagtcaaatatttcaactcaagagttacaagttttgtggagtttctaggagctctattacaactttttggagggtctttttgttgctggtatgtaatattttaaaaagcaacatagatatagaaactatctaaacaatcattgccactagttatagactctagagcaaagctgttgtactaaaagtttatagagtagagccgctctagggtggagcagaatcaatgctaaacacgtctttattgttatttttacactagttagatctattttgaaaggttagctctagtctctttctatgctaacaaattttaacaatataccaacttctcccaatagaaagggagcgtcttagcaaa

SEQ ID NO: 219264 - DNA, 2852 bp, Zea Mays
ctccactcccgacacctgttccgtttaaaatctccggcgtcgacgtggccgcgtgcgcagccacaaaccctccctcccgccgcaattaacaatccgctaatcagctcggcgcagcccgaaccctccctctaatcgcccgctaaaccgctccctccctccgccaaaaggccagtccgggggcttttcctatctccacttgttggcgacttggtagtagactcgcggatacgatccttctagacacttcgacgcgcccgttataaaggccggcgcatccgggccatgaccacacagccccttgctcattggctagggcggggaaggaaattgcgggaggatgcgaagccattggtgtattgcatatggtggcaccaagcatgaggcaggaactgcattacttgcaagaaagtcacaagctcattccaatctgattctctaaactttggaggtctcttacacctaggcctgaaagctcctctcccattagttgcctacaacattggaaaagagtttctcacattatcttagaatccattgcaagatcatacttgtggctttcttgcaagttgtgcagttgttgcctcaagcttgctgcctccctttgccagagctatcggtaaaacaggaagtactgtcagtttccgagctacaaacaagctataagtttagaaaaataatttagaaatgtacaacaaagtctagtaatacattgttaaagataaatcaatactcaataagttcctcatgctttggatttggggataacatacctgttttatttacatgctaatatttggaccaacaaaaaataccttaggaacagccatttgagaaaaaaacaaagccttttagtcctaagcaagttagcatagcttagagttgcaacttctacatgagcacaataaacagaaaagaaagagaaaaggaaaataaatatatatggcaccaaaagctattaccatgttataatataaatttaatgaccgaaattataaacatttttacaatcttagcaaacctctcaacgtgtagtctgaatcgacagaacatcagtagagtaatttttgttacatttatagtccccaatgtcgtttcaaggcaaagtttgtttggtttctctgttttcctaaacactggcttctcaattgcattctcaatgtgcatctgtactagtttgacatctgtggctattgtgattcttcctggaatatcatctgtccatcacctttaaagcataacattaccctgatggccatgtgatctgtaggtccctagaaaggaaaatcgtgatttggaaaggaaattcatcaacaaacctgagtcggaaggatgcttaggaagcgggtactccctatgttccagattatagttcatttagatttgatgattcaatcaattatttctggggtggtctacagccaatgcatagtctctatctgtgtgtgtgttttgtgtttcccgtgcactctattcctttcgagaggcactctatgtcaggtgcctgaaatatggtttagcttcaggcaatgaagtggacgtcggatggagatccgagtgtccacgatgacagagaccgggttttgaatctctcgtctctccatctctcatgcgttcccaacttccaactccaatgccgtctccgctggctgatcagtgatcacctctgaccctctctggtgatgtgtacccattgttaatctctccaatgaagctaccctgcctgaccaggcccacaggctgtctcctgcatacggtggcaacacaccaacactgctggcctgccctaagacacatcttcgcgttgcgtccactggatacctgctttcttagtcagcagcatgccgaaaccctccatttgtgaaacctcagcggtgataggcggtggttgtcgaacgctggcatgaaggtgtgagctcccaactgctgaatcgtgttcctcttttacatgcacgtgtccaacaagaaccaagaaccgagattagcgctacctcagtacactgccggtgcaagataaacgaaggaagctgggattgcatggcactgcggtctgttatgtagccgtggaacagcaagacaaaaagacatggatattccttgtttggattggggtgtttgatccagaaacagtctcattgctaattgtttcattattactacaaatcttggtcgaggcgtgaatatccttgctcttgatataattatagtattttgaatccctattgtgttttttacttaagtgataaatgttgcaaagaaaccattagataattgttgaatgattagttattgattacattgattgattttgatttaatgaatcttaaataaaccagaagattcatgtgtatgaatatttgtgttgggaatttcttggtcacatgttttccgcataataatatcataaaactgtggaatgaaacagcttttgcatattccgctataactttttatagcacccctatcaaatttatggggtgtttggcatgcaaaactcgagtcaaatatttcaactcaagagttacaagttttgtggagtttctaggagctctattacaactttttggagggtctttttgttgctggtatgtaatattttaaaaagcaacatagatatagaaactatctaaacaatcattgccactagttatagactctagagcaaagctgttgtactaaaagtttatagagtagagccgctctagggtggagcagaatcaatgctaaacacgtctttattgttatttttacactagttagatctattttgaaaggttagctctagtctctttctatgctaacaaattttaacaatataccaacttctcccaatagaaagggagcgtcttagcaaa

SEQ ID NO: 219265 - DNA, 2204 bp, Zea Mays
ctccactcccgacacctgttccgtttaaaatctccggcgtcgacgtggccgcgtgcgcagccacaaaccctccctcccgccgcaattaacaatccgctaatcagctcggcgcagcccgaaccctccctctaatcgcccgctaaaccgctccctccctccgccaaaaggccagtccgggggcttttcctatctccacttgttggcgacttggtagtagactcgcggatacgatccttctagacacttcgacgcgcccgttataaaggccggcgcatccgggccatgaccacacagccccttgctcattggctagggcggggaaggaaattgcgggaggatgcgaagccattggtgtattgcatatggtggcaccaagcatgaggcaggaactgcattacttgcaagaaagtcacaagctcattccaatctgattctctaaactttggaggtctcttacacctaggcctgaaagctcctctcccattagttgcctacaacattggaaaagagtttctcacattatcttagaatccattgcaagatcatacttgtggctttcttgcaagttgtgcagttgttgcctcaagcttgctgcctccctttgccagagctatcggtaaaacaggaagtccctagaaaggaaaatcgtgatttggaaaggaaattcatcaacaaacctgagtcggaaggatgcttaggaagcgggtactccctatgttccagattatagttcatttagatttgatgattcaatcaattatttctggggtggtctacagccaatgcatagtctctatctgtgtgtgtgttttgtgtttcccgtgcactctattcctttcgagaggcactctatgtcaggtgcctgaaatatggtttagcttcaggcaatgaagtggacgtcggatggagatccgagtgtccacgatgacagagaccgggttttgaatctctcgtctctccatctctcatgcgttcccaacttccaactccaatgccgtctccgctggctgatcagtgatcacctctgaccctctctggtgatgtgtacccattgttaatctctccaatgaagctaccctgcctgaccaggcccacaggctgtctcctgcatacggtggcaacacaccaacactgctggcctgccctaagacacatcttcgcgttgcgtccactggatacctgctttcttagtcagcagcatgccgaaaccctccatttgtgaaacctcaggcggtggttgtcgaacgctggcatgaaggtgtgagctcccaactgctgaatcgtgttcctcttttacatgcacgtgtccaacaagaaccaagaaccgagattagcgctacctcagtacactgccggtgcaagataaacgaaggaagctgggattgcatggcactgcggtctgttatgtagccgtggaacagcaagacaaaaagacatggatattccttgtttggattggggtgtttgatccagaaacagtctcattgctaattgtttcattattactacaaatcttggtcgaggcgtgaatatccttgctcttgatataattatagtattttgaatccctattgtgttttttacttaagtgataaatgttgcaaagaaaccattagataattgttgaatgattagttattgattacattgattgattttgatttaatgaatcttaaataaaccagaagattcatgtgtatgaatatttgtgttgggaatttcttggtcacatgttttccgcataataatatcataaaactgtggaatgaaacagcttttgcatattccgctataactttttatagcacccctatcaaatttatggggtgtttggcatgcaaaactcgagtcaaatatttcaactcaagagttacaagttttgtggagtttctaggagctctattacaactttttggagggtctttttgttgctggtatgtaatattttaaaaagcaacatagatatagaaactatctaaacaatcattgccactagttatagactctagagcaaagctgttgtactaaaagtttatagagtagagccgctctagggtggagcagaatcaatgctaaacacgtctttattgttatttttacactagttagatctattttgaaaggttagctctagtctctttctatgctaacaaattttaacaatataccaacttctcccaatagaaagggagcgtcttagcaaa

SEQ ID NO: 219266 - DNA, 2675 bp, Zea Mays
ctccactcccgacacctgttccgtttaaaatctccggcgtcgacgtggccgcgtgcgcagccacaaaccctccctcccgccgcaattaacaatccgctaatcagctcggcgcagcccgaaccctccctctaatcgcccgctaaaccgctccctccctccgccaaaaggccagtccgggggcttttcctatctccacttgttggcgacttggtagtagactcgcggatacgatccttctagacacttcgacgcgcccgttataaaggccggcgcatccgggccatgaccacacagccccttgctcattggctagggcggggaaggaaattgcgggaggatgcgaagccattggtgtattgcatatggtggcaccaagcatgaggcaggaactgcattacttgcaagaaagtcacaaaatccattgcaagatcatacttgtggctttcttgcaagttgtgcagttgttgcctcaagcttgctgcctccctttgccagagctatcggtaaaacaggaagtactgtcagtttccgagctacaaacaagctataagtttagaaaaataatttagaaatgtacaacaaagtctagtaatacattgttaaagataaatcaatactcaataagttcctcatgctttggatttggggataacatacctgttttatttacatgctaatatttggaccaacaaaaaataccttaggaacagccatttgagaaaaaaacaaagccttttagtcctaagcaagttagcatagcttagagttgcaacttctacatgagcacaataaacagaaaagaaagagaaaaggaaaataaatatatatggcaccaaaagctattaccatgttataatataaatttaatgaccgaaattataaacatttttacaatcttagcaaacctctcaacgtgtagtctgaatcgacagaacatcagtagagtaatttttgttacatttatagtccccaatgtcgtttcaaggcaaagtttgtttggtttctctgttttcctaaacactggcttctcaattgcattctcaatgtgcatctgtactagtttgacatctgtggctattgtgattcttcctggaatatcatctgtccatcacctttaaagcataacattaccctgatggccatgtgatctgtaggtccctagaaaggaaaatcgtgatttggaaaggaaattcatcaacaaacctgagtcggaaggatgcttaggaagcgggattcaatcaattatttctggggtggtctacagccaatgcatagtctctatctgtgtgtgtgttttgtgtttcccgtgcactctattcctttcgagaggcactctatgtcaggtgcctgaaatatggtttagcttcaggcaatgaagtggacgtcggatggagatccgagtgtccacgatgacagagaccgggttttgaatctctcgtctctccatctctcatgcgttcccaacttccaactccaatgccgtctccgctggctgatcagtgatcacctctgaccctctctggtgatgtgtacccattgttaatctctccaatgaagctaccctgcctgaccaggcccacaggctgtctcctgcatacggtggcaacacaccaacactgctggcctgccctaagacacatcttcgcgttgcgtccactggatacctgctttcttagtcagcagcatgccgaaaccctccatttgtgaaacctcagcggtgataggcggtggttgtcgaacgctggcatgaaggtgtgagctcccaactgctgaatcgtgttcctcttttacatgcacgtgtccaacaagaaccaagtacactgccggtgcaagataaacgaaggaagctgggattgcatggcactgcggtctgttatgtagccgtggaacagcaagacaaaaagacatggatattccttgtttggattggggtgtttgatccagaaacagtctcattgctaattgtttcattattactacaaatcttggtcgaggcgtgaatatccttgctcttgatataattatagtattttgaatccctattgtgttttttacttaagtgataaatgttgcaaagaaaccattagataattgttgaatgattagttattgattacattgattgattttgatttaatgaatcttaaataaaccagaagattcatgtgtatgaatatttgtgttgggaatttcttggtcacatgttttccgcataataatatcataaaactgtggaatgaaacagcttttgcatattccgctataactttttatagcacccctatcaaatttatggggtgtttggcatgcaaaactcgagtcaaatatttcaactcaagagttacaagttttgtggagtttctaggagctctattacaactttttggagggtctttttgttgctggtatgtaatattttaaaaagcaacatagatatagaaactatctaaacaatcattgccactagttatagactctagagcaaagctgttgtactaaaagtttatagagtagagccgctctagggtggagcagaatcaatgctaaacacgtctttattgttatttttacactagttagatctattttgaaaggttagctctagtctctttctatgctaacaaattttaacaatataccaacttctcccaatagaaagggagcgtcttagcaaa

SEQ ID NO: 219267 - DNA, 4068 bp, Zea Mays
  misc_feature (2322)..(2421): n is a, c, g, or t
ctttcttgtttgttccattccgtcatctactacgcggacccgccccctctgccgcgttccaccctaccccggtccccggctggctggctggcccgcccgcattcatctcattgtactactaccttctctcccgtgacacgccatctccgcaaaaccgccgctcgtcacctctcaacgccaccatgctccggccggcagccggagggctgaccctttccggttcctccaccgcgcgacctcttcctcctctcgcccgttcttagcccaaccaccatcaccgtcatcattcataaacaaaaaggcaggcaggcagtcagtccctcggcaggcacgagcgcagacggtgcgaggcgtccgcgtcgcgtccttccacctgtctccttcgccttgcgtgctcctggcttcaagaaaccgccgcacgccatccagcctgcggtgcggtggtcgcgcagcccgcctggctgccaccgctttccctctcctttcgcttctccgctaccgctaccgctaccaccagcggcgcgggcctccgggtcgtccggccggattcgttccccgggccgtgcaaccacgcacgcgcttgggttccgctcgtcgccgaaagcttctgctctgctcagtttccagctgggaggaggcgccgcctgcggaccgctgcgcaccacggagggagatcgacatcttgttggtggtggacaagctctcctctcagcctcagtgtgtccttcgcgaggctctggaatctcgcctgacgaacaaggttgctcctgcccctccatgatccacctcaactcctcaagccccagcagaatttcagcttctggtggctgcctttgcccctctgtttcctgcctgtcgtcctctcgcaatcctgaattgtgtctcattgcaaaagccctctacttgcgtcgctgaaataaactagtttgtccttgcaatcctgggtgggtgtctcattgcttcagcgctctgcctgcgcctctgaaggctgaagcaaagtatttctgcttcctcttacatagcccttccagcctgtctgcatcaccgtgccattcgtaaccccttcatccttctagctcaacttggactcgccatggatagcacagttgttggtctcaaactggttgtgctagccctttctgtggccatctggttgtttggcacctgctgccatgccgatttcacccctgcagacgactacctcatcaactgcggctccacggtcgacgcgactgtcgaccacagggttttcgtgtctgacacttctggggcagccatcctgacgaccccgacccagagcaccgccgcgaccacctcgccgaatttggtctcagggtttgaaggtgctatgctgtatcagactgctaggatattcgttgtgccatcgtcctatgccttcatgctcaagagccatggccgacattttgtccgccttcacttcttccccttcaaataccagagctatgacctcaccacggcgaccttcaaggtgtccacgcaggatgtcgtgctcctcgacaatttcacagcgcccagtagttcttcgccggtgttcaaggagtattccctgaacattaccagggacatgctcatcctcacatttgtgcctcttgggaacaacacaccggccttcgtcaatgctatcgaggtcatctctgtccctgatctcataaccgactcggtactaagtctggaccctgtcggtcagtatcttgggctgtcaacacagccgctgcagacattctacaggatcaacgtggggggacccaaggtgactcctgagaacgacacgctctggcggacatgggttactgatcaaagctccttcgtaaattccactcccactacacttgccaatttcccaggaaagctgaattttcagaacggattggcaacagaggaggatgcaccggacagtgtgtacaatactgcaaggcggttgcaaaacagtactcgctccgtgtccaatatgacgtggcaatttgatgttgatgcccgttcaagctatctcattcggttccatttatgtgacattgtgagcaaggctccttatcagctcctgtttgatgtatatgtggatagctggtcggtggtgaaagatctagatctctccgataaagcatttggcaacttggcaacaccatattacattgatgctgtcttgctatcaagtgatccatctggtaagctcagtgtcagcattgggccttctgctgtaaagatagcagcgccggatggtatcctgaatggcttggagatcatgaagatgaacatcagtacagggtctgtttccattgtggcaccaccttcagtggcaagaannnnnnnnnnnnnnnnnnnnnnnnnnnnnnnnnnnnnnnnnnnnnnnnnnnnnnnnnnnnnnnnnnnnnnnnnnnnnnnnnnnnnnnnnnnnnnnnnnnncaagctacatccaccagcaccaagtcggccctcaagttcttggacacccctcaatggtcttagcttccttaccacaggcagccgaaccaccagtcggaccactcttacgtctggaactaccggtgacacgagctaccgaattccttttgttgtgctgcaagatgcgacaaatcactttgatgagcagatggtcattggagttggaggctttgggaaggtctacaaagcagtgatgcaggatggaagcaaacttgcagtaaagcggggcaaccagaagtcccaccaagggctgagggagttccgtacagagattgaattgctgtcagggctgcgacaccgtcatctcgtgtcgctcattggttactgtgatgaacacaacgagatgatcttggtgtatgaatacatggagaaaggaactctgaagagccatctttatggcggtgatatgccgcctctcagctggaagaaaagactggaaatctgcgtaggagcagcaagagggctccactaccttcacaccggttttgcccagtcaatcatacaccgtgacgtcaagtcagcaaacatactactcgatgaaaatctcttggccaaggtttctgattttggcctctcaaaggttgggcctgaattcgaccagacgcatgtgagcacagcagtgaaagggagcttcgggtaccttgatcctgagtacttccggagacagaagctgactgacaaatcagatgtgtactcttttggtgtggtgctgcttgaggtgatttgtgcgaggccggttatcgacccgactcttccaagggacatgatcaacctcgcggagtgggctatcaagtggcaaaagagaggagagcttgatcagattgtcgaccagcgcattgctgggacagtcaggcctgaagcactgaggaagtttggagagacggtggagaaatgccttgcagagtatggtgtcgagcgtcctactatgggggatgtgctgtggaacctggagtttgtgctgcagctgcaggaggcaggtccagacatgtccaacatcaacagtatgaatcagatctctgaactcccttcaaatccaaagagagttagctccctggatatcagcagtacagatcaaagccgcgtgcccatcgactactccgacatgtcaacgagtaacgccttctcgcagctaatcaatgcagaaggaaggtgaactggatagaattgttccagtcactgaaaaaaatgtttgttacaaaaactagagatgcctcttgtgtgactacccagcctatcccttctcacatatacaacaccaagttgtgaatcttattgaaattttgtttgccacttgtaactacttatgttctagaaaagggtgagtagctttattgcaatcgtcttttgctcaaatatgtctgtacatgttctgtcacgacccaccagccgaccttcattcgctaagatagttcggcaacatgcttaacgtaaatacagcacactatcatacgccaatggcgccgagatcacatattcagcaaaaagttgctgcacagatgctacggtagtttctagtcaaagagaaattcatacctacgaagagatgaactagatccgttttatctttttgagccagattaatcgaattctaactaaaggaattgggat

SEQ ID NO: 219268 - DNA, 1547 bp, Zea Mays
gagaaaaaaaaaatccacgaaccaatttctcagcaaccagcagcacgacctgtgagggttcgaaggaagtagcagtgttttttgttcctagagggaggaagagatggcaaagggggaggggccggcgatcgggatcgacctgggaacgacgtactcgtgtgtcggcgtgtggcagcacgaccgcgtcgagatcatcgccaacgaccaggggaaccgcaccacgccgtcctacgtcgccttcaccgacaccgagcggctcatcggcgatgccgccaagaaccaggtcgccatgaaccccaccaacaccgtatttgacgcaaagcggttgattggtaggaggttctcggacccttccgttcagagtgatatgaagctatggccattcaaggtcgtggcgggccctggcgacaagccgatgatcgtggttagctacaagggtgaggataagcagttctctgccgaggagatctcctctatggtgctgaccaagatgaaggagatcgctgaggcctacctcggctccaccatcaagaatgccgtggtcaccgtgcctgcctatttcaacgactcgcagaggcaggccaccaaggatgccggcgtcatctccgggctcaacgtgatgcgtatcatcaacgagcccaccgccgcggccattgcctacgggctcgacaaaaaggccaccagcagcggcgagaagaacgtgctcatcttcgacctcggtggtggcaccttcgatgtgtcgctcttgaccatcgaggagggcatcttcgaggacgaggagcataagaagaaggtggacgccaagaactcgctggagaactacgcgtacaacatgcgcaacaccatcaaggacgacaagatcgcctccaagctaggtgcggatgacaagaagcgcatcgagaacgccgtggacggtgccatcagctggctggacagcaaccagctcgcggaggtggacgagttcgaggacaagatgaaggagctggagggcatctgcaaccccatcatcgccaagatgtaccagggcgctggcgcggacatgggtgctgctgccggcatggacgaggacgcaccggccgccggcggcagcgccgctggccccaagatcgaggaggtcgactaagtgcttccacctgtggtcgtgttatcgtggtagaagttgaattgcttctgtttctgtgggaacagtaaactctgaggttgtggttgatctgatgatacttttctaattggttccccttccttccctgagattttatagttgtttgctcgtttgcatgtttttttgtcccttaagaagtgtttattaagctgcagggcctccagctagaggcgcacgaaggatcgttcttttttgcaatttgcttgtcaccatgatcgcgcgggagtaatatgctgtaggcagtccacactgcagagagcatcgcactcggtgctgaggatcaatgttggtgagtaaagctgccctgatggagatagtctggggagccatttttcattaatagcgccataacaagttgcgagaatttgacaggatatgatttttc

SEQ ID NO: 219269 - DNA, 2515 bp, Zea Mays
aatcttctggacgcgccatctcctcaataaaacctcctcggctcctccagtgtccctcgtctctcgcctgagaaaaaaaaaatccacgaaccaatttctcagcaaccagcagcacgacctgtgagggttcgaaggaagtagcagtgttttttgttcctagagggaggaagagatggcaaagggggaggggccggcgatcgggatcgacctgggaacgacgtactcgtgtgtcggcgtgtggcagcacgaccgcgtcgagatcatcgccaacgaccaggggaaccgcaccacgccgtcctacgtcgccttcaccgacaccgagcggctcatcggcgatgccgccaagaaccagacgcaaagcggttgattggtaggaggttctcggacccttccgttcagagtgatatgaagctatggccattcaaggtcgtggcgggccctggcgacaagccgatgatcgtggttagctacaagggtgaggataagcagttctctgccgaggagatctcctctatggtgctgaccaagatgaaggagatcgctgaggcctacctcggctccaccatcaagaatgccgtggtcaccgtgcctgcctatttcaacgactcgcagaggcaggccaccaaggatgccggcgtcatctccgggctcaacgtgatgcgtatcatcaacgagcccaccgccgcggccattgcctacgggctcgacaaaaaggccaccagcagcggcgagaagaacgtgctcatcttcgacctcggtggtggcaccttcgatgtgtcgctcttgaccatcgaggagggcatcttcgaggtgaaggccaccgccggtgatacccatctgggtggggaggacttcgacaaccgcatggtcaaccacttcgtccaggagttcaagcgcaagcacaagaaggacatcagcggcaacccgcgcgcgctgcggcgtctgcggacggcctgcgagcgggccaagcgcacgctgtcgtccaccgcgcagaccaccatcgagatcgactcgctgtacgagggcatcgacttctacaccaccatcacccgcgcccggttcgaggagctgaacatggacctcttccgcaagtgcatggagcccgtggagaaatgcctccgcgatgccaagatggacaagagcaccgtgcacgacgtggtgctcgtgggcggctccacgcgcatccccaaggtgcagcagctgctccaggacttcttcaacggcaaggagctctgcaagagcatcaaccctgacgaggccgtggcgtacggtgctgctgtccaggccgccatcctgagcggcgagggcaacgagaaggtgcaggacctgctccttctggacgtcaccccgctgtccctgggcctggagactgccggcggcgtgatgaccgtgctgatccctcgcaacaccaccataccaacgaagaaggagcaggtgttctccacctactccgacaaccagccgggggtgctgatccaggtgtacgagggagagcgcgccaggaccaaggacaacaacctccttggcaagttcgagctgtccggcatcccgccggcgcctcgcggcgtgccccagatcaccgtgtgcttcgacatcgacgccaacggcattctgaacgtatcagcggaggacaagactacaggacagaaaaacaagatcaccatcaccaacgacaaggggcggctgagcaaggaggagatcgagaagatggtgaaggaggcggagaagtacaaggcggaggacgaggagcataagaagaaggtggacgccaagaactcgctggagaactacgcgtacaacatgcgcaacaccatcaaggacgacaagatcgcctccaagctaggtgcggatgacaagaagcgcatcgagaacgccgtggacggtgccatcagctggctggacagcaaccagctcgcggaggtggacgagttcgaggacaagatgaaggagctggagggcatctgcaaccccatcatcgccaagatgtaccagggcgctggcgcggacatgggtgctgctgccggcatggacgaggacgcaccggccgccggcggcagcgccgctggccccaagatcgaggaggtcgactaagtgcttccacctgtggtcgtgttatcgtggtagaagttgaattgcttctgtttctgtgggaacagtaaactctgaggttgtggttgatctgatgatacttttctaattggttccccttccttccctgagattttatagttgtttgctcgtttgcatgtttttttgtcccttaagaagtgtttattaagctgcagggcctccagctagaggcgcacgaaggatcgttcttttttgcaatttgcttgtcaccatgatcgcgcgggagtaatatgctgtaggcagtccacactgcagagagcatcgcactcggtgctgaggatcaatgttggtgagtaaagctgccctgatggagatagtctggggagccatttttcattaatagcgccataacaagttgcgagaatttgacaggatatgatttttc

SEQ ID NO: 219270 - DNA, 2331 bp, Zea Mays
ccaaggtcgccccgtgcccgaatcttctggacgcgccatctcctcaataaaacctcctcggctcctccagtgtccctcgtctctcgcctgagaaaaaaaaaatccacgaaccaatttctcagcaaccagcagcacgacctgtgagggttcgaaggaagtagcagtgttttttgttcctagagggaggaagagatggcaaagggggaggggccggcgatcgggatcgacctgggaacgacgtactcgtgtgtcggcgtgtggcagcacgaccgcgtcgagatcatcgccaacgaccaggggaaccgcaccacgccgtcctacgtcgccttcaccgacaccgagcggctcatcggcgatgccgccaagaaccaggtcgccatgaaccccaccaacaccgtatttgacgcaaagcggttgattggtaggaggttctcggacccttccgttcagagtgatatgaagctatggccattcaaggtcgtggcgggccctggcgacaagccgatgatcgtggttagctacaagggtgaggataagcagttctctgccgaggagatctcctctatggtgctgaccaagatgaaggagatcgctgaggcctacctcggctccaccatcaagaatgccgtggtcaccgtgcctgcctatttcaacgactcgcagaggcaggccaccaaggatgccggcgtcatctccgggctcaacgtgatgcgtatcatcaacgagcccaccgccgcggccattgcctacgggctcgacaaaaaggccaccagcagcggcgagaagaacgtgctcatcttcgacctcggtggtggcaccttcgatgtgtcgctcttgaccatcgaggagggcatcttcgaggtgaaggccaccgccggtgatacccatctgggtggggaggacttcgacaaccgcatggtcaaccacttcgtccaggagttcaagcgcaagcacaagaaggacatcagcggcaacccgcgcgcgctgcggcgtctgcggacggcctgcgagcgggccaagcgcacgctgtcgtccaccgcgcagaccaccatcgagatcgactcgctgtacgagggcatcgacttctacaccaccatcacccgcgcccggttcgaggagctgaacatggacctcttccgcaagtgcatggagcccgtggagaaatgcctccgcgatgccaagatggacaagagcaccgtgcacgacgtggtgctcgtgggcggctccacgcgcatccccaaggtgcagcagctgctccaggacttcttcaacggcaaggagctctgcaagagcatcaaccctgacgaggccgtggcgtacggtgctgctgtccaggccgccatcctgagcggcgagggcaacgagaaggtgttctccacctactccgacaaccagccgggggtgctgatccaggtgtacgagggagagcgcgccaggaccaaggacaacaacctccttggcaagttcgagctgtccggcatcccgccggcgcctcgcggcgtgccccagatcaccgtgtgcttcgacatcgacgccaacggcattctgaacgtatcagcggaggacaagactacaggacagaaaaacaagatcaccatcaccaacgacaaggggcggctgagcaaggaggagatcgagaagatggtgaaggaggcggagaagtacaaggcggaggacgaggagcataagaagaaggtggacgccaagaactcgctggagaactacgcgtacaacatgcgcaacaccatcaaggacgacaagatcgcctccaagctaggtgcggatgacaagaagcgcatcgagaacgccgtggacggtgccatcagctggctggacagcaaccagctcgcggaggtggacgagttcgaggacaagatgaaggagctggagggcatctgcaaccccatcatcgccaagatgtaccagggcgctggcgcggacatgggtgctgctgccggcatggacgaggacgcaccggccgccggcggcagcgccgctggccccaagatcgaggaggtcgactaagtgcttccacctgtggtcgtgttatcgtggtagaagttgaattgcttctgtttctgtgggaacagtaaactctgagggcctccagctagaggcgcacgaaggatcgttcttttttgcaatttgcttgtcaccatgatcgcgcgggagtaatatgctgtaggcagtccacactgcagagagcatcgcactcggtgctgaggatcaatgttggtgagtaaagctgccctgatggagatagtctggggagccatttttcattaatagcgccataacaagttgcgagaatttgacaggatatgatttttc

SEQ ID NO: 219271 - DNA, 4047 bp, Zea Mays
ctggcgctgcctggcaggctggctggctcggtgcctcccctgagttccatctcctgtcatgccgccgccgcagtagagctaacgagccacgggtagcatgcgccgcggcctgcgtcgcgggttgggcatcctcctcgtcccgctcccgcacgcacccagccgcctgccgccgatctctctcgcggctctcctcccccgacgcttcaatggcttctcccgccactccttctgcagcttccccgtcggggagcgcgccgtcgagcagttctcagacgacgaatacgaccacgagtacgaggacctccggccgtcgtcatcggtggcgaacatcgacgagtggaggtggaagctgagcatgctgcagcgcaacgcggaggaacaggagatcatctccagggaccggagggaccgccgggattatgaccagatagccaacctcgccaagaggatgggactctacagtgagatgtacggacgggtcgtggttgcgagcaaggtaccactgccgaactacaggcctgatctggatgacaagcggccgcaaagagaggtggtaatcccgctgggtttgcagaggagagttgaaggacttgtgcaggagcacctagaccgcgcattcttaccactgaataaatgtggtggcaacacaaaaaatggctctgacatgactgagaatgcgaacctggatgagcagcatgattcccttcttgatcggtcagtcatggagaagatacttcagaggaagagcattcggatgcggaattttcagagaagttggcaggaatcacccgaaggtgctaagatgctagaattccggagatcccttccagcagacaaagaaaaagaaaggcttctagcagccattgcacgcaatcaggtcattgtaatttctggtgagacagggtgtggtaaaacaacacagctgcctcagtttgtattggaatcagaaattgagtctggtcgaggggctttttgtaacataatttgtacacagccacgaagaatatctgcaatggcagttgcagaaagggtatccacagagagaggagaaaatcttggtgaatcgcttttttaataggttggctataaagtccgattggagggaattaaggggaaagatacacatttgcttttctgcaccagtggcatcttactaagacgcttactgagtgaccgaaacttgaatggtgtgactcatgtatttgttgatgagatacacgaaaggggcatgaatgaagatttcctgttgattgtactaaaagagctgttatcacgtcgccgtgatttgaggctgatattgatgagcgctactctaaacgcggaactcttctcaagttattttggaggagcgccaactatccatattcctgggttcacacatccagtaagggcacattttttggaagacatattagagaggtcaggctacaagttgacctcaagcaatcaacttgatgattacgggcaagataaagtctggaaaactcagagacagctattgcctagaaaaaggaaaaatcaaattactacacttgtcgaggaagcccttaaaaattcaagcttcgagatctatggctccaggacacgtgattctctagtgaattggaatcctgattgcataggtttcaacctcatagaggctgttctgtgccacatatgtcgcaaagagcgacctggtgctgttttagttttcatgactggatgggacgatattagttgcttgaaggatcaactgaaagcacatccattgttaggtgatccgaatagggtttttctgcttgcatgccatggttctatggctacttctgagcagaggctaatttttgagaagccacctcctaatgttcggaaggtagtccttgccacaaatatggcagaagcaagtattacaataaatgatatcgtttttgttgttgattgtggtaaagcaaaggaaaccacatatgatgctctaaacaatactccatgcttactcccctcatggatttcgaaagcttctgcccgtcagaggaggggtagagctggccgtgtgcaacctggagaatgctaccatctgtaccctagatgtgtgtatgatgcatttgcagactatcagcttccagagcttcttagaactcctttgaattcattatgtctgcagataaaaagtttgcaagttggaagcattggggagttcctatcagctgctctacagcctccagaaccacgagctgtcgagaatgcagtggaattcttgaagatgattggagcattagatggaaatgagaaccttactgatcttggacgatacctttccatgcttccagttgatccaaaattgggaaagatgctcataatgggtgcagtttttcgatgcatagatcctatacttactgtagttgctgggcttagtgttcgggatcctttcctgttaccacaggaaaagaaggatttggcaggaacagcaaaagctagattctcagcaattatttagcaagaagcttattttgcatgaaggtaagaaggcttgtttttcatattattactttatatattagttggcaggaacagcaaaagctagattctcagcaaaggattatagtgatcatatggcccttgttcgggcttatgaaggatggaaggatgcagagagagaagggtctgcttatgaatactgctggagaaatttcctttcttctcaaacactacaagccattcactctctccggaagcaattcagctatattttaaaggattccggtttgatagactctgatgggaatacaaacaacagtttgagccataatcaatcattggtccgcggtattatatgttctgggctttttcctgggatagcatctgttgtgcatcgagaaagctccatgtcctttaagaccatggatgacgggcaagttcttctttatgctaattcagtgaatgcaaaatatcagaccatcccatatccatggctggtctttggtgagaaggtgaaggtgaatgctgtcttcatccgtgattcaaccggagtatcagactccatattgattttgtttggcggtgctgtagcaaaaggaggcatggccgggcacttgaagatgctcgatggctacattgatttcttcatggaccccagcctgtctgaatgctacctgcaacttaaagaagaactcgataaacttatacagcagaagcttgaagacccaaacttcgacatccacaaggaaggcaagtacatcctattcgccgtacaagagctcgccgccggcgacctgtgcgaagggaggttcgtgttcggccgcgagacgagccgggcccggctccggagccccgaggacgacggcaagagcaacctcataaaggacgggatgaaccccaagagcctgctgcagacgctgctgatgcgggccggccacaccccgcccaggtacaagacgaagcacctcaagacgaacgagttcagggccgtggtggagttcaaggggatgcagttcgtggggaagccgaagcggaacaagcagctcgcggagcgggacgccgccatcgaggcgctggggtggctgacgcagacctccggcgtgaaggctccggacgagaacgacgacgactcgccgctggacctgactgacagcatgctcaagctcctcaccaggccgaggcggcactcgaagaatagctctaggaaacggtgattttttgggcgaggatttgctgtagattgatcgcgcacacgcacaaaaggcatagagagagagagagagataggaaacgtcagctttggttacacgaatgcctcatggtctcgatgtgttgctttgtacattttttatttttatttttccacgctatgtcatcagaatcagaagttcctccatcctgctgattgctgtcaccgtagaacatggtttaaaaaattaaaataactgcctatagcgctgttatttctatagaaataaccttccgaagaatctaaatctacgatattacacttttaaccgctatttcagctagaactgctttagcctaatttagctttgctaaatgtcgtagctttaatgctaaacaacaaat

SEQ ID NO: 219272 - DNA, 3934 bp, Zea Mays
ctggcgctgcctggcaggctggctggctcggtgcctcccctgagttccatctcctgtcatgccgccgccgcagtagagctaacgagccacgggtagcatgcgccgcggcctgcgtcgcgggttgggcatcctcctcgtcccgctcccgcacgcacccagccgcctgccgccgatctctctcgcggctctcctcccccgacgcttcaatggcttctcccgccactccttctgcagcttccccgtcggggagcgcgccgtcgagcagttctcagacgacgaatacgaccacgagtacgaggacctccggccgtcgtcatcggtggcgaacatcgacgagtggaggtggaagctgagcatgctgcagcgcaacgcggaggaacaggagatcatctccagggaccggagggaccgccgggattatgaccagatagccaacctcgccaagaggatgggactctacagtgagatgtacggacgggtcgtggttgcgagcaaggtaccactgccgaactacaggcctgatctggatgacaagcggccgcaaagagaggtggtaatcccgctgggtttgcagaggagagttgaaggacttgtgcaggagcacctagaccgcgcattcttaccactgaataaatgtggtggcaacacaaaaaatggctctgacatgactgagaatgcgaacctggatgagcagcatgattcccttcttgatcggtcagtcatggagaagatacttcagaggaagagcattcggatgcggaattttcagagaagttggcaggaatcacccgaaggtgctaagatgctagaattccggagatcccttccagcagacaaagaaaaagaaaggcttctagcagccattgcacgcaatcaggtcattgtaatttctggtgagacagggtgtggtaaaacaacacagctgcctcagtttgtattggaatcagaaattgagtctggtcgaggggctttttgtaacataatttgtacacagccacgaagaatatctgcaatggcagttgcagaaagggtatccacagagagaggagaaaatcttggtgaatcgcttttttaataggttggctataaagtccgattggagggaattaaggggaaagatacacatttgcttttctgcaccagtggcatcttactaagacgcttactgagtgaccgaaacttgaatggtgtgactcatgtatttgttgatgagatacacgaaaggggcatgaatgaagatttcctgttgattgtactaaaagagctgttatcacgtcgccgtgatttgaggctgatattgatgagcgctactctaaacgcggaactcttctcaagttattttggaggagcgccaactatccatattcctgggttcacacatccagtaagggcacattttttggaagacatattagagaggtcaggctacaagttgacctcaagcaatcaacttgatgattacgggcaagataaagtctggaaaactcagagacagctattgcctagaaaaaggaaaaatcaaattactacacttgtcgaggaagcccttaaaaattcaagcttcgagatctatggctccaggacacgtgattctctagtgaattggaatcctgattgcataggtttcaacctcatagaggctgttctgtgccacatatgtcgcaaagagcgacctggtgctgttttagttttcatgactggatgggacgatattagttgcttgaaggatcaactgaaagcacatccattgttaggtgatccgaatagggtttttctgcttgcatgccatggttctatggctacttctgagcagaggctaatttttgagaagccacctcctaatgttcggaaggtagtccttgccacaaatatggcagaagcaagtattacaataaatgatatcgtttttgttgttgattgtggtaaagcaaaggaaaccacatatgatgctctaaacaatactccatgcttactcccctcatggatttcgaaagcttctgcccgtcagaggaggggtagagctggccgtgtgcaacctggagaatgctaccatctgtaccctagatgtgtgtatgatgcatttgcagactatcagcttccagagcttcttagaactcctttgaattcattatgtctgcagataaaaagtttgcaagttggaagcattggggagttcctatcagctgctctacagcctccagaaccacgagctgtcgagaatgcagtggaattcttgaagatgattggagcattagatggaaatgagaaccttactgatcttggacgatacctttccatgcttccagttgatccaaaattgggaaagatgctcataatgggtgcagtttttcgatgcatagatcctatacttactgtagttgctgggcttagtgttcgggatcctttcctgttaccacaggaaaagaaggatgaacagcaaaagctagattctcagcaaaggattatagtgatcatatggcccttgttcgggcttatgaaggatggaaggatgcagagagagaagggtctgcttatgaatactgctggagaaatttcctttcttctcaaacactacaagccattcactctctccggaagcaattcagctatattttaaaggattccggtttgatagactctgatgggaatacaaacaacagtttgagccataatcaatcattggtccgcggtattatatgttctgggctttttcctgggatagcatctgttgtgcatcgagaaagctccatgtcctttaagaccatggatgacgggcaagttcttctttatgctaattcagtgaatgcaaaatatcagaccatcccatatccatggctggtctttggtgagaaggtgaaggtgaatgctgtcttcatccgtgattcaaccggagtatcagactccatattgattttgtttggcggtgctgtagcaaaaggaggcatggccgggcacttgaagatgctcgatggctacattgatttcttcatggaccccagcctgtctgaatgctacctgcaacttaaagaagaactcgataaacttatacagcagaagcttgaagacccaaacttcgacatccacaaggaaggcaagtacatcctattcgccgtacaagagctcgccgccggcgacctgtgcgaagggaggttcgtgttcggccgcgagacgagccgggcccggctccggagccccgaggacgacggcaagagcaacctcataaaggacgggatgaaccccaagagcctgctgcagacgctgctgatgcgggccggccacaccccgcccaggtacaagacgaagcacctcaagacgaacgagttcagggccgtggtggagttcaaggggatgcagttcgtggggaagccgaagcggaacaagcagctcgcggagcgggacgccgccatcgaggcgctggggtggctgacgcagacctccggcgtgaaggctccggacgagaacgacgacgactcgccgctggacctgactgacagcatgctcaagctcctcaccaggccgaggcggcactcgaagaatagctctaggaaacggtgattttttgggcgaggatttgctgtagattgatcgcgcacacgcacaaaaggcatagagagagagagagagataggaaacgtcagctttggttacacgaatgcctcatggtctcgatgtgttgctttgtacattttttatttttatttttccacgctatgtcatcagaatcagaagttcctccatcctgctgattgctgtcaccgtagaacatggtttaaaaaattaaaataactgcctatagcgctgttatttctatagaaataaccttccgaagaatctaaatctacgatattacacttttaaccgctatttcagctagaactgctttagcctaatttagctttgctaaatgtcgtagctttaatgctaaacaacaaat

SEQ ID NO: 219273 - DNA, 3943 bp, Zea Mays
ctggcgctgcctggcaggctggctggctcggtgcctcccctgagttccatctcctgtcatgccgccgccgcagtagagctaacgagccacgggtagcatgcgccgcggcctgcgtcgcgggttgggcatcctcctcgtcccgctcccgcacgcacccagccgcctgccgccgatctctctcgcggctctcctcccccgacgcttcaatggcttctcccgccactccttctgcagcttccccgtcggggagcgcgccgtcgagcagttctcagacgacgaatacgaccacgagtacgaggacctccggccgtcgtcatcggtggcgaacatcgacgagtggaggtggaagctgagcatgctgcagcgcaacgcggaggaacaggagatcatctccagggaccggagggaccgccgggattatgaccagatagccaacctcgccaagaggatgggactctacagtgagatgtacggacgggtcgtggttgcgagcaaggtaccactgccgaactacaggcctgatctggatgacaagcggccgcaaagagaggtggtaatcccgctgggtttgcagaggagagttgaaggacttgtgcaggagcacctagaccgcgcattcttaccactgaataaatgtggtggcaacacaaaaaatggctctgacatgactgagaatgcgaacctggatgagcagcatgattcccttcttgatcggtcagtcatggagaagatacttcagaggaagagcattcggatgcggaattttcagagaagttggcaggaatcacccgaaggtgctaagatgctagaattccggagatcccttccagcagacaaagaaaaagaaaggcttctagcagccattgcacgcaatcaggtcattgtaatttctggtgagacagggtgtggtaaaacaacacagctgcctcagtttgtattggaatcagaaattgagtctggtcgaggggctttttgtaacataatttgtacacagccacgaagaatatctgcaatggcagttgcagaaagggtatccacagagagaggagaaaatcttggtgaatcggttggctataaagtccgattggagggaattaaggggaaagatacacatttgcttttctgcaccagtggcatcttactaagacgcttactgagtgaccgaaacttgaatggtgtgactcatgtatttgttgatgagatacacgaaaggggcatgaatgaagatttcctgttgattgtactaaaagagctgttatcacgtcgccgtgatttgaggctgatattgatgagcgctactctaaacgcggaactcttctcaagttattttggaggagcgccaactatccatattcctgggttcacacatccagtaagggcacattttttggaagacatattagagaggtcaggctacaagttgacctcaagcaatcaacttgatgattacgggcaagataaagtctggaaaactcagagacagctattgcctagaaaaaggaaaaatcaaattactacacttgtcgaggaagcccttaaaaattcaagcttcgagatctatggctccaggacacgtgattctctagtgaattggaatcctgattgcataggtttcaacctcatagaggctgttctgtgccacatatgtcgcaaagagcgacctggtgctgttttagttttcatgactggatgggacgatattagttgcttgaaggatcaactgaaagcacatccattgttaggtgatccgaatagggtttttctgcttgcatgccatggttctatggctacttctgagcagaggctaatttttgagaagccacctcctaatgttcggaaggtagtccttgccacaaatatggcagaagcaagtattacaataaatgatatcgtttttgttgttgattgtggtaaagcaaaggaaaccacatatgatgctctaaacaatactccatgcttactcccctcatggatttcgaaagcttctgcccgtcagaggaggggtagagctggccgtgtgcaacctggagaatgctaccatctgtaccctagatgtgtgtatgatgcatttgcagactatcagcttccagagcttcttagaactcctttgaattcattatgtctgcagataaaaagtttgcaagttggaagcattggggagttcctatcagctgctctacagcctccagaaccacgagctgtcgagaatgcagtggaattcttgaagatgattggagcattagatggaaatgagaaccttactgatcttggacgatacctttccatgcttccagttgatccaaaattgggaaagatgctcataatgggtgcagtttttcgatgcatagatcctatacttactgtagttgctgggcttagtgttcgggatcctttcctgttaccacaggaaaagaaggatttggcaggaacagcaaaagctagattctcagcaaaggattatagtgatcatatggcccttgttcgggcttatgaaggatggaaggatgcagagagagaagggtctgcttatgaatactgctggagaaatttcctttcttctcaaacactacaagccattcactctctccggaagcaattcagctatattttaaaggattccggtttgatagactctgatgggaatacaaacaacagtttgagccataatcaatcattggtccgcggtattatatgttctgggctttttcctgggatagcatctgttgtgcatcgagaaagctccatgtcctttaagaccatggatgacgggcaagttcttctttatgctaattcagtgaatgcaaaatatcagaccatcccatatccatggctggtctttggtgagaaggtgaaggtgaatgctgtcttcatccgtgattcaaccggagtatcagactccatattgattttgtttggcggtgctgtagcaaaaggaggcatgctgttatgtttcaggccgggcacttgaagatgctcgatggctacattgatttcttcatggaccccagcctgtctgaatgctacctgcaacttaaagaagaactcgataaacttatacagcagaagcttgaagacccaaacttcgacatccacaaggaaggcaagtacatcctattcgccgtacaagagctcgccgccggcgacctgtgcgaagggaggttcgtgttcggccgcgagacgagccgggcccggctccggagccccgaggacgacggcaagagcaacctcataaaggacgggatgaaccccaagagcctgctgcagacgctgctgatgcgggccggccacaccccgcccaggtacaagacgaagcacctcaagacgaacgagttcagggccgtggtggagttcaaggggatgcagttcgtggggaagccgaagcggaacaagcagctcgcggagcgggacgccgccatcgaggcgctggggtggctgacgcagacctccggcgtgaaggctccggacgagaacgacgacgactcgccgctggacctgactgacagcatgctcaagctcctcaccaggccgaggcggcactcgaagaatagctctaggaaacggtgattttttgggcgaggatttgctgtagattgatcgcgcacacgcacaaaaggcatagagagagagagagagataggaaacgtcagctttggttacacgaatgcctcatggtctcgatgtgttgctttgtacattttttatttttatttttccacgctatgtcatcagaatcagaagttcctccatcctgctgattgctgtcaccgtagaacatggtttaaaaaattaaaataactgcctatagcgctgttatttctatagaaataaccttccgaagaatctaaatctacgatattacacttttaaccgctatttcagctagaactgctttagcctaatttagctttgctaaatgtcgtagctttaatgctaaacaacaaat

SEQ ID NO: 219274 - DNA, 3848 bp, Zea Mays
ctggcgctgcctggcaggctggctggctcggtgcctcccctgagttccatctcctgtcatgccgccgccgcagtagagctaacgagccacgggtagcatgcgccgcggcctgcgtcgcgggttgggcatcctcctcgtcccgctcccgcacgcacccagccgcctgccgccgatctctctcgcggctctcctcccccgacgcttcaatggcttctcccgccactccttctgcagcttccccgtcggggagcgcgccgtcgagcagttctcagacgacgaatacgaccacgagtacgaggacctccggccgtcgtcatcggtggcgaacatcgacgagtggaggtggaagctgagcatgctgcagcgcaacgcggaggaacaggagatcatctccagggaccggagggaccgccgggattatgaccagatagccaacctcgccaagaggatgggactctacagtgagatgtacggacgggtcgtggttgcgagcaaggtaccactgccgaactacaggcctgatctggatgacaagcggccgcaaagagaggtggtaatcccgctgggtttgcagaggagagttgaaggacttgtgcaggagcacctagaccgcgcattcttaccactgaataaatgtggtggcaacacaaaaaatggctctgacatgactgagaatgcgaacctggatgagcagcatgattcccttcttgatcggtcagtcatggagaagatacttcagaggaagagcattcggatgcggaattttcagagaagttggcaggaatcacccgaaggtgctaagatgctagaattccggagatcccttccagcagacaaagaaaaagaaaggcttctagcagccattgcacgcaatcaggtcattgtaatttctggtgagacagggtgtggtaaaacaacacagctgcctcagtttgtattggaatcagaaattgagtctggtcgaggggctttttgtaacataatttgtacacagccacgaagaatatctgcaatggcagttgcagaaagggtatccacagagagaggagaaaatcttggtgaatcggttggctataaagtccgattggagggaattaaggggaaagatacacatttgcttttctgcaccagtggcatcttactaagacgcttactgagtgaccgaaacttgaatggtgtgactcatgtatttgttgatgagatacacgaaaggggcatgaatgaagatttcctgttgattgtactaaaagagctgttatcacgtcgccgtgatttgaggctgatattgatgagcgctactctaaacgcggaactcttctcaagttattttggaggagcgccaactatccatattcctgggttcacacatccagtaagggcacattttttggaagacatattagagaggtcaggctacaagttgacctcaagcaatcaacttgatgattacgggcaagataaagtctggaaaactcagagacagctattgcctagaaaaaggaaaaatcaaattactacacttgtcgaggaagcccttaaaaattcaagcttcgagatctatggctccaggacacgtgattctctagtgaattggaatcctgattgcataggtttcaacctcatagaggctgttctgtgccacatatgtcgcaaagagcgacctggtgctgttttagttttcatgactggatgggacgatattagttgcttgaaggatcaactgaaagcacatccattgttaggtgatccgaatagggtttttctgcttgcatgccatggttctatggctacttctgagcagaggctaatttttgagaagccacctcctaatgttcggaaggtagtccttgccacaaatatggcagaagcaagtattacaataaatgatatcgtttttgttgttgattgtggtaaagcaaaggaaaccacatatgatgctctaaacaatactccatgcttactcccctcatggatttcgaaagcttctgcccgtcagaggaggggtagagctggccgtgtgcaacctggagaatgctaccatctgtaccctagatataaaaagtttgcaagttggaagcattggggagttcctatcagctgctctacagcctccagaaccacgagctgtcgagaatgcagtggaattcttgaagatgattggagcattagatggaaatgagaaccttactgatcttggacgatacctttccatgcttccagttgatccaaaattgggaaagatgctcataatgggtgcagtttttcgatgcatagatcctatacttactgtagttgctgggcttagtgttcgggatcctttcctgttaccacaggaaaagaaggatttggcaggaacagcaaaagctagattctcagcaaaggattatagtgatcatatggcccttgttcgggcttatgaaggatggaaggatgcagagagagaagggtctgcttatgaatactgctggagaaatttcctttcttctcaaacactacaagccattcactctctccggaagcaattcagctatattttaaaggattccggtttgatagactctgatgggaatacaaacaacagtttgagccataatcaatcattggtccgcggtattatatgttctgggctttttcctgggatagcatctgttgtgcatcgagaaagctccatgtcctttaagaccatggatgacgggcaagttcttctttatgcttgaatgcaaaatatcagaccatcccatatccatggctggtctttggtgagaaggtgaaggtgaatgctgtcttcatccgtgattcaaccggagtatcagactccatattgattttgtttggcggtgctgtagcaaaaggaggcatggccgggcacttgaagatgctcgatggctacattgatttcttcatggaccccagcctgtctgaatgctacctgcaacttaaagaagaactcgataaacttatacagcagaagcttgaagacccaaacttcgacatccacaaggaaggcaagtacatcctattcgccgtacaagagctcgccgccggcgacctgtgcgaagggaggttcgtgttcggccgcgagacgagccgggcccggctccggagccccgaggacgacggcaagagcaacctcataaaggacgggatgaaccccaagagcctgctgcagacgctgctgatgcgggccggccacaccccgcccaggtacaagacgaagcacctcaagacgaacgagttcagggccgtggtggagttcaaggggatgcagttcgtggggaagccgaagcggaacaagcagctcgcggagcgggacgccgccatcgaggcgctggggtggctgacgcagacctccggcgtgaaggctccggacgagaacgacgacgactcgccgctggacctgactgacagcatgctcaagctcctcaccaggccgaggcggcactcgaagaatagctctaggaaacggtgattttttgggcgaggatttgctgtagattgatcgcgcacacgcacaaaaggcatagagagagagagagagataggaaacgtcagctttggttacacgaatgcctcatggtctcgatgtgttgctttgtacattttttatttttatttttccacgctatgtcatcagaatcagaagttcctccatcctgctgattgctgtcaccgtagaacatggtttaaaaaattaaaataactgcctatagcgctgttatttctatagaaataaccttccgaagaatctaaatctacgatattacacttttaaccgctatttcagctagaactgctttagcctaatttagctttgctaaatgtcgtagctttaatgctaaacaacaaat

SEQ ID NO: 219275 - DNA, 948 bp, Zea Mays
aaatatccttgtttggcaaccatatcttccttgtctatgcgagcgattgggcttgaaggggtttcaacgtttattgctggagtgtggggtacaggtacaggatcgacaacgttaacagagaacatacacaccctcgaaacaaccaaaatgggcagcaggagggctttgcagcttggggcagccgtgttagtcatcttctccttctttggtaaaatcggagctctcctagcctctatacctcttgccttggccgcctctgttctgtgcttcacctgggcgctaattgtcgcgcttggtttgtccacattgcgatacacccaagcagcaagctccaggaacatgataatagttggatttaccctgttcatctccttgtcgatacccgcatactttcagcagtatgaacccagctccaacctaatcttgcccagctatcttcttccatatgctgcagcgtcaagtgggccagttcacacagccagcagcgggctgaactatgcagtgaacgcgctcctatccatcaacgttgtggtggctctccttgtcgcgttgatccttgacaacacagtgccaggcagcaaacaagagcgcggtgtgtacatttggacagatcccaaatccctcgaggtggatcctgctacattggaaccctaccgattgccggagaaggtttcgtgctggttcaggtgggcaaagtgtgtcggcatctgaaagctcttaggagtggcggtgaagattctatttattccattggtacctgctatatatatacccatgtaaagttatggtcatgttagagggaacacgttatacgagctatgctatgtaatgtaagtttgtagtaatactacgttcaaataacagttagagattattcgttttgctctcaatctacatggattgagtgggttttaattaaaaaagtcaaatttttttataatctttttt

SEQ ID NO: 219276 - DNA, 1096 bp, Zea Mays
cgctgccgtaccgatgtttctactgcgtggaaaactgctgcctgggtgagggttccctatccgttccaatggggccctccaacgttccatttcaagacggttatcatcatgataatagtttctctggttgcttcagttgattcgctttcatcgtaccatgcggcgtcactgctggtaaatctaagcccaccaacacgtggagttgtcagcagagcgattgggcttgaaggggtttcaacgtttattgctggagtgtggggtacaggtacaggatcgacaacgttaacagagaacatacacaccctcgaaacaaccaaaatgggcagcaggagggctttgcagcttggggcagccgtgtaaaatcggagctctcctagcctctatacctcttgccttggccgcctctgttctgtgcttcacctgggcgctaattgtcgcgcttggtttgtccacattgcgatacacccaagcagcaagctccaggaacatgataatagttggatttaccctgttcatctccttgtcgatacccgcatactttcagcagtatgaacccagctccaacctaatcttgcccagctatcttcttccatatgctgcagcgtcaagtgggccagttcacacagccagcagcgggctgaactatgcagtgaacgcgctcctatccatcaacgttgtggtggctctccttgtcgcgttgatccttgacaacacagtgccaggcagcaaacaagagcgcggtgtgtacatttggacagatcccaaatccctcgaggtggatcctgctacattggaaccctaccgattgccggagaaggtttcgtgctggttcaggtgggcaaagtgtgtcggcatctgaaagctcttaggagtggcggtgaagattctatttattccattggtacctgctatatatatacccatgtaaagttatggtcatgttagagggaacacgttatacgagctatgctatgtaatgtaagtttgtagtaatactacgttcaaataacagttagagattattcgttttgctctcaatctacatggattgagtgggttttaattaaaaaagtcaaatttttttataatctttttt

SEQ ID NO: 219277 - DNA, 799 bp, Zea Mays
gttccctatccgttccaatggggccctccaacgttccatttcaagacggttatcatcatgataatagtttctctggttgcttcagttgattcgctttcatcgtaccatgcggcgtcactgctggtaaatctaagcccaccaacacgtggagttgtcagcagagcgattgggcttgaaggggtttcaacgtttattgctggagtgtggggtacaggtacaggatcgacaacgttaacagagaacatacacaccctcgaaacaaccaaaatgggcagcaggagggctttgcagcttggggcagccgtcgtcaagtgggccagttcacacagccagcagcgggctgaactatgcagtgaacgcgctcctatccatcaacgttgtggtggctctccttgtcgcgttgatccttgacaacacagtgccaggcagcaaacaagagcgcggtgtgtacatttggacagatcccaaatccctcgaggtggatcctgctacattggaaccctaccgattgccggagaaggtttcgtgctggttcaggtgggcaaagtgtgtcggcatctgaaagctcttaggagtggcggtgaagattctatttattccattggtacctgctatatatatacccatgtaaagttatggtcatgttagagggaacacgttatacgagctatgctatgtaatgtaagtttgtagtaatactacgttcaaataacagttagagattattcgttttgctctcaatctacatggattgagtgggttttaattaaaaaagtcaaatttttttataatctttttt

SEQ ID NO: 219278 - DNA, 500 bp, Zea Mays
ctggcaaacaataagccaggaggggccttagacttagtactgttgaaacatgaatgagcagacttcccttacacgttgacaccttcaggaatcagatgacagccccggatacagagttccggaggtggaaatgtccggccagtactctcaaaagagcgagctcctgactggccggaaagcgttcgacaggtgagcaagtacagcgctgcgacacttgaccctgcaacaaacaaagacgatgactgttgcagctctcaagcaaggtcccagctatcgttggtccagtgggcgtcgccccagctgcacgacatcgaccagatgacgctggaggggctgtgccacgcgaagtcctctgcgtccagattggtcggtttccggttgcgcaacctgagccagaattcaggccgcccatgtcggaggtcgtccagtcactggtccgtcttgtgcagcgagcgagcatggggacgacgacagcgctgagtggggaccacgcgtcctag

SEQ ID NO: 219279 - DNA, 549 bp, Zea Mays
gtcgcagtccctcgtgtctttcactgtccaacccctggccccgtgaaccgtcccatcaaacattcgagctccccccgcctggacgcgcctacgacaaggcgactgccgccgccgaggccgccaacgacgaggttgccgccaaatcctccacgacgtatgtcttcactgcgacggacacgctcacctaagacgtccctggatgtcggattcgccggcggaagcgcagcccccgcgatcgtcgaggacgacgtctccgccccatcaaccgcggagccccgtcgatctcgctggaattgtggctccgatcccatccggtctatttgctcgcacacgcaagagtgacccggattaggcccgcccgcctcctcaaccgccacctctgtccacgatttcgtcgtcaaggatgcgagcggtcgtagacctcaccacctacaagtaaggggaaggttcttatcatcattaacattgcatcccactgtggcttaaacaactccaactacactgagctggataagctctttgagagtatatggaccaagcaggcagctt

SEQ ID NO: 219280 - DNA, 691 bp, Zea Mays
gtcccatcaaacattcgagctccccccgcctggacgcgcctacgacaaggcgactgccgccgccgaggccgccaacgacgaggttgccgccaaatcctccacgacgtatgtcttcactgcgacggacacgctcacctaagacgtccctggatgtcggattcgccggcggaagcgcagcccccgcgatcgtcgaggacgacgtctccgccccatcaaccgcggagccccgtcgatctcgctggaattgtggctccgatcccatccggtctatttgctcgcacacgcaagagtgacccggattaggcccgcccgcctcctcaaccgccacctctgtccacgatttcgtcgtcaaggatgcgagcggtcgtagacctcaccacctacaagtaaggggaaggttcttatcatcattaacattgcatcccactggtatgaatcatctgaagcagaaccttacctaaccttcttactattgtcatttactcatcgtttggcccattggaataatgtatcaataaggccgttggtgtcttctactacctggaatcatttgttcctgcttgatataaaataatgcttttatttgtgtttacttatttcactgtcagacatagacatcttttgtttacactatatagaaaaacattattttgtatactgctaattgttgcactgtgaccgattatttcag

SEQ ID NO: 219281 - DNA, 823 bp, Zea Mays
gcagtgagcaggagggtggagaaggtggagagggactacttgtcgtacgacgagccaagaacgtgttctcgggcgaggcatgcaacgaccttggtggcgagttctgcgatgcgtcgtaccatgtcgacgtctttagggagctagcgcacacctgaagcctgatcctaattcccatccatagttcgaatcggtaacacacacgtgtgtgttgctgatgctgcagggtgttcacaatggaggcctacgacctactcgatggcgacgcgtgcaacgcgcagatatactcggtggcatcggcagtgagcaggagggtggagaaggtggagagggactacttgtcgtacgatgagccaagaacggtgttctcgggcgaggtatgcaacgaccttggtggcgagttctgcgatgtgtcgtaccatgccgacgtctttagggagctagcgcagacctgaagcctgatcctaattcccatccatgtttgtccagaaccaagttgatctcacagtcgggtagatgttcacacattgtatctacgtgtagccaagcaagaccaagggtgtatgtaatgtatataggcatgtcttgggttggctcagctgccaaggtatgtagtataaaccaagatgaaatggtactggtgttattccctgttttacgatgttagaagatggaacacaaagctatgcaagtactatgctatgcccgatctgttccctgcacttgcaagccaatggatgaatggagtgtgtgctgcttaagctgacctggatactagccaccatccaactccacaaatggtatggcgggcttgacctaccattac

SEQ ID NO: 219282 - DNA, 1809 bp, Zea Mays
ctgctcaccaccaagttcccaccggggactttcccagtaaaggttgcaatccctgttgtgccaacagtgagggtggttatcactttcaccaagtttgtccccctcatcgagcctgaggagttcttcaccccaatgtcgagccccagcctcttagcgagctcagggtcgggaagcatcatggcgaagcctaacacccaaaagagctcctacctgaagtgggtctcgaagaactcaagaccagaggccgtgaacctgtcacaagtcgcggacaacggcgaccctttcttgtccatccaatatattctaagcattacatgatctgtaatggatgcgcttgttgtggtgcgctgagtgccagtgtagctcgggtgctgcacaagatggtcagtgacatcatgtgtggcttcatccttatgatgtacacgaaggttggactctttggccctattactagctccattgatgttactaaattcatagtaagtgcttttgtatcctttgtgttcaagtctctatgcctaggtagcaaaaggatctagtgaggacatctatttcatgaatgtcatgcttacagaatattacacttatatttccactattgactaatgaagttatttttagaaacaatggtcaagggaccccactctggctctgcagtatataacggaagctcaccacacaagatcgataacccttttagatcatactgtaccaagctgtcgctccacttcaatagaacacttgatcacatacaggaagtttagatcagaaaatgcaggctgccgctactcccgtcaggttctcagatgtgttcccatcaagggccggtcgtggagaagagcacggtggtggttagtgtccctgttgttgtcatggttgagactgctgagatcgactacaactcgagcttctcagttcgaatcggtaacacacacgtgtgtgttgctgatgctgcagggtgttcacaatggaggcctacgacctactcgatggcgacgcgtgcaacgcgcagatatactcggtggcatcggcagtgagcaggagggtggagaaggtggagagggactacttgtcgtacgacgagccaagaacgtgttctcgggcgaggcatgcaacgaccttggtggcgagttctgcgatgcgtcgtaccatgtcgacgtctttagggagctagcgcacacctgaagcctgatcctaattcccatccatggtgttcacaatggaggcctacgacctactcgatggcgacgcgtgcaacgcgcagatatactcggtggcatcggcagtgagcaggagggtggagaaggtggagagggactacttgtcgtacgatgagccaagaacggtgttctcgggcgaggtatgcaacgaccttggtggcgagttctgcgatgtgtcgtaccatgccgacgtctttagggagctagcgcagacctgaagcctgatcctaattcccatccatgtttgtccagaaccaagttgatctcacagtcgggtagatgttcacacattgtatctacgtgtagccaagcaagaccaagggtgtatgtaatgtatataggcatgtcttgggttggctcagctgccaaggtatgtagtataaaccaagatgaaatggtactggtgttattccctgttttacgatgttagaagatggaacacaaagctatgcaagtactatgctatgcccgatctgttccctgcacttgcaagccaatggatgaatggagtgtgtgctgcttaagctgacctggatactagccaccatccaactccacaaatggtatggcgggcttgacctaccattac

SEQ ID NO: 219283 - DNA, 1678 bp, Zea Mays
gaattccttccgttgcctggcgaaccgcgtgcgcgtcgtgcgtcggctccgcgtgctgctcaccaccaagttcccaccggggactttcccagtaaaggttgcaatccctgttgtgccaacagtgagggtggttatcactttcaccaagtttgtccccctcatcgagcctgaggagttcttcaccccaatgtcgagccccagcctcttagcgagctcagggtcgggaagcatcatggcgaagcctaacacccaaaagagctcctacctgaagtgggtctcgaagaactcaagaccagaggccgtgaacctgtcacaagtcgcggacaacggcgaccctttcttgtccatccaatatattctaagcattacatgatctgtaatggatgcgcttgttgtggtgcgctgagtgccagtgtagctcgggtgctgcacaagatggtcagtgacatcatgtgtggcttcatccttatgatgtacacgaaggttggactctttggccctattactagctccattgatgttactaaattcataaaacaatggtcaagggaccccactctggctctgcagtatataacggaagctcaccacacaagatcgataacccttttagatcatactgtaccaagctgtcgctccacttcaatagaacacttgatcacatacaggaagtttagatcagaaaatgcaggctgccgctactcccgtcaggttctcagatgtgttcccatcaagggccggtcgtggagaagagcacggtggtggttagtgtccctgttgttgtcatggttgagactgctgagatcgactacaactcgagcttctcggtgttcacaatggaggcctacgacctactcgatggcgacgcgtgcaacgcgcagatatactcggtggcatcggcagtgagcaggagggtggagaaggtggagagggactacttgtcgtacgacgagccaagaacgtgttctcgggcgaggcatgcaacgaccttggtggcgagttctgcgatgcgtcgtaccatgtcgacgtctttagggagctagcgcacacctgaagcctgatcctaattcccatccatggtgttcacaatggaggcctacgacctactcgatggcgacgcgtgcaacgcgcagatatactcggtggcatcggcagtgagcaggagggtggagaaggtggagagggactacttgtcgtacgatgagccaagaacggtgttctcgggcgaggtatgcaacgaccttggtggcgagttctgcgatgtgtcgtaccatgccgacgtctttagggagctagcgcagacctgaagcctgatcctaattcccatccatgtttgtccagaaccaagttgatctcacagtcgggtagatgttcacacattgtatctacgtgtagccaagcaagaccaagggtgtatgtaatgtatataggcatgtcttgggttggctcagctgccaaggtatgtagtataaaccaagatgaaatggtactggtgttattccctgttttacgatgttagaagatggaacacaaagctatgcaagtactatgctatgcccgatctgttccctgcacttgcaagccaatggatgaatggagtgtgtgctgcttaagctgacctggatactagccaccatccaactccacaaatggtatggcgggcttgacctaccattac

SEQ ID NO: 219284 - DNA, 10015 bp, Zea Mays
tttcaatatatcttatcataacatgttcacctagtaaatagataaaagctccttagtacaacaagaaagaacaatattgctattggttagaaggggcgggttttattggctgtgtgttggtcagggaatgggaatggcagtgggcgcgagagagacaggacggggaatgggaaaggaagggaatgggaacggcagctagcgcctgagaggacggggaatgagaatgaaaaagggagaacatagaatgggaatgggctgaaccaggaatggcagaaccagaaatgacaggctactcttgcagtcttaataagtagtagagataagaatgacaaatataaaaatggcttataagatgaaaaatacaaggatgcaaagaacacatgagatcaacatataagaggctaaaagggcttaaatgacgtcaattgatagtggaatctttgcatagcttaacattaaataaaaggacatctggacattgaacacccaagtatgtggctggaatttcttgaaagctctccttgagctattagtgttatgaccggcagcccagcagcccagcagccctagccctaataaattcagttagtttgttagatggataaatatcagttagtttatttagatggataagtattagttagtttgtttagatggataagcattagtttagaactcctgtatatagttggttagtttgttagggggctgctatcacaacctatatattgtaccctttggttaaggaagaaatcaagcatgcaatacttgcccgtgcttcccccaacccatctactgttcacccgcatacaattcatctgagggactgttcatacgcgacactattcatctacgatcactattcgataattcctagctccgccactgcttaggcatcatacatgaaataggaacaagtagaattattatatttaattacgctaaccaaaatttggactcgaggcctatggctctgataccatattgagatgcatgcaccaactaattcaaccaaaaagttttaaccgatggaaagggatggacaattcacttatatttctataatgaaaagaggcgcagtaagaacaagatttgtgaatgcttattataaatagaggtgattaacctagaattcaattgcgcattctctactttacagtgccaactttaaagatttctttgtttatttgtgtctgatatcataggaacatatttcgtctatatctgtaatgtatcatagctgggtgcaaatgtgagctgaaatgatcatgactcatgagtgttagactattagccgccgcccggtttccctagccgctaccactactgccagagccatggctagtggtcccccctctagctcctctccaccctcaccccttcctctccactgagccaccgtcgttgcccttgctgccccttcctccagccaccggcgcaacgacctctttagctgttgttgctggcacgactgccatagccggtgcctgcctatcgctgcctctgctcggcgcggggcctgggcaacccatgtcgcctctgtctttcctagtaggcccgtagacccccctcccgcggatctccctgtatcggccaccgccgctgtagccctagccaccgcctgggcgtagtgtgctagggctatggcctggccattgccggcctggctgcccctggcctagctacccttggtctaggcgtggctggccagggcctcgctactatcagcttggtcatcgttgcatggcttcgggcagcctggacgccgctccctccatctcgaacatctactttaggccctctctatccttcgtacctttgtcggatgctctgccacccatcgacgttgtggctgcccaatccagctttgtcatggccctcatgactgctaaggcagtagtggctgccgcctgggagcacgaacgcgtcgttgctctcgcctggaagcatgaacgcactgttgccgataccctcgccagtcatacgtccgctgtgcgaccttatcctcctcatcctgcaacactatgccctggaagaccatgtcctcattgacataacgtccctcactatcccctcctggcgacggatgcataatgggggggggggtcctcttctagatccattggacattcacttttgagctgcaggatgtcgttcgcgagtgtggcggcactgcccgcagaccttggttgccattgaggagcaattctttggcaattgtggggctcatgctcttcacctcaacgtcgcctttcagacctttgtctaggaggacctctccatcatcgagtattgtcgccagatgaaaggctggcaacctccctttgtgacctcggggagcctgtctccgatcgcacacatgtccttaacctcctccgtggcttcaatgagcgctacaattacctctagatttggatcactcgctcggtcccatttcccttgtttccacaaggtttgcaatgacttcatcctcgaggagatcaccaaggggcgcctcctcgcttcgacaccgctatcgctctctacagctccacccatgagtgccagtccttgcgcccgtcctcttctactcctaccttggggggcttgtcttcacgctcgtctgtcccctttggccgtgggctccacgcccctccctcctagcccaggcccggggcagggcgagttttaggtgggtctttgctatcagatgaagggtgactatgggggtgggggtggctagagggatgccccttcgccctttccctacaacccatggaccggctgcatctctatgtggcctggcttggcctgtccttgggtggaccttcattgcatctgcctccaccctagacggctaacctgacaataccccgctcaaggtatcctctcgaccctctcgccaccagcaccttagcccgctactacccctaccaccccacatcgttcctagaaccgatggttttagtgggtgggatttgcagtcacttactagctcgttcagcacgattattctaacttcttctatcattgactgggttgctgattccggtgcgtcctaccacatcgctctggatgctggtatactttcttcttctcacccaccgcttctgtctcatccttcatctatcataggaacattctcccggtcacctctgtaggtgatttggttcttctcggacctttctatcttcgcaatgttcttgtggcccctatatcattcaaaatattttatttgttcgtcagtttaccattgataactcttgctctattgagttttatccttttgtattgtccgtgaaggatctttctacccggagccttctcgcctactatgatagctctggcccctgtacaccttgcgactgcctgcgtccacttctccacctaccgcttccactacacatcgcttttgtcctcgccgcagtcgcacacactgactacttccactacctccagcacttggcatcgttgatctggtcatcctagccctgacgtgttgtccaaattgtgtagtagttcagttgtctcttgtactaggggcacctctgagcatctatgccacacatgtcagctaggtcatcatatttgacttcctttctctagctcctcttagcatgtgcatgattttgatctcatacactgatttgtggacctctcatgttatcagtgtttctggttataaatattatctagtggttattgacgattgctctcattattcgtggacttctcccttgcgttcgaagtccaacacatttgcgtctcttttgcacttcatcacttgggtttctacttagtttggccacactattaaggttgtccagtgtaacaatggccgtgagtttgataactcctctcgatcattcttctcccatggtgtctggctccagatgtcttacccctatacttctcttcaagcaaggttgagcacatgattcgcattattaacaacatcatgtgttccttgctctttgatgcatccgttcctgctcgctattaggccaagagcctccacaccgccacctattttcttaatcgccttactactaaggcagcttgcgcttcaacacccctctctgctctttttggcaccactccatcctatgatcatctttgcgtctttgggtgtgcatgcttcccaacctttttgctactgcttcccataagctttcccctcactccacccattgtgtcttcctcgattactcccctgatcacaaagggtaccggtgtcctgacctcaccactcatcatttcttgatctctaatcacgtcatcttcgccaggacaaatttccccttatcaacccctcccggcccacgatcgactctcttctcgagtaagactttcttcttgaacttgatctcgtggctccctttggtcagccaccctttatttttttcactgcaggttcatccctgttgccgccgcccgcgacacgtgttcccctggattccttccgggctatcctaccgcctaggtcggactgtgagcccctagatggcctctgctagactgccggtagcaccgttggccccgcctttgccctcaccttctctgacctcgcccacggcattacgaatctcccaggtgccctagctggccctagccccttctcgctacgccaaccctatgcatgtctatcagggacatgcacgggtgggtgaaccaccccgctcccgggcagagccgacagtgtatcatccccccttcttcattgtgaccctcgccgtgcccacctgatggtggcttgatagactgctagggttcttcgccctgtcaactgtcttgtcctctccacgatctccttcctatcagtctcccccgtgtcgtcttttgttcatagtgccctcatcgatcctcactaaagtcatgctatggaggaagagtgtcacacccggatttaaggaacaaagccgggtgcatctcatatatacaccagggaagacaacacatataataacagagtgcatagagataaatgtcataaatatcataaatgtacttgttacatagcggaagtcttacaaaataaatgataaaataaaacgagctaactattattccctggcgccacaaagctgcctgggagacaccacctagatcaagtcgaaagcctcagagttaggtggctcctcttcgaccacctgttcttctcctgtggggggtgtgagacagcaagagtgagctcacatatcttcatagctcaacaagtcgtggggaataatgtgcatgaactcaccaaaggtgggagttcatgtgaaatgtaaggctaatcaacaaaataaaggctgaagctgagcattgcttttataagttggtcaaaattttattagcagttactaagtgtaagtaaataccaaaccttagtcataataaataaaagtaacaataaaataatcccaatgcgatgcaaatgacaaattgagttttaattccatagattaatcatgtgagggtccgagctgctcatgactgtaagcacggctagtataccagttttacactctgcagaggttgcgcatctttacccacaagtcatgttacccatctgccaagagacgaccaatcccgtacacctctaccgaggaggcgaggcagggtaacactacgaggcctttacaaagttccactagcttcagaaaacccgctacagtttataggaagctccagtgcaggaatccctcgcctgaccgccatcgcagcaaaatcaacccagtgacctccctacactgaccactcccgtactgcccttgcccttttcgggtaaggaagtcatccactagctttcctagttaatcagccaaggacatcccatactacccttatggtagcactgttttcccggatggtcgctccatgttcccattaacataatgatcttaacatgaacagtaataataaataaagaataaaagtataatcatgaataatgtatctccatacccaaatccacataaagcaatagcaagtactacccaaaaatatttcagtagtaaaacaaggtataaagataaccaaaactggggtaacctattggatcccatcaaaattaacctatgcagatcattatgaataataagaacatggctgggtaaaaataagtgatcaagggcacaacttgccttcaatgagctcctgctcagcaacttctatctgctgaacctcaggatccacagtagcttgctcgtctactcgcatcaacacaatacatacatagtatagcaaaaattaacatcacaccaaacatgtaaatagaatacacagtaaaaatctacacattaaaataagaacctaggaacataaatcattaattttggagttatggattttaagttatgaatttccaaaggttttatgtgcttgaaatatgattaaatgagaaattaattttcttactgtttttctgtcaaaacagagacactagatgacaaacaataatattataaaattttagaaattggaatgaatcaatttggactaaaaatgatttttctatgcattttacaagtttctgcaattaatttaatactaaaattcattttctaattgattttatgaatattattctctgtctaggctgtgcctcaatatccaggaaagacatgagcttcattataagcttcccgagacacaatcaacagtgccactggaccacgagtttatttcagtgtttggcgggggctctttaacaaaatgtacccgcgaaggggtatggccagatactggccgttcgatctaacatgagcgctcagattagatttggaactccccgaaccggtaacaagtcgcagccgtccgatcatcaaggaacacaccagatttaaaataacctaactagactaagcgccgcgcgatccagatccaacggtccccaagcccgatctgttctcgcccgcacactagctgatctctggcccagatttatttggccgaagcgttacacaaccaactaatcttcgtcgtccaaaaccggatcaacggtcagcgcacgtcttctcaactctgtctctctcaccgacggcgaacaggacccgacggcggtgccattgctgtgggcaattatctagcacgcgaagacctaagaccctcatctgaacgactctacacgacgctaggaagatatagaatccgatcgaaggccttaccagagactgggattggccgaagacgctggccacggagaatggcgggtccgcggcagagtgtgtacgacggcgagaaattccttccctgcggtccaccaaccgcgccagccgtgggcaccacaagcaccagaacgccacaacgaaggccccgaccgcaaccgaggccaaagcgacgaccaagtcgtgtattcacggtggcggcggcaccctcgccgcgagtcagcgcacggcgaggaaattggaagggcacatgcggtgcgagttggggagttgtgagggtagaacgaaggggagagggagacgaacccggttgtgctcctttaaggacgcggacgtggccgaggtgcctcaacggattgcgcgagatctccgcgctccgccatgctcggcacatccgttgacgggaaggcgagatgacaggcgggtcccagggcgcagcgagtcaccagggtcgcgtcgcgcgcgcggaggagcgacagacaagcgggccctgagcgcagcgaatcgcccggttcgcctgggcgcgggttggcggcatatgacgcgcgggcccgacttgtcagtgcccggttgggcgcgcgcgtgaagggagtctagggcctcgcggagtcaggctggctgggccgccatccgaattcggcccatgcaaccgaatttgtttctattcctttttcttttttcctactttcaaatctagaatctaaattcaaatcttgtgtccaatttttcctcaacttatattgtgtaatcataagtaataattttggggatatttttagatatatatatatatatatatttatatcattttttcttattctcaaacccaaatttctctgattttatttaatgttcaaattttgaattcaaatctagacttgccttaatcataatttttgttttgatgcacaaacaagaaaaagtccagcatgatgcacatattatttatgtgtttttggttatttaattacttaaataagggtgtttacatgtgatatcaacatagaaaaattttatataggaaaaccattcctttttatttggtttacaatgtcgggtattacaaagagtactaggccctccttgccaatcatacctaggatttggtgccccattctccaggtcgcaacgtggtgagtgcctgagtggtgactgggaagtgggtctagacacatgcgcgaaagtccaatagttctctggataggtacaaggcctgctaggttctctagggctttactcaacgtcccggggttgacgacgatgagacgttcaatctagtggtgaagcatgctactgtttgtgctggtgtctcattggatctctcgtttttggcctattcatcagctagatgtcaagagtgccttcctccataggactcttacatagactgtctattgtagtaaatctgtcggctttgttgactctgctcatcctgacatggtctacaagctcaacaagttctctatggtatgaagcaccccccgcacgcttggtatagcaagtttgctacatatccgctctccctaagctttgttgtggctaagtcggacatctttgtgcatctcttggcatagcagtgccactatgtacctcctcctgtatgttgatgacattgtgctcactacctcttcttcggtcatgttgcaccgtatcatcatagcaagaagtcacaatgaaggatctgggtcctcttcatcatttcctggggatgtcgttgagcgtcgctcgaatctttagcaatgttagtacaccctagatgtcctagagcgcactggcatgctagattgcaagccatgtgcgacattggtggacacacatgccaaggtctttggtgatggtgcctctgtcaacgacccactgtctaatgcagtcttgtcggcactctgtctccggttgtacggtgtttcttaggccaagctcatatcttggtcctccaagcgttaggttgtggtctcctgcttcagtgctgaggctgagtaccgggctgtcgctagtgtggtgtctgagacgagctagttgcgccatctccttcaggagtttcatagccctcaccaggagcatgcttgtctattgcgacaacgtcagcaccgtctacctcttcgtcaacctcgcccaacaccagcatacaaagcatgttgagattcatcttcacttcatccatgagcatgttgctgtcggagacgtccacgttcatcacatcccgatgagttcgtagtttgccttatttgatctttccttcttgttgctctcgaaatttctgttcagtttcaatatctgtcatggctagagtttcgactgcggggatgttaaattatttcatttctgtcgaagtgctatgggcctagagcccccgcccatgtaatatataatattgagctcactttttactccttccaacaatagcccactttttactccttcgaacaatgatattttgcatattctcttatttgatttagtacctctgtcccttttgttgcagcacacgtcattgagccctgatggaaagcttgttattattgttggtgatgacacagatgctttacttattgatgctaattcaggaaagactattcattccatgaaaggtcacttggatttctcctttgcttcggcttggagcccagatggcctgacattcgccacaggtaaccaagacaaaacttgtcggatttgggatgccaggaatctcaccgagtctgtccatgtcttgagaggcaacgttggagcaataagatctattcgttttacatccgacgggcacttcttgtcgatggcagaagcagcagactttgtccacatctttgacatcaaaagtgactacaataagagacaggaattggatttctttggcgaggtatccgactgtaaccttgctaacggag

SEQ ID NO: 219285 - DNA, 1208 bp, Zea Mays
cacatgccaaggtctttggtgatggtgcctctgtcaacgacccactgtctaatgcagtcttgtcggcactctgtctccggttgtacggtgtttcttaggccaagctcatatcttggtcctccaagcgttaggttgtggtctcctgcttcagtgctgaggctgagtaccgggctgtcgctagtgtggtgtctgagacgagctagttgcgccatctccttcaggagtttcatagccctcaccaggagcatgcttgtctattgcgacaacgtcagcaccgtctacctcttcgtcaacctcgcccaacaccagcatacaaagcatgttgagattcatcttcacttcatccatgagcatgttgctgtcggagacgtccacgttcatcacatcccgatgagttcgtagtttgccttatttgatctttccttcttgttgctctcgaaatttctgttcagtttcaatatctgtcatggctagagtttcgactgcggggatgttaaattatttcatttctgtcgaagtgctatgggcctagagcccccgcccatgtaatatataatattgagctcactttttactccttccaacaatagcccactttttactccttcgaacaatgatattttgcatattctcttatttgatttagtacctctgtcccttttgttgcagcacacgtcattgagccctgatggaaagcttgttattattgttggtgatgacacagatgctttacttattgatgctaattcaggaaagactattcattccatgaaaggtcacttggatttctcctttgcttcggcttggagcccagatggcctgacattcgccacagactttgtccacatctttgacatcaaaagtgactacaataagagacaggaattggatttctttggcgaggtatccggagcggcctcattgtggcgcttcccgacacatgggttctaggtggaagtgagataaataggagatgggggttgtaccaaacgccttttgttcttagatccatggtggagtggagatactccacggtgaatctaggtgaatgtcagatctaaattcactttttttattattgaagctctaccaaacaagctcttaggtatgatttggtggatttttagctagttggctctttcatctactatagcaagaaactgttttttatctctatccttaaaatgaagaattaggagcctgcaaag

SEQ ID NO: 219286 - DNA, 336 bp, Zea Mays
gaaaaatttaggggaacggttacggatagtctaacgcggttgcagcttgcagggttttccccttccgttctgcattcctcgtccagtccgcccccgatacggcggccacacccccacacccccacacttctccgacaagggaagggaaccccagatctccgccgccccgccagccgctatgccgactgccgccaaccccgccgccgcgctgcccctcaccctcgacctcgaggacttcaagggagacttctcattcgacgctctgtttgggggactggtggacgagctgctcccggagtaccgcggggaggacgacctgctcccggagtaccgcgg

SEQ ID NO: 219287 - DNA, 506 bp, Zea Mays
cagggttttccccttccgttctgcattcctcgtccagtccgcccccgatacggcggccacacccccacacccccacacttctccgacaagggaagggaaccccagatctccgccgccccgccagccgctatgccgactgccgccaaccccgccgccgcgctgcccctcaccctcgacctcgaggacttcaagggagacttctcattcgacgctctgtttgggggactggtggacgagctgctcccggagtaccgcggggaggacgacgccgcgcccgcgccacctcctccgccgcccgtgctcggggcggccccgcccgtcttccccgctgtcgacgagcttcttgggctgttcaagcactcatgcaaggagctcgtcgacctccgtaggcagattgataagcggctccagaatcttaagaaggaggtggcggtgcaggatgccaagcatcgcaagacgctaggggagcccacatcccagcaattgctggtctctcatcaccatca

SEQ ID NO: 219288 - DNA, 3743 bp, Zea Mays
cagcaagcaaacagtagcgcagtatatattggcaaagcatccctttctcgtttcctcgctcgcagtcgcaacacgtttccacgccgtccctccgcttacccggccggccatccccattcccatccttttctcctcctcctcctcagccggccaagctcgctaccgcctcggcgctcctcctccggctcggaatgcgcgatgcgagggctccgcagctccagcagcgagcccatggcggcgtcggcgtcgtcgtcgtcctcctcgtcctcctcgcaggcgccgccagcggccagcagcaggcgcagccgccgccggtagtacctccggcggacctgccggacgtggagaggcagctcaacaacctgaccaacgacatcgcagtcaccatctccgacaagttcagcttctgcgttgccgacctggaggaggactggaacgaggccttcaactacacgtccgacctcagcttcgtggatcggtgcctcacggagacccaaggcgacctggtccagcgtctatgcacgccggacgaagtgaagttctacctggcaagcctgtacgaccgcgacggcgacaagaacatcaacctcaagacgaacataaactgcaacatctcgtcctgggggagggggtgcgacgccggatgggcctgcgccgccgacccggtggtcgtcgttcgggatcccaggaacggcgtcccgctcagagcgaggggctgccaggcatgctgcgagggcttcttctgcccgcgcggcctcacttgcatgctcccttgtccgctaggctcctactgcccacgcgccacggcgaaccagacgactggcctctgcgacccgtacaagtaccagatcaccccgaactcgacgaacggttgcggaggcgctgacatgtgggccgatatccagagcaccgaagagatcttctgcccggctggttaccactgtccgagcacaacaaggaaggacaactgcagcactgggcactattgtaggctcggttccaccgctcaagagaagtgcataataaagggctcctgcgatgagaacacggagaacgaaaacgtcaagatccttggagcttgcatagtgggtgctctgtgcctgctgctactggtcatatacaactgctcggacaagttcctcagcatccgcgagcggaggaaagcgaggtcgagggagaacgccatccagctggcccggcagcagctgaaggcgcaggaggggtggagggcggcgaaacagtttgcgaggaggcatgtgagcggcatgcagggccatctctcgcgcacgttctcgagacgggtgtcgtttcggcagccggtggacccgcacagctccagccgcagggtgcaggaggcgccgctgatgacgcaggagatgtcagactctgccgtgtttgcgtccgagagcaggagcgagatcacggaggtggtgatgccgtcggttgttgtcgacgtcagcgacggcggagaggtcgtcgtggtggacacgaaggaggacaagcctgcgcccaagggaaagcacaggtccacccatacacaggtgttcaagtacgcgtacggcgagatcgagaaggagaagttccagcagcagcaggagagcaggaacctgaccttcaccggggtggttgccatggccaaggatcagcagagggagataacgaggccgttgatcaaggtcgagttcagggacctgacgttgatgctcgggaataataagaagaagaagctgctgaggtccatcaacggcgagctccggccggggcgtgtgactgctgtcatgggcccgtcaggcgccggcaagaccacgttcctcaacgccgtcaccgggaagctcaacggctacaagatgacgggctctgtcctcgttaatggaaaggacgtcaacatccgctcttacaagaagatcattggcttcgtgccgcaagacgacatcgtccatgggaacctcaccgtggaggaaaacctctggttcagtgcaaagtgcaggctacctgcaagcatgaagcatcgcgacaaggtgctggtagtggagagagtaatcgactctctggaccttcaggggaccaggaactcgttggtgggaaccgtggaaaagcgcgggatttctggcgggcagaggaagcgcgtcaacgtgggcatcgagatggtgatggagccatcccttctaatcctggacgagccaacgtctggcctggacagctcctcgtcgcagctcctcctcagagctctccggcacgaggcgctggaaggcgtcaatgtctgtgctgtcgtccaccaacccagctacacgttgtacaacatgttcgacgatctgatgctgctcgcgaaaggaggcttggtggtctacaacggccccgtaaagacggtcgaggagtacttcacgacgactctcgggatccatgtccccgaccgtgtcaacccgccagaccactacattgacatccttgagggcatcgttaagcctgagtctgctggcatcatcaaagccaagcatctgccagtgcactggatgcttcacaatggttatgaagtgccaagcgacatgcaggacgatgccaaggagatcggcgaacagaccccacagttgaggtccggctcctcagtttctgctggctcaacccctcactgcctccccctcaggaacgccttcgcagaagagcgcgaccgtctcgagcaacatttgtcgaaacccaaggacctgtctagcagaaaaacggcagggatactcatgcagtacaaatactacttgggaagggtcacgaagcagcggctgcgtgaagctaggctgctcatggttgatttcctgatacttggcctagctggtatctgcttagggacgatagcgaagctcagtgacaagacattcgggatgcctggctacatatacactatcattgcagtttctcttctgtgcaagattgcagcactgcggtcattctcactggagcggctgcagtacttcagggaaagagagtctgggatgagctctctggcatactttcttgctagggacacgattgatcatttcagtacggttgtgaagcccatcatttacctgtctatgttctactacttcaataacccaagatcaacgattgccgacaactacatcgtgctcctcgcgcttgtgtattgtgtgacggggatcggatacactttcgctatctgcttcagtcctggctcagcgcagctgtgttctgcacttgtaccggttgttctgaccctgttagccactcaaaagagcactccgacattcatcaagagactgtgctactcaaaatgggcgttggagggcttcataattgtaaatgccaagaagtatcctggagtctggcttataactcgctgcggcctgctgttccagaatcagtttgatatccacaactacaagctctgcattctgattttgttcatgtatggtctcttcttcaggatggtggcatttgctgcaatgattttactcaagaagagatgaatgtagtagtttaggtgtaccgtttagttcatatctaatttcttcattcatttgcacatgtgtaaatcatttcggatgagaggttttatagcactgaccagtgtacagatgagaaaaaaaggcaaatacaaattcagattttttttggcattattctttttatattaggtgtacatccccatctctgaaatcctgtgcttgcactagaaaaaagaggattcaacaaaattgttacccgaactattagatctaaagtgtaccatacat

SEQ ID NO: 219289 - DNA, 3724 bp, Zea Mays
cagcaagcaaacagtagcgcagtatatattggcaaagcatccctttctcgtttcctcgctcgcagtcgcaacacgtttccacgccgtccctccgcttacccggccggccatccccattcccatccttttctcctcctcctcctcagccggccaagctcgctaccgcctcggcgctcctcctccggctcggaatgcgcgatgcgagggctccgcagctccagcagcgagcccatggcggcgtcggcgtcgtcgtcgtcctcctcgtcctcctcgcaggcgccgccagcggccagcagcaggcgcagccgccgccggtagtacctccggcggacctgccggacgtggagaggcagctcaacaacctgaccaacgacatcgcagtcaccatctccgacaagttcagcttctgcgttgccgacctggaggaggactggaacgaggccttcaactacacgtccgacctcagcttcgtggatcggtgcctcacggagacccaaggcgacctggtccagcgtctatgcacgccggacgaagtgaagttctacctggcaagcctgtacgaccgcgacggcgacaagaacatcaacctcaagacgaacataaactgcaacatctcgtcctgggggagggggtgcgacgccggatgggcctgcgccgccgacccggtggtcgtcgttcgggatcccaggaacggcgtcccgctcagagcgaggggctgccaggcatgctgcgagggcttcttctgcccgcgcggcctcacttgcatgctcccttgtccgctaggctcctactgcccacgcgccacggcgaaccagacgactggcctctgcgacccgtacaagtaccagatcaccccgaactcgacgaacggttgcggaggcgctgacatgtgggccgatatccagagcaccgaagagatcttctgcccggctggttaccactgtccgagcacaacaaggaaggacaactgcagcactgggcactattgtaggctcggttccaccgctcaagagaagtgcataataaagggctcctgcgatgagaacacggagaacgaaaacgtcaagatccttggagcttgcatagtgggtgctctgtgcctgctgctactggtcatatacaactgctcggacaagttcctcagcatccgcgagcggaggaaagcgaggtcgagggagaacgccatccagctggcccggcagcagctgaaggcgcaggaggggtggagggcggcgaaacagtttgcgaggaggcatgtgagcggcatgcagggccatctctcgcgcacgttctcgagacgggtgtcgtttcggcagccggtggacccgcacagctccagccgcagggtgcaggaggcgccgctgatgacgcaggagatgtcagactctgccgtgtttgcgtccgagagcaggagcgagatcacggaggtggtgatgccgtcggttgttgtcgacgtcagcgacggcggagaggtcgtcgtggtggacacgaaggaggacaagcctgcgcccaagggaaagcacaggtccacccatacacaggtgttcaagtacgcgtacggcgagatcgagaaggagaagttccagcagcagcaggagagcaggaacctgaccttcaccggggtggttgccatggccaaggatcagcagagggagataacgaggccgttgatcaaggtcgagttcagggacctgacgttgatgctcgggaataataagaagaagaagctgctgaggtccatcaacggcgagctccggccggggcgtgtgactgctgtcatgggcccgtcaggcgccggcaagaccacgttcctcaacgccgtcaccgggaagctcaacggctacaagatgacgggctctgtcctcgttaatggaaaggacgtcaacatccgctcttacaagaagatcattggcttcgtgccgcaagacgacatcgtccatgggaacctcaccgtggaggaaaacctctggttcagtgcaaagtgcagcatcgcgacaaggtgctggtagtggagagagtaatcgactctctggaccttcaggggaccaggaactcgttggtgggaaccgtggaaaagcgcgggatttctggcgggcagaggaagcgcgtcaacgtgggcatcgagatggtgatggagccatcccttctaatcctggacgagccaacgtctggcctggacagctcctcgtcgcagctcctcctcagagctctccggcacgaggcgctggaaggcgtcaatgtctgtgctgtcgtccaccaacccagctacacgttgtacaacatgttcgacgatctgatgctgctcgcgaaaggaggcttggtggtctacaacggccccgtaaagacggtcgaggagtacttcacgacgactctcgggatccatgtccccgaccgtgtcaacccgccagaccactacattgacatccttgagggcatcgttaagcctgagtctgctggcatcatcaaagccaagcatctgccagtgcactggatgcttcacaatggttatgaagtgccaagcgacatgcaggacgatgccaaggagatcggcgaacagaccccacagttgaggtccggctcctcagtttctgctggctcaacccctcactgcctccccctcaggaacgccttcgcagaagagcgcgaccgtctcgagcaacatttgtcgaaacccaaggacctgtctagcagaaaaacggcagggatactcatgcagtacaaatactacttgggaagggtcacgaagcagcggctgcgtgaagctaggctgctcatggttgatttcctgatacttggcctagctggtatctgcttagggacgatagcgaagctcagtgacaagacattcgggatgcctggctacatatacactatcattgcagtttctcttctgtgcaagattgcagcactgcggtcattctcactggagcggctgcagtacttcagggaaagagagtctgggatgagctctctggcatactttcttgctagggacacgattgatcatttcagtacggttgtgaagcccatcatttacctgtctatgttctactacttcaataacccaagatcaacgattgccgacaactacatcgtgctcctcgcgcttgtgtattgtgtgacggggatcggatacactttcgctatctgcttcagtcctggctcagcgcagctgtgttctgcacttgtaccggttgttctgaccctgttagccactcaaaagagcactccgacattcatcaagagactgtgctactcaaaatgggcgttggagggcttcataattgtaaatgccaagaagtatcctggagtctggcttataactcgctgcggcctgctgttccagaatcagtttgatatccacaactacaagctctgcattctgattttgttcatgtatggtctcttcttcaggatggtggcatttgctgcaatgattttactcaagaagagatgaatgtagtagtttaggtgtaccgtttagttcatatctaatttcttcattcatttgcacatgtgtaaatcatttcggatgagaggttttatagcactgaccagtgtacagatgagaaaaaaaggcaaatacaaattcagattttttttggcattattctttttatattaggtgtacatccccatctctgaaatcctgtgcttgcactagaaaaaagaggattcaacaaaattgttacccgaactattagatctaaagtgtaccatacat

SEQ ID NO: 219290 - DNA, 1497 bp, Zea Mays
ccctcttgcttcccgtcgtcctcgtcccaagttccaaccccgtgggccgctacatcgccaaaccctaactaggtttttttcaagcctccccttccctaccctcgccccccatggatccgttttccaagaagcgcaagcccgacgacaacggcgccgtcactgcttctcccgccggtggggctgccacgctgggtctcacccgcgaggacgtcctccgcctcctcgagccgctctcccgggaccagcttgcggacatcgcggccgccgctgcactcgtctcggcgcacgcgctcgatgccgtgcgcgcagccgccgaccgcgacccggccctgcgcaagctcttcattcgggggctcgggtgggagaccacatccgactcgctccgcgccatcttctccgcctacggtgacctggaggaggccgtcgtcatcactgacaaatccacggggcggtccaagggctacggcttcgtcaccttccgccacgccgattccgccgtcctcgcactcaaggagccatccaagaagatcgacggtcgcatgactgtcacgcagctcgccgccgccggctcggcaggcgggccgtccgttggggctcccggcagtggcggtgctcctgtggctgatgtgtcgctccggaagatcttcgttgggaacgtccctgcagacatgtcgtcggagcgtctccttgcgcactttgcctcctacggcgagattgaggaggggccgctgggatttgacaagcagacgggcaagttccggggctttgcacttttcgtatataagacacctgagggtgcgcaggcctccctggtggactcggtgaaggtaattgatagccaccagcttgtatgcaagcttgccatagatgggaagaaggggaagcaggggcaatcacagcaatctggacctggcaaccagcagcagcaacagcaacagcagatgctgccgggtggtccgcaggaaattcagggaggcctggggcttggttcacaaatgggagcacagtatggtggccctgggagtggtatgccttcgtttggttttggtggcgttggcggtgggtttgggggtccaaacccttatgctaacatgccatcttccatgggtggaggaggcgcaggtgggttagggtcggtgggaggccaggtgcccactgggttggctggtgctggtggatttgggcctgggggattgggtggtggctcatttgggggatcatctcagtttggtgctgctgggatgggggcatatggtggccttggaatgggtggaggctccatgtaccgcatgcaacagggagcaggtgggctgcctgcaggcgcatttggtgaaggaggaaactaccctcttccaggttctggtttccgaggccacgaccctcaaggtggaatgtctcctcctgggccaggtggcagggctcctcctatgtatcccaacgtgccaccttatttctaagaggcaggttagtcgatttgagccattgagtgcattttct

SEQ ID NO: 219291 - DNA, 2431 bp, Zea Mays
ccctcttgcttcccgtcgtcctcgtcccaagttccaaccccgtgggccgctacatcgccaaaccctaactaggtttttttcaagcctccccttccctaccctcgccccccatggatccgttttccaagaagcgcaagcccgacgacaacggcgccgtcactgcttctcccgccggtggggctgccacgctgggtctcacccgcgaggacgtcctccgcctcctcgagccgctctcccgggaccagcttgcggacatcgcggccgccgctgcactcgtctcggcgcacgcgctcgatgccgtgcgcgcagccgccgaccgcgacccggccctgcgcaagctcttcattcgggggctcgggtgggagaccacatccgactcgctccgcgccatcttctccgcctacggtgacctggaggaggccgtcgtcatcactgacaaatccacggggcggtccaagggctacggcttcgtcaccttccgccacgccgattccgccgtcctcgcactcaaggagccatccaagaagatcgacggtcgcatgactgtcacgcagctcgccgccgccggctcggcaggcgggccgtccgttggggctcccggcagtggcggtgctcctgtggctgatgtgtcgctccggaagatcttcgttgggaacgtccctgcagacatgtcgtcggagcgtctccttgcgcactttgcctcctacggcgagattgaggaggggccgctgggatttgacaagcagacgggcaagttccggggctttgcacttttcgtatataagacacctgagggtgcgcaggcctccctggtggactcggtgaaggtaattgatagccaccagcttgtatgcaagcttgccatagatgggaagaaggggaagcaggggcaatcacagcaatctggacctggcaaccagcagcagcaacagcaacagcagatgctgccgggtggtccgcaggaaattcagggaggcctggggcttggttcacaaatgggagcacagtatggtggccctgggagtggtgggttagggtcggtgggaggccaggtgcccactgggttggctggtgctggtggatttgggcctgggggattgggtggtggctcatttgggggatcatctcagtttggtgctgctgggatgggggcatatggtggccttggaatgggtggaggctccatgtaccgcatgcaacagggagcaggtgggctgcctgcaggcgcatttggtgaaggaggaaactaccctcttccaggttctggtttccgaggccacgaccctcaaggtggaatgtctcctcctgggccaggtggcagggctcctcctatgtatcccaacgtgccaccttatttctaaggtgtgtgacaactcttgggagcatatcctttgaaatggttgtgctgaattcagaagtgttgtctgcttacatggatgccttgcatattctggctacttctgatctggaatggaatgtggaatgagtttgcactcgcagtttcccttattaagggatacatgaagctaggtagttgtgataatgcttagccgtgataatgcttcacatgtactttcttatgagtcatgactgctttgcagtttcattttctatatagataagtgaagttgcattaagtgtgtgttgtgttgattattgtcgtattatcctatgaaacccctttattttcatggtatgatgatgtgtttaatcttatggatttctatttgtcttgtctatctgttgatactcttggtgagcgattggtgactgtaatgcagtttatctctttctttagaatttatatattgtcttatatcttccttgagacacagatagctaattataattaatatggttattgtcagattagaaatctgaacaactgctaatcttttgtatttttttcttgagtcaacgtgacctttttagattttgggtggtagctggagatttcagctattgaaacctgaagatggtttggaattttgtgtttacctgtatttgtcattaggccgtctgcagcattctacccaaggtatggggatagataagctgctggagatagccttattagttaaacaattgttattagtattttgtatttatattttatatataggtgaatgtgatctgctgggtcctaacaagtttaggaaaagctttcttgtttgttttttgaagtcaggtttggcatttcttgctatgaaatttttattttgtgttgtggaggggttagttttgctttggaagttatagtgactggattgtaatatggagggtttgtgatgctgtttgctgtctgggtcagtggtgttgtcattggtgatagtcgaaattgtaatttgttctgtcctgctatgcaacttaatatagattttgtcaagatacatagtaatgtgtcaattttgatcggatgtttggaatagat

SEQ ID NO: 219292 - DNA, 2543 bp, Zea Mays
ccctcttgcttcccgtcgtcctcgtcccaagttccaaccccgtgggccgctacatcgccaaaccctaactaggtttttttcaagcctccccttccctaccctcgccccccatggatccgttttccaagaagcgcaagcccgacgacaacggcgccgtcactgcttctcccgccggtggggctgccacgctgggtctcacccgcgaggacgtcctccgcctcctcgagccgctctcccgggaccagcttgcggacatcgcggccgccgctgcactcgtctcggcgcacgcgctcgatgccgtgcgcgcagccgccgaccgcgacccggccctgcgcaagctcttcattcgggggctcgggtgggagaccacatccgactcgctccgcgccatcttctccgcctacggtgacctggaggaggccgtcgtcatcactgacaaatccacggggcggtccaagggctacggcttcgtcaccttccgccacgccgattccgccgtcctcgcactcaaggagccatccaagaagatcgacggtcgcatgactgtcacgcagctcgccgccgccggctcggcaggcgggccgtccgttggggctcccggcagtggcggtgctcctgtggctgatgtgtcgctccggaagatcttcgttgggaacgtccctgcagacatgtcgtcggagcgtctccttgcgcactttgcctcctacggcgagattgaggaggggccgctgggatttgacaagcagacgggcaagttccggggctttgcacttttcgtatataagacacctgagggtgcgcaggcctccctggtggactcggtgaaggtaattgatagccaccagcttgtatgcaagcttgccatagatgggaagaaggggaagcaggggcaatcacagcaatctggacctggcaaccagcagcagcaacagcaacagcagatgctgccgggtggtccgcaggaaattcagggaggcctggggcttggttcacaaatgggagcacagtatggtggccctgggagtggtatgccttcgtttggttttggtggcgttggcggtgggtttgggggtccaaacccttatgctaacatgccatcttccatgggtggaggaggcgcaggtgggttagggtcggtgggaggccaggtgcccactgggttggctggtgctggtggatttgggcctgggggattgggtggtggctcatttgggggatcatctcagtttggtgctgctgggatgggggcatatggtggccttggaatgggtggaggctccatgtaccgcatgcaacagggagcaggtgggctgcctgcaggcgcatttggtgaaggaggaaactaccctcttccaggttctggtttccgaggccacgaccctcaaggtggaatgtctcctcctgggccaggtggcagggctcctcctatgtatcccaacgtgccaccttatttctaagtgaatgtgtgactcaggtgtgtgacaactcttgggagcatatcctttgaaatggttgtgctgaattcagaagtgttgtctgcttacatggatgccttgcatattctggctacttctgatctggaatggaatgtggaatgagtttgcactcgcagtttcccttattaagggatacatgaagctaggtagttgtgataatgcttagccgtgataatgcttcacatgtactttcttatgagtcatgactgctttgcagtttcattttctatatagataagtgaagttgcattaagtgtgtgttgtgttgattattgtcgtattatcctatgaaacccctttattttcatggtatgatgatgtgtttaatcttatggatttctatttgtcttgtctatctgttgatactcttggtgagcgattggtgactgtaatgcagtttatctctttctttagaatttatatattgtcttatatcttccttgagacacagatagctaattataattaatatggttattgtcagattagaaatctgaacaactgctaatcttttgtatttttttcttgagtcaacgtgacctttttagattttgggtggtagctggagatttcagctattgaaacctgaagatggtttggaattttgtgtttacctgtatttgtcattaggccgtctgcagcattctacccaaggtatggggatagataagctgctggagatagccttattagttaaacaattgttattagtattttgtatttatattttatatataggtgaatgtgatctgctgggtcctaacaagtttaggaaaagctttcttgtttgttttttgaagtcaggtttggcatttcttgctatgaaatttttattttgtgttgtggaggggttagttttgctttggaagttatagtgactggattgtaatatggagggtttgtgatgctgtttgctgtctgggtcagtggtgttgtcattggtgatagtcgaaattgtaatttgttctgtcctgctatgcaacttaatatagattttgtcaagatacatagtaatgtgtcaattttgatcggatgtttggaatagat

SEQ ID NO: 219293 - DNA, 1467 bp, Zea Mays
gctgcatgctacggctaccaatagctagttctggggcagtacaaatgcgagcaactcggtgcgaaaccacaccacccatcgccaccaccaatcaatccatcacgttagctgcacctgcgcctctccttgaggtcgcgcagccagcaatggcgtgctccaaagcggtgctgctcgccgcgctcctagccgtcgcaggagcgctctcctccgctgcggtgtgggaggactacgaccaccacatgtaccacaagtgctacaggtcctgcatgaggaagtgcgacgacgacgatgccgatgatgccttgaagaatagcatcagccccgttgtcacctctgtgtccgatgatcacgaccatgacgacgatcacgaccaccacgatgatcacaaccacgaccacgacgaccaccatgatgatcacgaccacgaccaccatcacgatgatcacgaccacgaccatgatgatcacgaccacgaccataatgacaaccacggcgaacaccatgacgacgacgatgaggatgacgattacaactattgccgggtggagtgcatcgaggactgcatcgactacgtgcccggcatttgttaccgccactgcgtctcctactcctgcctctacctgccaccgtctaccggagagcagcttgcttccggcgatgcggccacagatgctatcaccatgaccatcatcgtcatcaccaccatcaccaccaccaccatgaagatgaccatgacgatgacgataacgatgaccaccacgatggcccaacgccaagcccacctaaacctgaacccaagccgcaaccaccaaagccagggccgacgcccaagccgccgatgcctagtccaacgccagagccaccgcccccatacaacagaagccaagtacacgccgaaactgccgcaaaagccgtcttcgtctagtacaccacgcaccgatgccgcccaatactctgcagtcaccaccaaaacaggcatcgtccactgaaccgaggaaccaaaactagcactggcacctcaagctacccacaacagttgatggataactcataactcattcatgcatgattagaatacacgaggattatctagctcaactggtagatgtagtctgtagattgggcataaataaatctgatataataagcctagttctatagatccatgtctgcatgatgtacttactgatcgaatggccataatatagtgtaagaattccataattctatgttctcgatcttctatattctcgatcttttatctcactacgaggagggagtatatgtaacttcatatccagcctagcatccgcgtctactcatagtcctggttactgttcatccgacttggttttaaccctgcctgaccgacgtcatatcagctatcgatcgtattatcgattttctattgataatcgtcaattcttatctgatgccgtggttcaatacagtctttatcattacgct

SEQ ID NO: 219294 - DNA, 944 bp, Zea Mays
ccgaagggagccatcatgtcctctataatctccgcccctccgaaaaaaagaaaaagagaacttaaagctcaacttatgctgtgcgcaagaattggagaccatgtagaaataggggcaaatacatgcattgacagagctggagagagacaacggtcggaaatcataccaagattgataatctggtccagataggccacaatgtggtcattgggaagtgctgcatgatatgtgggcaagtagggattgctggttctgcaacgtatgtatagcttcattggttgcacctttcttctgcttatgattgttgtatgattcgtgtgggccatttctcaagattaatcctgttatgggtatgcagactgggggactatgttacattgggtggtagagtggcaattcgggaccatgtctcagtcgcatcgaaggttcgactcgcagctaatagcttggtgacaaaagatattcaggagcctggtgactacggtggattccccgctgtaccgataaatgaatggcgcaggcaaattgcaaatttgcggttgttctcgaagaaagctagcgtgaaaagatagcatccagcaaccccccctgcgcgattttttttccctgacggtagtatttgacagtgactgtagccctcattttttaatcgagcgacattgcttggcttgtttgctgccgcttttgtctctggtgctccaaaatttcggctacacaatggaattcgaccttttgaaagattttttggactcttggttgtttaacttggccataaggaaccctctgcattagtagcggattattttctagctgtctgctcttcatgagttcactttcagagtttgaggcagcagaggtcgttcagttcctgagtccatgtcaataccggcaaaaactataatgatgcaagtcacatataatctgatgcagaaacaccaaaaaaa

SEQ ID NO: 219295 - DNA, 1689 bp, Zea Mays
atacaacctgcgtaagtagccaggcccaatctcccagcccaaagtcccatcccattgctcgttctgtcccttcgttcacaacctcctccacgaccaaacgatccgggttccagcggcggcggcggcggcgaagatgatcataccggtgcgctgcttcacctgcggcaaggtgattgggaacaagtgggacctctacctcgacctcctccaggccgactactcggaaggggatgctctggatgctttggaattgttccgctactgctgcaggcgaatgctcatgacccatgttgacctcattgagaagttgctcaactacaacacactggagaagaccgagacaagttaagtgagcaagcatatcatgctctgaaagcactactgtttcgcagtatcatatatattgtaggcggtatgttgtctcttctctatcaggagaggattgttgtcagtgtgaacttgcttttgctcacgagcattcaaggactgacagtgcatgttgcatctatgccacgatgttggagattttaatcgatataataactgctaactaatactctctttgtctctgtcccaatttataattcgtttgacctttttacatcaagtttgattggctcgtattattgcatcggccgtatgcatactcatgtgcttcgaggtatacaacggccgaaaatggccactcggtccgtcgtcgtcgcgagcatttcgcttcgttgacttccacagcatttcgcttcgttgacttccacaataggctgtacctgtacgtgctgctattattcatctgggactggcatatagtacgttcagattcttcatgttttggcctgatcaggtgtatttttcaccggatctcagtacccgtttggcctgatcaggctatggcgatatgcagacgatgttcaactttactaatctctctctctttttttctgtccaaactgtattattgcatccgtttgtgaatgcacgaattcatttgcaaggaggaacaaaactgtgatcaaagaacaaagaatcaaagagaacgaccgacctatgtacagttgtacacacacacacaaaaatggcgcgcgatccccgcaactgggggatcgagcaggcggcggattcgttcggccgccggccggtcagccctcgaagctggacgagcggctccatctccccctgaggtactcctccaacgacacggcggcggcggcggcgaagatgatcataccggtgcgctgcttcacctgcggcaaggtgattgggaacaagtgggacctctacctcgacctcctccaggccgactactcggaaggggatgctctggatgctctggaactgttccgctactgctgcaggcgaatgctcatgacccatgttgacctcattgagaagttgctcaactacaacacactggagaagaccgagacaagttaagtgagcaagcatatcatgctctgaaagcactactgtttcgtagtatcatatatattgtaggcggtatgttgtttcttctctatcaggagaggattgttgtgagtgtgaacttgcttttgctctcgagcattcaaggactgacaagggcatgttgcatctatgttacgatgttggagattttaatcgatataacggctaactaatactctctgtgtctctgtcccaatttataattcgtttgacctttttacatcaagt

SEQ ID NO: 219296 - DNA, 2718 bp, Zea Mays
aaaccatcgtccctccattcttctccctcccggcgccggaaaaacgagtttattcacagaccgcgtatctccctcccactcttcgccatggaccccagcttccggttcgacccggacagctccgacgatgaggcgtcgggtgccccagcccggggtcgcctggcgcagtcgccgtgggagttctccttgtacgcggagtccgtggcggcggagcacgcgcggcgccgcaccacctctatcgacgagaagatcttgcacctgcgccagggatgcgggaagccggtcctctccgatggctcggagagcgacgtgagcggcagcggggaggatgacagcaacgagaaggagatagaggaggagagcggtgacgaggaggacgagcgggagatcgagggggttggcgacgaggaggagagcggagatcgggaggggggtgaggagggaggaagcgagctgggagaagagaaagatgcccatgaggaagaagatacggtcgagcagaatgaaacgagtggaccagttgatccttctaattttttcgcttcttcagagggggcaacttttcatgcaaattcgttccttgagcttaacttgtctcgtccgctagttcgagcttgtgaagcacttggctaccagaagccaactccgattcaggctgcttgtatacctctggcattaactggaagggacatctgtggtagtgctattacaggatctggaaagacagctgctttctctttgcctgtgctggaacgtctactttttcgtccaaaacgtgtacctgcaattagggtgcttattcttactccaactagagagctggctgctcaggttcatagtatgatcgagaagttagcccaattcactgatatcagatgttgtctcatcgttggtggtctttcaactaaggttcaagaagttgctctaagatcaatgcctgacatcgttgtagcaacccctgggcgtataatagaccatttacgcaactctctttctgttgggcttgaagatctagctgttgtgatccttgatgaggctgatcgcttgctagaattgggtttcagtgctgaaattcaagaactgattcgtatgtgtcctaaaaggaggcagactatgcttttctctgctacaatgacagaagaaattgatgaacttataaaactttcactaaacaaacctgtacgtcttgaagctgatccttctctgaagcggcctgcaacgttgactgaagaggttgttaggatacgacgagcacgtgagtcaaatcaagaagcggttcttcttgcgctctgtttgaagactttcaagcgaagtgttatcatttttagtggcacaaagcaatccgcacacaggttaaaaataatatttggtctctctggcatgaaagcagctgaacttcatggcaaccttacacaggcccagcggcttgaggctctggaacttttcaggaaacaagaagtagattttctgattgcaactgatgtcgctgctcgtttatcttcatcgtgttggccgcacagcacgggcaggaagagaaggctatgccgtaacatttgtaaccgatgatgatagatccctcttgaaagcaattgcaaagaaggctggttcacaactgaaaagccgcattgttgcagagaaacctgtggctgagtgtgcacaactgattgagcaactagaagatcagatttccatcatcattcgagaagaaaaggtggaaagagaagcgagaaaagctgaaatggaaattgcaaaggcagaaaatatgatagctcataaggatgagatatactcacggccaaagagaacctggtttgctactgaaagggaaaagaagcttttggtagcagctgctaaagaatctttgggtcaaggtaagagtacctctggaattattagtgctaagcaggctgaagacctccgtctgaaggagaaaaagagacgagagcatgagaaggacctaccaaggaagaaacgccgaagattagaggcccagcgagagatgctggaagatgaggatgaagatgacgaggaagcaaaggaaagtgatagagggaagaaactgaagaaaggccagtctctagtggatgctgcttaccgaaaggcaaagtcattgaaggcggctagcaaacggggtcctggtgcaagcaaaggaaagaaagagaagaatgcaagacaatattctgagaagactcctaacaggcatgaggagatgcgtgagctgttccagaatgatatgagtgaatggaaacagggacgctcctcaaagaaaaacaacaatttcgcgcacaaaaaatcaaaagcttttaatagcaaagcaagatacaagcgccgcaaatagaagactcggccatccccggatttatttacattctcgtctcagttttgactgactgaccctgaagaaatctctgggatccagatgtttccagttaccatgcgtttgcttgttgtaaacttcgtcatatcatgtattgaaacttaccgttttctgatgtctcattgatcttgggagagctatcctcagtttcgacatgtgccgttgctggtttcgtaggtcgtacttatctcaaaacttacttgccagacgttgttgtgtggaaacgtcgaccagcttgttatgttcctacgcctcgaatgcaatgacaagcttgcacccagtattccagattttgtggatgtgtgatgttggtcttttcgaaagcagattctcatttcaag

SEQ ID NO: 219297 - DNA, 1974 bp, Zea Mays
agataatctattagagcaccaacaggttcatagtatgatcgagaagttagcccaattcactgatatcagatgttgtctcatcgttggtggtctttcaactaaggttcaagaagttgctctaagatcaatgcctgacatcgttgtagcaacccctgggcgtataatagaccatttacgcaactctctttctgttgggcttgaagatctagctgttgtgatccttgatgaggctgatcgcttgctagaattgggtttcagtgctgaaattcaagaactgattcgtatgtgtcctaaaaggaggcagactatgcttttctctgctacaatgacagaagaaattgatgaacttataaaactttcactaaacaaacctgtacgtcttgaagctgatccttctctgaagcggcctgcaacgttgactgaagaggttgttaggatacgacgagcacgtgagtcaaatcaagaagcggttcttcttgcgctctgtttgaagactttcaagcgaagtgttatcatttttagtggcacaaagcaatccgcacacaggttaaaaataatatttggtctctctggcatgaaagcagctgaacttcatggcaaccttacacaggcccagcggcttgaggctctggaacttttcaggaaacaagaagtagattttctgattgcaactgatgtcgctgctcgtgggattgatattgttggtgttcagactgtaataaattttgcatgcccaagagatgtgaaaacttatcttcatcgtgttggccgcacagcacgggcaggaagagaaggctatgccgtaacatttgtaaccgatgatgatagatccctcttgaaagcaattgcaaagaaggctggttcacaactgaaaagccgcattgttgcagagaaacctgtggctgagtgtgcacaactgattgagcaactagaagatcagatttccatcatcattcgagaagaaaaggtggaaagagaagcgagaaaagctgaaatggaaattgcaaaggcagaaaatatgatagctcataaggatgagatatactcacggccaaagagaacctggtttgctactgaaagggaaaagaagcttttggtagcagctgctaaagaatctttgggtcaaggtaagagtacctctggaattattagtgctaagcaggctgaagacctccgtctgaaggagaaaaagagacgagagcatgagaaggacctaccaaggaagaaacgccgaagattagaggcccagcgagagatgctggaagatgaggatgaagatgacgaggaagcaaaggaaagtgatagagggaagaaactgaagaaaggccagtctctagtggatgctgcttaccgaaaggcaaagtcattgaaggcggctagcaaacggggtcctggtgcaagcaaaggaaagaaagagaagaatgcaagacaatattctgagaagactcctaacaggcatgaggagatgcgtgagctgttccagaatgatatgagtgaatggaaacagggacgctcctcaaagaaaaacaacaatttcgcgcacaaaaaatcaaaagcttttaatagcaaagcaagatacaagcgccgcaaatagaagactcggccatccccggatttatttacattctcgtctcagttttgactgactgaccctgaagaaatctctgggatccagatgtttccagttaccatgcgtttgcttgttgtaaacttcgtcatatcatgtattgaaacttaccgttttctgatgtctcattgatcttgggagagctatcctcagtttcgacatgtgccgttgctggtttcgtaggtcgtacttatctcaaaacttacttgccagacgttgttgtgtggaaacgtcgaccagcttgttatgttcctacgcctcgaatgcaatgacaagcttgcacccagtattccagattttgtggatgtgtgatgttggtcttttcgaaagcagattctcatttcaag

SEQ ID NO: 219298 - DNA, 1204 bp, Zea Mays
ctgcgatgcgagcgacatatatttttttgccacgctgccactcgggcacgagcacgagactgctcggccgacgaaataataaagcgcgcgcgcgcacgcggagaggctcggagagctgagtgagatggcacaagccatggcgtccatgaccggcctctcgcagggcgttctgcccagcaggcgcgccgccaacagggccaggacggccgccgtcgtcagggcgtccgccgaggcgcaggcggtgcacgccgagaccgtcaagaccatcaagatcggagccccgccgccgccctccggtggactccccgggactctgaactctgaccaggcgagggacttcgacctccccttgaaggagcggttctacctgcagccgctgccgccggcggaggcggtggcgagggtgaagacgtcggcgcaggacatcatcaacctcaagccactcatcgacaagaaggcgtggccgtacgtccagaacgacctccgcctccgggcctcctacctgcgctacgacctcaagaccgtcatcgcttccaagcccaaggaggagaagcagagcctcaaggagctcaccggcaagctcttcagcaccatcgacgatcttgaccatgccgcaaagatcaagagcaccccggaggccgagaaatacttcgcagcaaccaaagatgcgctcggcgacgtcctcgccaagctagcctagatggaagctaatagatgggttaacgatggccacgtaatttcggacttgtgtttgttcatatggagccggcaaatgtaccgtttcctgttcatattatatcccaagttcttgacaagtacctttgcgggcggatggaacatcagaaacattttccagcagccttaacaagtgatccacgtaatatatcggaaggcgtcaaattggaagttccgcgcctgagatgaacattggccatgagatgagttgaagcataatagaaatcgtgtcacagttatccgcaaaaacaaaataacaactgtacccagatcactcggccctacaaattcagttaagcaacataggagtggaacaaaaatgagctagaatgtcagacctctagctaatttagcattattatttcgacaactcagttaagctgcagaaaatgatagattctaaaagacaaactacccccacaattcaggcttttgagatctcaataattgtacgaagtttccaacacat

SEQ ID NO: 219299 - DNA, 4137 bp, Zea Mays
cttgaggggccaaatctttttgaacgcacgtgcgctatcaagaatagcacaaggatctcaaattgctgatactaactccatcgtgtcatcccaaacagtttctgtaaaaagctcctctctccagtgtttggtgattattctgaagtcattggctgattgggagcaacttcgaagagattcctcaaagcaagggagcattgttgaatctcatgaagaggatgcttcaaggagattgacaactgatgagatgaagaaccaagaggatggtcggaatcagtttgagagagccaaagctcataagtcgacaatggaggctgcaatctctgagtttaatcgtaaaccaagtaaagggattgaatatttgttgtcaaataaattggtagaaaataaggcatcatctgtagctcagtttctcaagagcaatcccagcttggataaggttatgattggtgaatacttgggacagcatgaggagttccctcttgctgtgatgcattcctatgttgactccatgaagtttatagggttgaaatttgatgctgcaattcgtgcgttcctgaaaggatttcgccttcctggtgaggcgcagaagatagatcgcataatggaaaagtttgctgagcggtactgtgctgataatcctgagcttttcaaaaatgcagatactgcttatgttcttgcttatgctgttataatgttgaatactgatgcacataatccaatggtgtggcctaagatgtcaaaatcagattttgttcgtatgaacactgcaagtgatgcagaagaatgtgtcccaaatgagctcttggaagaaatttatgattccattgtcaaggaagagataaagatgaaagacgattctcatgatacttcaaaatccaccaagagacctgaaacagaagaaagaggccgtcttgtcaatattctcaatttagcccttccaagactgaagtcagctagtgatacaaaggcagagagtgaaaagatcatcaaacagacccaggcacttttcaagaaccagggacagaagaaaggtgtttttcatgttgcgcagcaggttgagcttgttagaccaatgcttgaagctgtaggatggcctttgcttgcaacattttctgtgaccatggaggaaggtgacagtaagcctagggttgtatcatgcatggaaggatttcgtgctggtatccatcttactcgtgttcttggaatggacaccatgcgctatgctttcttgacgtccttagtgcggtttacatttttgcacgctcccaaggagatgcgcagtaaaaatgttgaggcactgaggactcttcttggtttagctgacactgatatggatgctttacaagatacttggaatgctgttttagaatgtgtctcaagactcgagtatatcacttcgaacccttcaatttctgcaactgtaatgctgggatcaaatcaaatatcgagggattctgtagtccaatcgctgaaagagttggctggaaagcctgctgaacaaatctttgtaaacagtgtaaaactgccaagtgattcaattgttgaattcttcaccgccctatgtggtgtttctgctgaagaactaaaacaaacacctgctcgtgtctttagcttgcagaagcttgtagagataagctattataacatggctcgcattcggctggtgtgggctagaatatggtctgtgttggcccagcactttattgctgctggaagccacaatgaggagaaagttgcaatgtatgccattgattcactaagacagcttggtatgaagtacttggagcgtgctgaattaaacaatttcacatttcagagtgacatactgaaaccttttgtcattttaatgaggaatacccacaactcaaaaatccgaggtttaattgttgattgcattgttcagttgatcaagtcaaaagttggtagcataaagtcagggtggcgttgcgtattcatgatatttactgcagcagctgatgatgaggatgaatcaattgttgagagtgcttttgaaaatgtagaacaagttatcttggaacattttgaccaagttgttggtgattgcttcatggattgcgtcaactgtcttattggttttgcaaataacaagtgcactcctcggattagtttgaaggctattgctctcctgcgtatatgtgaagatcgtttggcagagggattcattccaggcggcgctattaaacctattgatgttgttccagaggccaattttgatgtgactgagcattattggtttcctatgctagctggtttgtctgatttgactttagactccagaccagaagcatgctggaagggatgggctttcttcttctggggatgattggcttcgtgatactagcattcattcgctgcagttaatctgcaaccttttcaatacattctataagttcatctgattgaagttggtggtcaccagttcagtgatggtgattgggaaacattattaaagagtattagggatgcgtcatacacaactcagcctcttgaactgctcaattcattaggattccataaatcaaacaaccagcagttactttcaagagaagaaagcaatgcacatggcaatagttaccatggcagccggggggaaccctccatcgttaataatggtgagcatagtcatgcagaggcaggtccacaaactagcctggagaattcggaaggtttaccgtcaccatcagggagaacacaacctgctgtttccccacgtggccaaagctttggacaaagaattatgggcaatatgatggataatcttttggttagaagtcttacatccaaatcaaaaggtcgagtcgatgatattgctccaccctcacctgtgaaggcccctgatgatgatgagacagacaaggctgaaggggaagagagccctatgatggaaactgtccggagcaaatgtatcacacagttgctgctgctcggggcaattgacagcatacagaagaggtattggagcaggttaaaagctacacaacagatagcaataatggatatcttgctctcactgctagaatttgcttcttcgtataactcaccttcaaattttcggacgagaatgcaccatatacctctagaaagacctccactgaatcttctccgtcaagaactagttggaacaacaatttatttagatatccttcataagtcaacagtggagcaggacaaaattgactccattgaggaaacaaatggtttaaatgtggaatctggtgaccaggaaaagatcaagtacctagcagaagggaagctggtttctttttgtgggcagattttgaaagaggcgtctgttctccagcctagcactggggaggctgccagtgcagacatacatcgtgtattagacttacgggcacctgttattgtaaaggttttgaaaggaatgtgcatcatggatgctcagatcttcagaaggcacctgaaagagttctatccattaattaccaaacttatctgttgtgatcagatggatgttcgtggagcccttggtgatctctttagcaaacagcttactccactcatgccctgaagtctggcagtatttcctcccttgcatagatcttgttggaacatattcttcgtcagcatttttgtgcaaacatggagcaccggttgggtgcttgacatccttaacgcgctttctggtgcaacagctactccctaggaacttaagagcttgatcagcgggaacggcaggtccctaggccacatcttttttttttggatgacgcaagggaagtagcttgactgatgcgcacaccgtgtttttcctagcaggcttgtactttggagctatttatctgtgcccggacagggatgatgcttccattatacagtagagtagtgttggtaatatgtacacattgttgagaacgttgtacttgaggcctgttgttattatacggcaatagtagattgtttgcggcaagcctcgttttttgtgcgtctaattctctgacttgcagaattgcggtggcaaatacccattgccctccaagttgtgcgttagcgtatttatccgtagttgacagcaatgaacatattactactgctttctgtattttctattaacgcatgcacatagtttattgggtttccatattttcaatc

SEQ ID NO: 219300 - DNA, 4718 bp, Zea Mays
ggtatgttttcagttctgttgctccggtttagagagagtctgaagggggaaattggtgtcttctttcctttgatagttttaaggtctctggatagctctgatagccccctcagccagaaggctagtgttcttaggatgttggagaaagtttgcaaagatccccaaatgcttgcagatgtgtttgtgaactatgactgtgatcttgaggggccaaatctttttgaacgcacgtgcgctatcaagaatagcacaaggatctcaaattgctgatactaactccatcgtgtcatcccaaacagtttctgtaaaaagctcctctctccagtgtttggtgattattctgaagtcattggctgattgggagcaacttcgaagagattcctcaaagcaagggagcattgttgaatctcatgaagaggatgcttcaaggagattgacaactgatgagatgaagaaccaagaggatggtcggaatcagtttgagagagccaaagctcataagtcgacaatggaggctgcaatctctgagtttaatcgtaaaccaagtaaagggattgaatatttgttgtcaaataaattggtagaaaataaggcatcatctgtagctcagtttctcaagagcaatcccagcttggataaggttatgattggtgaatacttgggacagcatgaggagttccctcttgctgtgatgcattcctatgttgactccatgaagtttatagggttgaaatttgatgctgcaattcgtgcgttcctgaaaggatttcgccttcctggtgaggcgcagaagatagatcgcataatggaaaagtttgctgagcggtactgtgctgataatcctgagcttttcaaaaatgcagatactgcttatgttcttgcttatgctgttataatgttgaatactgatgcacataatccaatggtgtggcctaagatgtcaaaatcagattttgttcgtatgaacactgcaagtgatgcagaagaatgtgtcccaaatgagctcttggaagaaatttatgattccattgtcaaggaagagataaagatgaaagacgattctcatgatacttcaaaatccaccaagagacctgaaacagaagaaagaggccgtcttgtcaatattctcaatttagcccttccaagactgaagtcagctagtgatacaaaggcagagagtgaaaagatcatcaaacagacccaggcacttttcaagaaccagggacagaagaaaggtgtttttcatgttgcgcagcaggttgagcttgttagaccaatgcttgaagctgtaggatggcctttgcttgcaacattttctgtgaccatggaggaaggtgacagtaagcctagggttgtatcatgcatggaaggatttcgtgctggtatccatcttactcgtgttcttggaatggacaccatgcgctatgctttcttgacgtccttagtgcggtttacatttttgcacgctcccaaggagatgcgcagtaaaaatgttgaggcactgaggactcttcttggtttagctgacactgatatggatgctttacaagatacttggaatgctgttttagaatgtgtctcaagactcgagtatatcacttcgaacccttcaatttctgcaactgtaatgctgggatcaaatcaaatatcgagggattctgtagtccaatcgctgaaagagttggctggaaagcctgctgaacaaatctttgtaaacagtgtaaaactgccaagtgattcaattgttgaattcttcaccgccctatgtggtgtttctgctgaagaactaaaacaaacacctgctcgtgtctttagcttgcagaagcttgtagagataagctattataacatggctcgcattcggctggtgtgggctagaatatggtctgtgttggcccagcactttattgctgctggaagccacaatgaggagaaagttgcaatgtatgccattgattcactaagacagcttggtatgaagtacttggagcgtgctgaattaaacaatttcacatttcagagtgacatactgaaaccttttgtcattttaatgaggaatacccacaactcaaaaatccgaggtttaattgttgattgcattgttcagttgatcaagtcaaaagttggtagcataaagtcagggtggcgttgcgtattcatgatatttactgcagcagctgatgatgaggatgaatcaattgttgagagtgcttttgaaaatgtagaacaagttatcttggaacattttgaccaagttgttggtgattgcttcatggattgcgtcaactgtcttattggttttgcaaataacaagtgcactcctcggattagtttgaaggctattgctctcctgcgtatatgtgaagatcgtttggcagagggattcattccaggcggcgctattaaacctattgatgttgttccagaggccaattttgatgtgactgagcattattggtttcctatgctagctggtttgtctgatttgactttagactccagaccagaagtcagacactgtgcactggaagtgttgtttgatttgttgaatgaaagaggacataagttctcttctcccttctgggagagtatttttcatcgtgtactatttccaatttttgatcatgtaaggcatgctggaagggatgggctttcttcttctggggatgattggcttcgtgatactagcattcattcgctgcagttaatctgcaaccttttcaatacattctataagatatcacattgaaacttgtttggttggccatcgtctgactgtggcacttacaggagttcatctgattgaagttggtggtcaccagttcagtgatggtgattgggaaacattattaaagagtattagggatgcgtcatacacaactcagcctcttgaactgctcaattcattaggattccataaatcaaacaaccagcagttactttcaagagaagaaagcaatgcacatggcaatagttaccatggcagccggggggaaccctccatcgttaataatggtgagcatagtcatgcagaggcaggtccacaaactagcctggagaattcggaaggtttaccgtcaccatcagggagaacacaacctgctgtttccccacgtggccaaagctttggacaaagaattatgggcaatatgatggataatcttttggttagaagtcttacatccaaatcaaaaggtcgagtcgatgatattgctccaccctcacctgtgaaggcccctgatgatgatgagacagacaaggctgaaggggaagagagccctatgatggaaactgtccggagcaaatgtatcacacagttgctgctgctcggggcaattgacagcatacaggtaagcagtttcctccactttatatgcatgctcttagatctgagtccatccattgtttctctgacaatgtggactggaagcacctttgtctgtgatacaattgaggacttctagttgcaaataaggaattcatcaccctaatatattagccagccctacttgggttgatatactgtgattaactattgatgaaacatttcagaagaggtattggagcaggttaaaagctacacaacagatagcaataatggatatcttgctctcactgctagaatttgcttcttcgtataactcaccttcaaattttcggacgagaatgcaccatatacctctagaaagacctccactgaatcttctccgtcaagaactagttggaacaacaatttatttagatatccttcataagtcaacagtggagcaggacaaaattgactccattgaggaaacaaatggtttaaatgtggaatctggtgaccaggaaaagatcaagtacctagcagaagggaagctggtttctttttgtgggcagattttgaaagaggcgtctgttctccagcctagcactggggaggctgccagtgcagacatacatcgtgtattagacttacgggcacctgttattgtaaaggttttgaaaggaatgtgcatcatggatgctcagatcttcagaaggcacctgaaagagttctatccattaattaccaaacttatctgttgtgatcagatggatgttcgtggagcccttggtgatctctttagcaaacagcttactccactcatgccctgaagtctggcagtatttcctcccttgcatagatcttgttggaacatattcttcgtcagcatttttgtgcaaacatggagcaccggttgggtgcttgacatccttaacgcgctttctggtgcaacagctactccctaggaacttaagagcttgatcagcgggaacggcaggtccctaggccacatcttttttttttggatgacgcaagggaagtagcttgactgatgcgcacaccgtgtttttcctagcaggcttgtactttggagctatttatctgtgcccggacagggatgatgcttccattatacagtagagtagtgttggtaatatgtacacattgttgagaacgttgtacttgaggcctgttgttattatacggcaatagtagattgtttgcggcaagcctcgttttttgtgcgtctaattctctgacttgcagaattgcggtggcaaatacccattgccctccaagttgtgcgttagcgtatttatccgtagttgacagcaatgaacatattactactgctttctgtattttctattaacgcatgcacatagtttattgggtttccatattttcaatc

SEQ ID NO: 219301 - DNA, 6325 bp, Zea Mays
cgtaaaagaaaaattcagagatggtcctcgactcctggtgggtggtggcgatctcccagctgaactgaaagagcaagcgtgcgtgtgagacaaccaggtccgatccgcccccgccgagccgaggacagcagcgggggctctcggtctcctcctaggctcctacagatctcgtaccccgtcacagatctcgcgccctctccatcccatgcccaccccccctcgtcggatctgaccactccgcccctcctcccgtctccgccgccggagctgatatccgcggtcatggcgggcgccgcgggcgggttcgtcacgcgggccttcgaggccatgctcaaggagtgcgctgccaaccgcggcaagttcgccgcgctgcagcaatccatccagtcatacctcgatagtatcaagggggctacagcagagggcgcggtcatcaccgaggcgctcgggtcagctgggcgcgtgctcgacgggccgcaggccgagctggtgctgcagccgctccgcctcgccgtcgagaccaagcacgtcaagctcgtcgagcccgcgctcgactgcctccacaaacttattgcttatgaccatttagaaggcgatcctggtttagaaggtggtaaaaattccccaatatttacagacatcctgaacatggtatgtggttgcgtcgataacacctcctctgacagtactgttctccaagtcttgaaagtgcttcttaatgctgttgcttcaaataagtttagagttcatggagagccattgcttggggtcattagagtatgctataacattgctcttaataggctacctcaaaggctatgttaacccagatgatcagcattgtattcaggagaatggaatctgagcaggtttctgtatcgcccggaagctctgtggttaaagatatgccttcatctatcacaaatgattctgaaaatggagaaatatctactgatggccaagatgaggaaaaggttactctgggagatgcattgtccatgaatcggccttctgaagctcctccaacgtctgttgaagagcttcagaatcttgcaggtggagcagatattaaggggctggaagctgttctagataaggctgttgaacttgaagacgggaaaaaagtgtcacgtggaattgacctggacactgtgaatataatacagcgtgatgcactattgctctttcgaactctctgcaagatgagcatgaaagaagaaagtgatgaggttgctaccaagacaaggctgctatcacttgaactgctccagggattgctagagggagtcagcaatgtgttcatcaaaaattttcacttcattgattcagtcaaagcatatctttcgtatgctcttctgcgagcatctgtctcttcatctccagttgtttttcagtatgcttgtggtatgttttcagttctgttgctccggtttagagagagtctgaagggggaaattggtgtcttctttcctttgatagttttaaggtctctggatagctctgatagccccctcagccagaaggctagtgttcttaggatgttggagaaagtttgcaaagatccccaaatgcttgcagatgtgtttgtgaactatgactgtgatcttgaggggccaaatctttttgaacgcacgtgcgctatcaagaatagcacaaggatctcaaattgctgatactaactccatcgtgtcatcccaaacagtttctgtaaaaagctcctctctccagtgtttggtgattattctgaagtcattggctgattgggagcaacttcgaagagattcctcaaagcaagggagcattgttgaatctcatgaagaggatgcttcaaggagattgacaactgatgagatgaagaaccaagaggatggtcggaatcagtttgagagagccaaagctcataagtcgacaatggaggctgcaatctctgagtttaatcgtaaaccaagtaaagggattgaatatttgttgtcaaataaattggtagaaaataaggcatcatctgtagctcagtttctcaagagcaatcccagcttggataaggttatgattggtgaatacttgggacagcatgaggagttccctcttgctgtgatgcattcctatgttgactccatgaagtttatagggttgaaatttgatgctgcaattcgtgcgttcctgaaaggatttcgccttcctggtgaggcgcagaagatagatcgcataatggaaaagtttgctgagcggtactgtgctgataatcctgagcttttcaaaaatgcagatactgcttatgttcttgcttatgctgttataatgttgaatactgatgcacataatccaatggtgtggcctaagatgtcaaaatcagattttgttcgtatgaacactgcaagtgatgcagaagaatgtgtcccaaatgagctcttggaagaaatttatgattccattgtcaaggaagagataaagatgaaagacgattctcatgatacttcaaaatccaccaagagacctgaaacagaagaaagaggccgtcttgtcaatattctcaatttagcccttccaagactgaagtcagctagtgatacaaaggcagagagtgaaaagatcatcaaacagacccaggcacttttcaagaaccagggacagaagaaaggtgtttttcatgttgcgcagcaggttgagcttgttagaccaatgcttgaagctgtaggatggcctttgcttgcaacattttctgtgaccatggaggaaggtgacagtaagcctagggttgtatcatgcatggaaggatttcgtgctggtatccatcttactcgtgttcttggaatggacaccatgcgctatgctttcttgacgtccttagtgcggtttacatttttgcacgctcccaaggagatgcgcagtaaaaatgttgaggcactgaggactcttcttggtttagctgacactgatatggatgctttacaagatacttggaatgctgttttagaatgtgtctcaagactcgagtatatcacttcgaacccttcaatttctgcaactgtaatgctgggatcaaatcaaatatcgagggattctgtagtccaatcgctgaaagagttggctggaaagcctgctgaacaaatctttgtaaacagtgtaaaactgccaagtgattcaattgttgaattcttcaccgccctatgtggtgtttctgctgaagaactaaaacaaacacctgctcgtgtctttagcttgcagaagcttgtagagataagctattataacatggctcgcattcggctggtgtgggctagaatatggtctgtgttggcccagcactttattgctgctggaagccacaatgaggagaaagttgcaatgtatgccattgattcactaagacagcttggtatgaagtacttggagcgtgctgaattaaacaatttcacatttcagagtgacatactgaaaccttttgtcattttaatgaggaatacccacaactcaaaaatccgaggtttaattgttgattgcattgttcagttgatcaagtcaaaagttggtagcataaagtcagggtggcgttgcgtattcatgatatttactgcagcagctgatgatgaggatgaatcaattgttgagagtgcttttgaaaatgtagaacaagttatcttggaacattttgaccaagttgttggtgattgcttcatggattgcgtcaactgtcttattggttttgcaaataacaagtgcactcctcggattagtttgaaggctattgctctcctgcgtatatgtgaagatcgtttggcagagggattcattccaggcggcgctattaaacctattgatgttgttccagaggccaattttgatgtgactgagcattattggtttcctatgctagctggtttgtctgatttgactttagactccagaccagaagtcagacactgtgcactggaagtgttgtttgatttgttgaatgaaagaggacataagttctcttctcccttctgggagagtatttttcatcgtgtactatttccaatttttgatcatgtaaggcatgctggaagggatgggctttcttcttctggggatgattggcttcgtgatactagcattcattcgctgcagttaatctgcaaccttttcaatacattctataaggtagcatgtgttcttccttttagttgcttgacaaacatcctttgtataattcagaatataagtgtgatgaaactggtcatccgctacttctatagatatcacattgaaacttgtttggttggccatcgtctgactgtggcacttacaggaggtatcctttatgcttccacctcttctcagtttgctgcttgaatgtgcgaaaaaaacagaccaaactgtcgtttcaatttctcttggcgctttagttcatctgattgaagttggtggtcaccagttcagtgatggtgattgggaaacattattaaagagtattagggatgcgtcatacacaactcagcctcttgaactgctcaattcattaggattccataaatcaaacaaccagcagttactttcaagagaagaaagcaatgcacatggcaatagttaccatggcagccggggggaaccctccatcgttaataatggtgagcatagtcatgcagaggcaggtccacaaactagcctggagaattcggaaggtaccacgagcagaggtttaccgtcaccatcagggagaacacaacctgctgtttccccacgtggccaaagctttggacaaagaattatgggcaatatgatggataatcttttggttagaagtcttacatccaaatcaaaaggtcgagtcgatgatattgctccaccctcacctgtgaaggcccctgatgatgatgagacagacaaggctgaaggggaagagagccctatgatggaaactgtccggagcaaatgtatcacacagttgctgctgctcggggcaattgacagcatacaggtaagcagtttcctccactttatatgcatgctcttagatctgagtccatccattgtttctctgacaatgtggactggaagcacctttgtctgtgatacaattgaggacttctagttgcaaataaggaattcatcaccctaatatattagccagccctacttgggttgatatactgtgattaactattgatgaaacatttcagaagaggtattggagcaggttaaaagctacacaacagatagcaataatggatatcttgctctcactgctagaatttgcttcttcgtataactcaccttcaaattttcggacgagaatgcaccatatacctctagaaagacctccactgaatcttctccgtcaagaactagttggaacaacaatttatttagatatccttcataagtcaacagtggagcaggacaaaattgactccattgaggaaacaaatggtttaaatgtggaatctggtgaccaggaaaagatcaagtacctagcagaagggaagctggtttctttttgtgggcagattttgaaagaggcgtctgttctccagcctagcactggggaggctgccagtgcagacatacatcgtgtattagacttacgggcacctgttattgtaaaggttttgaaaggaatgtgcatcatggatgctcagatcttcagaaggcacctgaaagagttctatccattaattaccaaacttatctgttgtgatcagatggatgttcgtggagcccttggtgatctctttagcaaacagcttactccactcatgccctgaagtctggcagtatttcctcccttgcatagatcttgttggaacatattcttcgtcagcatttttgtgcaaacatggagcaccggttgggtgcttgacatccttaacgcgctttctggtgcaacagctactccctaggaacttaagagcttgatcagcgggaacggcaggtccctaggccacatcttttttttttggatgacgcaagggaagtagcttgactgatgcgcacaccgtgtttttcctagcaggcttgtactttggagctatttatctgtgcccggacagggatgatgcttccattatacagtagagtagtgttggtaatatgtacacattgttgagaacgttgtacttgaggcctgttgttattatacggcaatagtagattgtttgcggcaagcctcgttttttgtgcgtctaattctctgacttgcagaattgcggtggcaaatacccattgccctccaagttgtgcgttagcgtatttatccgtagttgacagcaatgaacatattactactgctttctgtattttctattaacgcatgcacatagtttattgggtttccatattttcaatc

SEQ ID NO: 219302 - DNA, 5773 bp, Zea Mays
cgtaaaagaaaaattcagagatggtcctcgactcctggtgggtggtggcgatctcccagctgaactgaaagagcaagcgtgcgtgtgagacaaccaggtccgatccgcccccgccgagccgaggacagcagcgggggctctcggtctcctcctaggctcctacagatctcgtaccccgtcacagatctcgcgccctctccatcccatgcccaccccccctcgtcggatctgaccactccgcccctcctcccgtctccgccgccggagctgatatccgcggtcatggcgggcgccgcgggcgggttcgtcacgcgggccttcgaggccatgctcaaggagtgcgctgccaaccgcggcaagttcgccgcgctgcagcaatccatccagtcatacctcgatagtatcaagggggctacagcagagggcgcggtcatcaccgaggcgctcgggtcagctgggcgcgtgctcgacgggccgcaggccgagctggtgctgcagccgctccgcctcgccgtcgagaccaagcacgtcaagctcgtcgagcccgcgctcgactgcctccacaaacttattgcttatgaccatttagaaggcgatcctggtttagaaggtggtaaaaattccccaatatttacagacatcctgaacatggtatgtggttgcgtcgataacacctcctctgacagtactgttctccaagtcttgaaagtgcttcttaatgctgttgcttcaaataagtttagagttcatggagagccattgcttggggtcattagagtatgctataacattgctcttaataggctacctcaaaggctatgttaacccagatgatcagcattgtattcaggagaatggaatctgagcaggtttctgtatcgcccggaagctctgtggttaaagatatgccttcatctatcacaaatgattctgaaaatggagaaatatctactgatggccaagatgaggaaaaggttactctgggagatgcattgtccatgaatcggccttctgaagctcctccaacgtctgttgaagagcttcagaatcttgcaggtggagcagatattaaggggctggaagctgttctagataaggctgttgaacttgaagacgggaaaaaagtgtcacgtggaattgacctggacactgtgaatataatacagcgtgatgcactattgctctttcgaactctctgcaagatgagcatgaaagaagaaagtgatgaggttgctaccaagacaaggctgctatcacttgaactgctccagggattgctagagggagtcagcaatgtgttcatcaaaaattttcacttcattgattcagtcaaagcatatctttcgtatgctcttctgcgagcatctgtctcttcatctccagttgtttttcagtatgcttgtggtatgttttcagttctgttgctccggtttagagagagtctgaagggggaaattggtgtcttctttcctttgatagttttaaggtctctggatagctctgatagccccctcagccagaaggctagtgttcttaggatgttggagaaagtttgcaaagatccccaaatgcttgcagatgtgtttgtgaactatgactgtgatcttgaggggccaaatctttttgaacgcacggttagtgcgctatcaagaatagcacaaggatctcaaattgctgatactaactccatcgtgtcatcccaaacagtttctgtaaaaagctcctctctccagtgtttggtgattattctgaagtcattggctgattgggagcaacttcgaagagattcctcaaagcaagggagcattgttgaatctcatgaagaggatgcttcaaggagattgacaactgatgagatgaagaaccaagaggatggtcggaatcagtttgagagagccaaagctcataagtcgacaatggaggctgcaatctctgagtttaatcgtaaaccaagtaaagggattgaatatttgttgtcaaataaattggtagaaaataaggcatcatctgtagctcagtttctcaagagcaatcccagcttggataaggttatgattggtgaatacttgggacagcatgaggagttccctcttgctgtgatgcattcctatgttgactccatgaagtttatagggttgaaatttgatgctgcaattcgtgcgttcctgaaaggatttcgccttcctggtgaggcgcagaagatagatcgcataatggaaaagtttgctgagcgatactgcttatgttcttgcttatgctgttataatgttgaatactgatgcacataatccaatggtgtggcctaagatgtcaaaatcagattttgttcgtatgaacactgcaagtgatgcagaagaatgtgtcccaaatgagctcttggaagaaatttatgattccattgtcaaggaagagataaagatgaaagacgattctcatgatacttcaaaatccaccaagagacctgaaacagaagaaagaggccgtcttgtcaatattctcaatttagcccttccaagactgaagtcagctagtgatacaaaggcagagagtgaaaagatcatcaaacagacccaggcacttttcaagaaccagggacagaagaaaggtgtttttcatgttgcgcagcaggttgagcttgttagaccaatgcttgaagctgtaggatggcctttgcttgcaacattttctgtgaccatggaggaaggtgacagtaagcctagggttgtatcatgcatggaaggatttcgtgctggtatccatcttactcgtgttcttggaatggacaccatgcgctatgctttcttgacgtccttagtgcggtttacatttttgcacgctcccaaggagatgcgcagtaaaaatgttgaggcactgaggactcttcttggtttagctgacactgatatggatgctttacaagatacttggaatgctgttttagaatgtgtctcaagactcgagtatatcacttcgaacccttcaatttctgcaactgtaatgctgggatcaaatcaaatatcgagggattctgtagtccaatcgctgaaagagttggctggaaagcctgctgaacaaatctttgtaaacagtgtaaaactgccaagtgattcaattgttgaattcttcaccgccctatgtggtgtttctgctgaagaactaaaacaaacacctgctcgtgtctttagcttgcagaagcttgtagagataagctattataacatggctcgcattcggctggtgtgggctagaatatggtctgtgttggcccagcactttattgctgctggaagccacaatgaggagaaagttgcaatgtatgccattgattcactaagacagcttggtatgaagtacttggagcgtgctgaattaaacaatttcacatttcagagtgacatactgaaaccttttgtcattttaatgaggaatacccacaactcaaaaatccgaggtttaattgttgattgcattgttcagttgatcaagtcaaaagttggtagcataaagtcagggtggcgttgcgtattcatgatatttactgcagcagctgatgatgaggatgaatcaattgttgagagtgcttttgaaaatgtagaacaagttatcttggaacattttgaccaagttgttggtgattgcttcatggattgcgtcaactgtcttattggttttgcaaataacaagtgcactcctcggattagtttgaaggctattgctctcctgcgtatatgtgaagatcgtttggcagagggattcattccaggcggcgctattaaacctattgatgttgttccagaggccaattttgatgtgactgagcattattggtttcctatgctagctggtttgtctgatttgactttagactccagaccagaagcatgctggaagggatgggctttcttcttctggggatgattggcttcgtgatactagcattcattcgctgcagttaatctgcaaccttttcaatacattctataagtttgctgcttgaatgtgcgaaaaaaacagaccaaactgtcgtttcaatttctcttggcgctttagttcatctgattgaagttggtggtcaccagttcagtgatggtgattgggaaacattattaaagagtattagggatgcgtcatacacaactcagcctcttgaactgctcaattcattaggattccataaatcaaacaaccagcagttactttcaagagaagaaagcaatgcacatggcaatagttaccatggcagccggggggaaccctccatcgttaataatggtgagcatagtcatgcagaggcaggtccacaaactagcctggagaattcggaaggtttaccgtcaccatcagggagaacacaacctgctgtttccccacgtggccaaagctttggacaaagaattatgggcaatatgatggataatcttttggttagaagtcttacatccaaatcaaaaggtcgagtcgatgatattgctccaccctcacctgtgaaggcccctgatgatgatgagacagacaaggctgaaggggaagagagccctatgatggaaactgtccggagcaaatgtatcacacagttgctgctgctcggggcaattgacagcatacagaagaggtattggagcaggttaaaagctacacaacagatagcaataatggatatcttgctctcactgctagaatttgcttcttcgtataactcaccttcaaattttcggacgagaatgcaccatatacctctagaaagacctccactgaatcttctccgtcaagaactagttggaacaacaatttatttagatatccttcataagtcaacagtggagcaggacaaaattgactccattgaggaaacaaatggtttaaatgtggaatctggtgaccaggaaaagatcaagtacctagcagaagggaagctggtttctttttgtgggcagattttgaaagaggcgtctgttctccagcctagcactggggaggctgccagtgcagacatacatcgtgtattagacttacgggcacctgttattgtaaaggttttgaaaggaatgtgcatcatggatgctcagatcttcagaaggcacctgaaagagttctatccattaattaccaaacttatctgttgtgatcagatggatgttcgtggagcccttggtgatctctttagcaaacagcttactccactcatgccctgaagtctggcagtatttcctcccttgcatagatcttgttggaacatattcttcgtcagcatttttgtgcaaacatggagcaccggttgggtgcttgacatccttaacgcgctttctggtgcaacagctactccctaggaacttaagagcttgatcagcgggaacggcaggtccctaggccacatcttttttttttggatgacgcaagggaagtagcttgactgatgcgcacaccgtgtttttcctagcaggcttgtactttggagctatttatctgtgcccggacagggatgatgcttccattatacagtagagtagtgttggtaatatgtacacattgttgagaacgttgtacttgaggcctgttgttattatacggcaatagtagattgtttgcggcaagcctcgttttttgtgcgtctaattctctgacttgcagaattgcggtggcaaatacccattgccctccaagttgtgcgttagcgtatttatccgtagttgacagcaatgaacatattactactgctttctgtattttctattaacgcatgcacatagtttattgggtttccatattttcaatc

SEQ ID NO: 219303 - DNA, 5746 bp, Zea Mays
cgtaaaagaaaaattcagagatggtcctcgactcctggtgggtggtggcgatctcccagctgaactgaaagagcaagcgtgcgtgtgagacaaccaggtccgatccgcccccgccgagccgaggacagcagcgggggctctcggtctcctcctaggctcctacagatctcgtaccccgtcacagatctcgcgccctctccatcccatgcccaccccccctcgtcggatctgaccactccgcccctcctcccgtctccgccgccggagctgatatccgcggtcatggcgggcgccgcgggcgggttcgtcacgcgggccttcgaggccatgctcaaggagtgcgctgccaaccgcggcaagttcgccgcgctgcagcaatccatccagtcatacctcgatagtatcaagggggctacagcagagggcgcggtcatcaccgaggcgctcgggtcagctgggcgcgtgctcgacgggccgcaggccgagctggtgctgcagccgctccgcctcgccgtcgagaccaagcacgtcaagctcgtcgagcccgcgctcgactgcctccacaaacttattgcttatgaccatttagaaggcgatcctggtttagaaggtggtaaaaattccccaatatttacagacatcctgaacatggtatgtggttgcgtcgataacacctcctctgacagtactgttctccaagtcttgaaagtgcttcttaatgctgttgcttcaaataagtttagagttcatggagagccattgcttggggtcattagagtatgctataacattgctcttaataggctacctcaaaggctatgttaacccagatgatcagcattgtattcaggagaatggaatctgagcaggtttctgtatcgcccggaagctctgtggttaaagatatgccttcatctatcacaaatgattctgaaaatggagaaatatctactgatggccaagatgaggaaaaggttactctgggagatgcattgtccatgaatcggccttctgaagctcctccaacgtctgttgaagagcttcagaatcttgcaggtggagcagatattaaggggctggaagctgttctagataaggctgttgaacttgaagacgggaaaaaagtgtcacgtggaattgacctggacactgtgaatataatacagcgtgatgcactattgctctttcgaactctctgcaagatgagcatgaaagaagaaagtgatgaggttgctaccaagacaaggctgctatcacttgaactgctccagggattgctagagggagtcagcaatgtgttcatcaaaaattttcacttcattgattcagtcaaagcatatctttcgtatgctcttctgcgagcatctgtctcttcatctccagttgtttttcagtatgcttgtggtatgttttcagttctgttgctccggtttagagagagtctgaagggggaaattggtgtcttctttcctttgatagttttaaggtctctggatagctctgatagccccctcagccagaaggctagtgttcttaggatgttggagaaagtttgcaaagatccccaaatgcttgcagatgtgtttgtgaactatgactgtgatcttgaggggccaaatctttttgaacgcacggttagtgcgctatcaagaatagcacaaggatctcaaattgctgatactaactccatcgtgtcatcccaaacagtttctgtaaaaagctcctctctccagtgtttggtgattattctgaagtcattggctgattgggagcaacttcgaagagattcctcaaagcaagggagcattgttgaatctcatgaagaggatgcttcaaggagattgacaactgatgagatgaagaaccaagaggatggtcggaatcagtttgagagagccaaagctcataagtcgacaatggaggctgcaatctctgagtttaatcgtaaaccaagtaaagggattgaatatttgttgtcaaataaattggtagaaaataaggcatcatctgtagctcagtttctcaagagcaatcccagcttggataaggttatgattggtgaatacttgggacagcatgaggagttccctcttgctgtgatgcattcctatgttgactccatgaagtttatagggttgaaatttgatgctgcaattcgtgcgttcctgaaaggatttcgccttcctggtgaggcgcagaagatagatcgcataatggaaaagtttgctgagcggtactgtgctgataatcctgagcttttcaaaaatgcagatactgcttatgttcttgcttatgctgttataatgttgaatactgatgcacataatccaatggtgtggcctaagatgtcaaaatcagattttgttcgtatgaacactgcaagtgatgcagaagaatgtgtcccaaatgagctcttggaagaaatttatgattccattgtcaaggaagagataaagatgaaagacgattctcatgatacttcaaaatccaccaagagacctgaaacagaagaaagaggccgtcttgtcaatattctcaatttagcccttccaagactgaagtcagctagtgatacaaaggcagagagtgaaaagatcatcaaacagacccaggcacttttcaagaaccagggacagaagaaaggtgtttttcatgttgcgcagcaggttgagcttgttagaccaatgcttgaagctgtaggatggcctttgcttgcaacattttctgtgaccatggaggaaggtgacagtaagcctagggttgtatcatgcatggaaggatttcgtgctggtatccatcttactcgtgttcttggaatggacaccatgcgctatgctttcttgacgtccttagtgcggtttacatttttgcacgctcccaaggagatgcgcagtaaaaatgttgaggcactgaggactcttcttggtttagctgacactgatatggatgctttacaagatacttggaatgctgttttagaatgtgtctcaagactcgagtatatcacttcgaacccttcaatttctgcaactgtaatgctgggatcaaatcaaatatcgagggattctgtagtccaatcgctgaaagagttggctggaaagcctgctgaacaaatctttgtaaacagtgtaaaactgccaagtgattcaattgttgaattcttcaccgccctatgtggtgtttctgctgaagaactaaaacaaacacctgctcgtgtctttagcttgcagaagcttgtagagataagctattataacatggctcgcattcggctggtgtgggctagaatatggtctgtgttggcccagcactttattgctgctggaagccacaatgaggagaaagttgcaatgtatgccattgattcactaagacagcttggtatgaagtacttggagcgtgctgaattaaacaatttcacatttcagagtgacatactgaaaccttttgtcattttaatgaggaatacccacaactcaaaaatccgaggtttaattgttgattgcattgttcagttgatcaagtcaaaagttggtagcataaagtcagggtggcgttgcgtattcatgatatttactgcagcagctgatgatgaggatgaatcaattgttgagagtgcttttgaaaatgtagaacaagttatcttggaacattttgaccaagttgttggtgattgcttcatggattgcgtcaactgtcttattggttttgcaaataacaagtgcactcctcggattagtttgaaggctattgctctcctgcgtatatgtgaagatcgtttggcagagggattcattccaggcggcgctattaaacctattgatgttgttccagaggccaattttgatgtgactgagcattattggtttcctatgctagctggtttgtctgatttgactttagactccagaccagaagcatgctggaagggatgggctttcttcttctggggatgattggcttcgtgatactagcattcattcgctgcagttaatctgcaaccttttcaatacattctataagttcatctgattgaagttggtggtcaccagttcagtgatggtgattgggaaacattattaaagagtattagggatgcgtcatacacaactcagcctcttgaactgctcaattcattaggattccataaatcaaacaaccagcagttactttcaagagaagaaagcaatgcacatggcaatagttaccatggcagccggggggaaccctccatcgttaataatggtgagcatagtcatgcagaggcaggtccacaaactagcctggagaattcggaaggtttaccgtcaccatcagggagaacacaacctgctgtttccccacgtggccaaagctttggacaaagaattatgggcaatatgatggataatcttttggttagaagtcttacatccaaatcaaaaggtcgagtcgatgatattgctccaccctcacctgtgaaggcccctgatgatgatgagacagacaaggctgaaggggaagagagccctatgatggaaactgtccggagcaaatgtatcacacagttgctgctgctcggggcaattgacagcatacagaagaggtattggagcaggttaaaagctacacaacagatagcaataatggatatcttgctctcactgctagaatttgcttcttcgtataactcaccttcaaattttcggacgagaatgcaccatatacctctagaaagacctccactgaatcttctccgtcaagaactagttggaacaacaatttatttagatatccttcataagtcaacagtggagcaggacaaaattgactccattgaggaaacaaatggtttaaatgtggaatctggtgaccaggaaaagatcaagtacctagcagaagggaagctggtttctttttgtgggcagattttgaaagaggcgtctgttctccagcctagcactggggaggctgccagtgcagacatacatcgtgtattagacttacgggcacctgttattgtaaaggttttgaaaggaatgtgcatcatggatgctcagatcttcagaaggcacctgaaagagttctatccattaattaccaaacttatctgttgtgatcagatggatgttcgtggagcccttggtgatctctttagcaaacagcttactccactcatgccctgaagtctggcagtatttcctcccttgcatagatcttgttggaacatattcttcgtcagcatttttgtgcaaacatggagcaccggttgggtgcttgacatccttaacgcgctttctggtgcaacagctactccctaggaacttaagagcttgatcagcgggaacggcaggtccctaggccacatcttttttttttggatgacgcaagggaagtagcttgactgatgcgcacaccgtgtttttcctagcaggcttgtactttggagctatttatctgtgcccggacagggatgatgcttccattatacagtagagtagtgttggtaatatgtacacattgttgagaacgttgtacttgaggcctgttgttattatacggcaatagtagattgtttgcggcaagcctcgttttttgtgcgtctaattctctgacttgcagaattgcggtggcaaatacccattgccctccaagttgtgcgttagcgtatttatccgtagttgacagcaatgaacatattactactgctttctgtattttctattaacgcatgcacatagtttattgggtttccatattttcaatc

SEQ ID NO: 219304 - DNA, 6115 bp, Zea Mays
cgtaaaagaaaaattcagagatggtcctcgactcctggtgggtggtggcgatctcccagctgaactgaaagagcaagcgtgcgtgtgagacaaccaggtccgatccgcccccgccgagccgaggacagcagcgggggctctcggtctcctcctaggctcctacagatctcgtaccccgtcacagatctcgcgccctctccatcccatgcccaccccccctcgtcggatctgaccactccgcccctcctcccgtctccgccgccggagctgatatccgcggtcatggcgggcgccgcgggcgggttcgtcacgcgggccttcgaggccatgctcaaggagtgcgctgccaaccgcggcaagttcgccgcgctgcagcaatccatccagtcatacctcgatagtatcaagggggctacagcagagggcgcggtcatcaccgaggcgctcgggtcagctgggcgcgtgctcgacgggccgcaggccgagctggtgctgcagccgctccgcctcgccgtcgagaccaagcacgtcaagctcgtcgagcccgcgctcgactgcctccacaaacttattgcttatgaccatttagaaggcgatcctggtttagaaggtggtaaaaattccccaatatttacagacatcctgaacatggtatgtggttgcgtcgataacacctcctctgacagtactgttctccaagtcttgaaagtgcttcttaatgctgttgcttcaaataagtttagagttcatggagagccattgcttggggtcattagagtatgctataacattgctcttaataggctacctcaaaggctatgttaacccagatgatcagcattgtattcaggagaatggaatctgagcaggtttctgtatcgcccggaagctctgtggttaaagatatgccttcatctatcacaaatgattctgaaaatggagaaatatctactgatggccaagatgaggaaaaggttactctgggagatgcattgtccatgaatcggccttctgaagctcctccaacgtctgttgaagagcttcagaatcttgcaggtggagcagatattaaggggctggaagctgttctagataaggctgttgaacttgaagacgggaaaaaagtgtcacgtggaattgacctggacactgtgaatataatacagcgtgatgcactattgctctttcgaactctctgcaagatgagcatgaaagaagaaagtgatgaggttgctaccaagacaaggctgctatcacttgaactgctccagggattgctagagggagtcagcaatgtgttcatcaaaaattttcacttcattgattcagtcaaagcatatctttcgtatgctcttctgcgagcatctgtctcttcatctccagttgtttttcagtatgcttgtggtatgttttcagttctgttgctccggtttagagagagtctgaagagggggaaattggtgtcttctttcctttgatagttttaaggtctctggatagctctgatagccccctcagccagaaggctagtgttcttaggatgttggagaaagtttgcaaagatccccaaatgcttgcagatgtgtttgtgaactatgactgtgatcttgaggggccaaatctttttgaacgcacggttagtgcgctatcaagaatagcacaaggatctcaaattgctgatactaactccatcgtgtcatcccaaacagtttctgtaaaaagctcctctctccagtgtttggtgattattctgaagtcattggctgattgggagcaacttcgaagagattcctcaaagcaagggagcattgttgaatctcatgaagaggatgcttcaaggagattgacaactgatgagatgaagaaccaagaggatggtcggaatcagtttgagagagccaaagctcataagtcgacaatggaggctgcaatctctgagtttaatcgtaaaccaagtaaagggattgaatatttgttgtcaaataaattggtagaaaataaggcatcatctgtagctcagtttctcaagagcaatcccagcttggataaggttatgattggtgaatacttgggacagcatgaggagttccctcttgctgtgatgcattcctatgttgactccatgaagtttatagggttgaaatttgatgctgcaattcgtgcgttcctgaaaggatttcgccttcctggtgaggcgcagaagatagatcgcataatggaaaagtttgctgagcggtactgtgctgataatcctgagcttttcaaaaatgcagatactgcttatgttcttgcttatgctgttataatgttgaatactgatgcacataatccaatggtgtggcctaagatgtcaaaatcagattttgttcgtatgaacactgcaagtgatgcagaagaatgtgtcccaaatgagctcttggaagaaatttatgattccattgtcaaggaagagataaagatgaaagacgattctcatgatacttcaaaatccaccaagagacctgaaacagaagaaagaggccgtcttgtcaatattctcaatttagcccttccaagactgaagtcagctagtgatacaaaggcagagagtgaaaagatcatcaaacagacccaggcacttttcaagaaccagggacagaagaaaggtgtttttcatgttgcgcagcaggttgagcttgttagaccaatgcttgaagctgtaggatggcctttgcttgcaacattttctgtgaccatggaggaaggtgacagtaagcctagggttgtatcatgcatggaaggatttcgtgctggtatccatcttactcgtgttcttggaatggacaccatgcgctatgctttcttgacgtccttagtgcggtttacatttttgcacgctcccaaggagatgcgcagtaaaaatgttgaggcactgaggactcttcttggtttagctgacactgatatggatgctttacaagatacttggaatgctgttttagaatgtgtctcaagactcgagtatatcacttcgaacccttcaatttctgcaactgtaatgctgggatcaaatcaaatatcgagggattctgtagtccaatcgctgaaagagttggctggaaagcctgctgaacaaatctttgtaaacagtgtaaaactgccaagtgattcaattgttgaattcttcaccgccctatgtggtgtttctgctgaagaactaaaacaaacacctgctcgtgtctttagcttgcagaagcttgtagagataagctattataacatggctcgcattcggctggtgtgggctagaatatggtctgtgttggcccagcactttattgctgctggaagccacaatgaggagaaagttgcaatgtatgccattgattcactaagacagcttggtatgaagtacttggagcgtgctgaattaaacaatttcacatttcagagtgacatactgaaaccttttgtcattttaatgaggaatacccacaactcaaaaatccgaggtttaattgttgattgcattgttcagttgatcaagtcaaaagttggtagcataaagtcagggtggcgttgcgtattcatgatatttactgcagcagctgatgatgaggatgaatcaattgttgagagtgcttttgaaaatgtagaacaagttatcttggaacattttgaccaagttgttggtgattgcttcatggattgcgtcaactgtcttattggttttgcaaataacaagtgcactcctcggattagtttgaaggctattgctctcctgcgtatatgtgaagatcgtttggcagagggattcattccaggcggcgctattaaacctattgatgttgttccagaggccaattttgatgtgactgagcattattggtttcctatgctagctggtttgtctgatttgactttagactccagaccagaagtcagacactgtgcactggaagtgttgtttgatttgttgaatgaaagaggacataagttctcttctcccttctgggagagtatttttcatcgtgtactatttccaatttttgatcatgtaaggcatgctggaagggatgggctttcttcttctggggatgattggcttcgtgatactagcattcattcgctgcagttaatctgcaaccttttcaatacattctataaggtagcatgtgttcttccttttagttgcttgacaaacatcctttgtataattcagaatataagtgtgatgaaactggtcatccgctacttctatagatatcacattgaaacttgtttggttggccatcgtctgactgtggcacttacaggaggtatcctttatgcttccacctcttctcagtttgctgcttgaatgtgcgaaaaaaacagaccaaactgtcgtttcaatttctcttggcgctttagttcatctgattgaagttggtggtcaccagttcagtgatggtgattgggaaacattattaaagagtattagggatgcgtcatacacaactcagcctcttgaactgctcaattcattaggattccataaatcaaacaaccagcagttactttcaagagaagaaagcaatgcacatggcaatagttaccatggcagccggggggaaccctccatcgttaataatggtgagcatagtcatgcagaggcaggtccacaaactagcctggagaattcggaaggtttaccgtcaccatcagggagaacacaacctgctgtttccccacgtggccaaagctttggacaaagaattatgggcaatatgatggataatcttttggttagaagtcttacatccaaatcaaaaggtcgagtcgatgatattgctccaccctcacctgtgaaggcccctgatgatgatgagacagacaaggctgaaggggaagagagccctatgatggaaactgtccggagcaaatgtatcacacagttgctgctgctcggggcaattgacagcatacagaagaggtattggagcaggttaaaagctacacaacagatagcaataatggatatcttgctctcactgctagaatttgcttcttcgtataactcaccttcaaattttcggacgagaatgcaccatatacctctagaaagacctccactgaatcttctccgtcaagaactagttggaacaacaatttatttagatatccttcataagtcaacagtggagcaggacaaaattgactccattgaggaaacaaatggtttaaatgtggaatctggtgaccaggaaaagatcaagtacctagcagaagggaagctggtttctttttgtgggcagattttgaaagaggcgtctgttctccagcctagcactggggaggctgccagtgcagacatacatcgtgtattagacttacgggcacctgttattgtaaaggttttgaaaggaatgtgcatcatggatgctcagatcttcagaaggcacctgaaagagttctatccattaattaccaaacttatctgttgtgatcagatggatgttcgtggagcccttggtgatctctttagcaaacagcttactccactcatgccctgaagtctggcagtatttcctcccttgcatagatcttgttggaacatattcttcgtcagcatttttgtgcaaacatggagcaccggttgggtgcttgacatccttaacgcgctttctggtgcaacagctactccctaggaacttaagagcttgatcagcgggaacggcaggtccctaggccacatcttttttttttggatgacgcaagggaagtagcttgactgatgcgcacaccgtgtttttcctagcaggcttgtactttggagctatttatctgtgcccggacagggatgatgcttccattatacagtagagtagtgttggtaatatgtacacattgttgagaacgttgtacttgaggcctgttgttattatacggcaatagtagattgtttgcggcaagcctcgttttttgtgcgtctaattctctgacttgcagaattgcggtggcaaatacccattgccctccaagttgtgcgttagcgtatttatccgtagttgacagcaatgaacatattactactgctttctgtattttctattaacgcatgcacatagtttattgggtttccatattttcaatc

SEQ ID NO: 219305 - DNA, 5774 bp, Zea Mays
cgtaaaagaaaaattcagagatggtcctcgactcctggtgggtggtggcgatctcccagctgaactgaaagagcaagcgtgcgtgtgagacaaccaggtccgatccgcccccgccgagccgaggacagcagcgggggctctcggtctcctcctaggctcctacagatctcgtaccccgtcacagatctcgcgccctctccatcccatgcccaccccccctcgtcggatctgaccactccgcccctcctcccgtctccgccgccggagctgatatccgcggtcatggcgggcgccgcgggcgggttcgtcacgcgggccttcgaggccatgctcaaggagtgcgctgccaaccgcggcaagttcgccgcgctgcagcaatccatccagtcatacctcgatagtatcaagggggctacagcagagggcgcggtcatcaccgaggcgctcgggtcagctgggcgcgtgctcgacgggccgcaggccgagctggtgctgcagccgctccgcctcgccgtcgagaccaagcacgtcaagctcgtcgagcccgcgctcgactgcctccacaaacttattgcttatgaccatttagaaggcgatcctggtttagaaggtggtaaaaattccccaatatttacagacatcctgaacatggtatgtggttgcgtcgataacacctcctctgacagtactgttctccaagtcttgaaagtgcttcttaatgctgttgcttcaaataagtttagagttcatggagagccattgcttggggtcattagagtatgctataacattgctcttaataggctacctcaaaggctatgttaacccagatgatcagcattgtattcaggagaatggaatctgagcaggtttctgtatcgcccggaagctctgtggttaaagatatgccttcatctatcacaaatgattctgaaaatggagaaatatctactgatggccaagatgaggaaaaggttactctgggagatgcattgtccatgaatcggccttctgaagctcctccaacgtctgttgaagagcttcagaatcttgcaggtggagcagatattaaggggctggaagctgttctagataaggctgttgaacttgaagacgggaaaaaagtgtcacgtggaattgacctggacactgtgaatataatacagcgtgatgcactattgctctttcgaactctctgcaagatgagcatgaaagaagaaagtgatgaggttgctaccaagacaaggctgctatcacttgaactgctccagggattgctagagggagtcagcaatgtgttcatcaaaaattttcacttcattgattcagtcaaagcatatctttcgtatgctcttctgcgagcatctgtctcttcatctccagttgtttttcagtatgcttgtggtatgttttcagttctgttgctccggtttagagagagtctgaaggatgttggagaaagtttgcaaagatccccaaatgcttgcagatgtgtttgtgaactatgactgtgatcttgaggggccaaatctttttgaacgcacggttagtgcgctatcaagaatagcacaaggatctcaaattgctgatactaactccatcgtgtcatcccaaacagtttctgtaaaaagctcctctctccagtgtttggtgattattctgaagtcattggctgattgggagcaacttcgaagagattcctcaaagcaagggagcattgttgaatctcatgaagaggatgcttcaaggagattgacaactgatgagatgaagaaccaagaggatggtcggaatcagtttgagagagccaaagctcataagtcgacaatggaggctgcaatctctgagtttaatcgtaaaccaagtaaagggattgaatatttgttgtcaaataaattggtagaaaataaggcatcatctgtagctcagtttctcaagagcaatcccagcttggataaggttatgattggtgaatacttgggacagcatgaggagttccctcttgctgtgatgcattcctatgttgactccatgaagtttatagggttgaaatttgatgctgcaattcgtgcgttcctgaaaggatttcgccttcctggtgaggcgcagaagatagatcgcataatggaaaagtttgctgagcggtactgtgctgataatcctgagcttttcaaaaatgcagatactgcttatgttcttgcttatgctgttataatgttgaatactgatgcacataatccaatggtgtggcctaagatgtcaaaatcagattttgttcgtatgaacactgcaagtgatgcagaagaatgtgtcccaaatgagctcttggaagaaatttatgattccattgtcaaggaagagataaagatgaaagacgattctcatgatacttcaaaatccaccaagagacctgaaacagaagaaagaggccgtcttgtcaatattctcaatttagcccttccaagactgaagtcagctagtgatacaaaggcagagagtgaaaagatcatcaaacagacccaggcacttttcaagaaccagggacagaagaaaggtgtttttcatgttgcgcagcaggttgagcttgttagaccaatgcttgaagctgtaggatggcctttgcttgcaacattttctgtgaccatggaggaaggtgacagtaagcctagggttgtatcatgcatggaaggatttcgtgctggtatccatcttactcgtgttcttggaatggacaccatgcgctatgctttcttgacgtccttagtgcggtttacatttttgcacgctcccaaggagatgcgcagtaaaaatgttgaggcactgaggactcttcttggtttagctgacactgatatggatgctttacaagatacttggaatgctgttttagaatgtgtctcaagactcgagtatatcacttcgaacccttcaatttctgcaactgtaatgctgggatcaaatcaaatatcgagggattctgtagtccaatcgctgaaagagttggctggaaagcctgctgaacaaatctttgtaaacagtgtaaaactgccaagtgattcaattgttgaattcttcaccgccctatgtggtgtttctgctgaagaactaaaacaaacacctgctcgtgtctttagcttgcagaagcttgtagagataagctattataacatggctcgcattcggctggtgtgggctagaatatggtctgtgttggcccagcactttattgctgctggaagccacaatgaggagaaagttgcaatgtatgccattgattcactaagacagcttggtatgaagtacttggagcgtgctgaattaaacaatttcacatttcagagtgacatactgaaaccttttgtcattttaatgaggaatacccacaactcaaaaatccgaggtttaattgttgattgcattgttcagttgatcaagtcaaaagttggtagcataaagtcagggtggcgttgcgtattcatgatatttactgcagcagctgatgatgaggatgaatcaattgttgagagtgcttttgaaaatgtagaacaagttatcttggaacattttgaccaagttgttggtgattgcttcatggattgcgtcaactgtcttattggttttgcaaataacaagtgcactcctcggattagtttgaaggctattgctctcctgcgtatatgtgaagatcgtttggcagagggattcattccaggcggcgctattaaacctattgatgttgttccagaggccaattttgatgtgactgagcattattggtttcctatgctagctggtttgtctgatttgactttagactccagaccagaagtcagacactgtgcactggaagtgttgtttgatttgttgaatgaaagaggacataagttctcttctcccttctgggagagtatttttcatcgtgtactatttccaatttttgatcatgtaaggcatgctggaagggatgggctttcttcttctggggatgattggcttcgtgatactagcattcattcgctgcagttaatctgcaaccttttcaatacattctataagtttgctgcttgaatgtgcgaaaaaaacagaccaaactgtcgtttcaatttctcttggcgctttagttcatctgattgaagttggtggtcaccagttcagtgatggtgattgggaaacattattaaagagtattagggatgcgtcatacacaactcagcctcttgaactgctcaattcattaggattccataaatcaaacaaccagcagttactttcaagagaagaaagcaatgcacatggcaatagttaccatggcagccggggggaaccctccatcgttaataatggtgagcatagtcatgcagaggcaggtccacaaactagcctggagaattcggaaggtttaccgtcaccatcagggagaacacaacctgctgtttccccacgtggccaaagctttggacaaagaattatgggcaatatgatggataatcttttggttagaagtcttacatccaaatcaaaaggtcgagtcgatgatattgctccaccctcacctgtgaaggcccctgatgatgatgagacagacaaggctgaaggggaagagagccctatgatggaaactgtccggagcaaatgtatcacacagttgctgctgctcggggcaattgacagcatacagaatttgcttcttcgtataactcaccttcaaattttcggacgagaatgcaccatatacctctagaaagacctccactgaatcttctccgtcaagaactagttggaacaacaatttatttagatatccttcataagtcaacagtggagcaggacaaaattgactccattgaggaaacaaatggtttaaatgtggaatctggtgaccaggaaaagatcaagtacctagcagaagggaagctggtttctttttgtgggcagattttgaaagaggcgtctgttctccagcctagcactggggaggctgccagtgcagacatacatcgtgtattagacttacgggcacctgttattgtaaaggttttgaaaggaatgtgcatcatggatgctcagatcttcagaaggcacctgaaagagttctatccattaattaccaaacttatctgttgtgatcagatggatgttcgtggagcccttggtgatctctttagcaaacagcttactccactcatgccctgaagtctggcagtatttcctcccttgcatagatcttgttggaacatattcttcgtcagcatttttgtgcaaacatggagcaccggttgggtgcttgacatccttaacgcgctttctggtgcaacagctactccctaggaacttaagagcttgatcagcgggaacggcaggtccctaggccacatcttttttttttggatgacgcaagggaagtagcttgactgatgcgcacaccgtgtttttcctagcaggcttgtactttggagctatttatctgtgcccggacagggatgatgcttccattatacagtagagtagtgttggtaatatgtacacattgttgagaacgttgtacttgaggcctgttgttattatacggcaatagtagattgtttgcggcaagcctcgttttttgtgcgtctaattctctgacttgcagaattgcggtggcaaatacccattgccctccaagttgtgcgttagcgtatttatccgtagttgacagcaatgaacatattactactgctttctgtattttctattaacgcatgcacatagtttattgggtttccatattttcaatc

SEQ ID NO: 219306 - DNA, 5708 bp, Zea Mays
cgtaaaagaaaaattcagagatggtcctcgactcctggtgggtggtggcgatctcccagctgaactgaaagagcaagcgtgcgtgtgagacaaccaggtccgatccgcccccgccgagccgaggacagcagcgggggctctcggtctcctcctaggctcctacagatctcgtaccccgtcacagatctcgcgccctctccatcccatgcccaccccccctcgtcggatctgaccactccgcccctcctcccgtctccgccgccggagctgatatccgcggtcatggcgggcgccgcgggcgggttcgtcacgcgggccttcgaggccatgctcaaggagtgcgctgccaaccgcggcaagttcgccgcgctgcagcaatccatccagtcatacctcgatagtatcaagggggctacagcagagggcgcggtcatcaccgaggcgctcgggtcagctgggcgcgtgctcgacgggccgcaggccgagctggtgctgcagccgctccgcctcgccgtcgagaccaagcacgtcaagctcgtcgagcccgcgctcgactgcctccacaaacttattgcttatgaccatttagaaggcgatcctggtttagaaggtggtaaaaattccccaatatttacagacatcctgaacatggtatgtggttgcgtcgataacacctcctctgacagtactgttctccaagtcttgaaagtgcttcttaatgctgttgcttcaaataagtttagagttcatggagagccattgcttggggtcattagagtatgctataacattgctcttaataggctacctcaaaggctatgttaacccagatgatcagcattgtattcaggagaatggaatctgagcaggtttctgtatcgcccggaagctctgtggttaaagatatgccttcatctatcacaaatgattctgaaaatggagaaatatctactgatggccaagatgaggaaaaggttactctgggagatgcattgtccatgaatcggccttctgaagctcctccaacgtctgttgaagagcttcagaatcttgcaggtggagcagatattaaggggctggaagctgttctagataaggctgttgaacttgaagacgggaaaaaagtgtcacgtggaattgacctggacactgtgaatataatacagcgtgatgcactattgctctttcgaactctctgcaagatgagcatgaaagaagaaagtgatgaggttgctaccaagacaaggctgctatcacttgaactgctccagggattgctagagggagtcagcaatgtgttcatcaaaaattttcacttcattgattcagtcaaagcatatctttcgtatgctcttctgcgagcatctgtctcttcatctccagttgtttttcagtatgcttgtggtatgttttcagttctgttgctccggtttagagagagtctgaagggggaaattggtgtcttctttcctttgatagttttaaggtctctggatagctctgatagccccctcagccagaaggctagtgttcttaggatgttggagaaagtttgcaaagatccccaaatgcttgcagatgtgtttgtgaactatgactgtgatcttgaggggccaaatctttttgaacgcacggttagtgcgctatcaagaatagcacaaggatctcaaattgctgatactaactccatcgtgtcatcccaaacagtttctgtaaaaagctcctctctccagtgtttggtgattattctgaagtcattggctgattgggagcaacttcgaagagattcctcaaagcaagggagcattgttgaatctcatgaagaggatgcttcaaggagattgacaactgatgagatgaagaaccaagaggatggtcggaatcagtttgagagagccaaagctcataagtcgacaatggaggctgcaatctctgagtttaatcgtaaaccaagtaaagggattgaatatttgttgtcaaataaattggtagaaaataaggcatcatctgtagctcagtttctcaagagcaatcccagcttggataaggttatgattggtgaatacttgggacagcatgaggagttccctcttgctgtgatgcattcctatgttgactccatgaagtttatagggttgaaatttgatgctgcaattcgtgcgttcctgaaaggatttcgccttcctggtgaggcgcagaagatagatcgcataatggaaaagtttgctgagcgatactgcttatgttcttgcttatgctgttataatgttgaatactgatgcacataatccaatggtgtggcctaagatgtcaaaatcagattttgttcgtatgaacactgcaagtgatgcagaagaatgtgtcccaaatgagctcttggaagaaatttatgattccattgtcaaggaagagataaagatgaaagacgattctcatgatacttcaaaatccaccaagagacctgaaacagaagaaagaggccgtcttgtcaatattctcaatttagcccttccaagactgaagtcagctagtgatacaaaggcagagagtgaaaagatcatcaaacagacccaggcacttttcaagaaccagggacagaagaaaggtgtttttcatgttgcgcagcaggttgagcttgttagaccaatgcttgaagctgtaggatggcctttgcttgcaacattttctgtgaccatggaggaaggtgacagtaagcctagggttgtatcatgcatggaaggatttcgtgctggtatccatcttactcgtgttcttggaatggacaccatgcgctatgctttcttgacgtccttagtgcggtttacatttttgcacgctcccaaggagatgcgcagtaaaaatgttgaggcactgaggactcttcttggtttagctgacactgatatggatgctttacaagatacttggaatgctgttttagaatgtgtctcaagactcgagtatatcacttcgaacccttcaatttctgcaactgtaatgctgggatcaaatcaaatatcgagggattctgtagtccaatcgctgaaagagttggctggaaagcctgctgaacaaatctttgtaaacagtgtaaaactgccaagtgattcaattgttgaattcttcaccgccctatgtggtgtttctgctgaagaactaaaacaaacacctgctcgtgtctttagcttgcagaagcttgtagagataagctattataacatggctcgcattcggctggtgtgggctagaatatggtctgtgttggcccagcactttattgctgctggaagccacaatgaggagaaagttgcaatgtatgccattgattcactaagacagcttggtatgaagtacttggagcgtgctgaattaaacaatttcacatttcagagtgacatactgaaaccttttgtcattttaatgaggaatacccacaactcaaaaatccgaggtttaattgttgattgcattgttcagttgatcaagtcaaaagttggtagcataaagtcagggtggcgttgcgtattcatgatatttactgcagcagctgatgatgaggatgaatcaattgttgagagtgcttttgaaaatgtagaacaagttatcttggaacattttgaccaagttgttggtgattgcttcatggattgcgtcaactgtcttattggttttgcaaataacaagtgcactcctcggattagtttgaaggctattgctctcctgcgtatatgtgaagatcgtttggcagagggattcattccaggcggcgctattaaacctattgatgttgttccagaggccaattttgatgtgactgagcattattggtttcctatgctagctggtttgtctgatttgactttagactccagaccagaagcatgctggaagggatgggctttcttcttctggggatgattggcttcgtgatactagcattcattcgctgcagttaatctgcaaccttttcaatacattctataagttcatctgattgaagttggtggtcaccagttcagtgatggtgattgggaaacattattaaagagtattagggatgcgtcatacacaactcagcctcttgaactgctcaattcattaggattccataaatcaaacaaccagcagttactttcaagagaagaaagcaatgcacatggcaatagttaccatggcagccggggggaaccctccatcgttaataatggtgagcatagtcatgcagaggcaggtccacaaactagcctggagaattcggaaggtttaccgtcaccatcagggagaacacaacctgctgtttccccacgtggccaaagctttggacaaagaattatgggcaatatgatggataatcttttggttagaagtcttacatccaaatcaaaaggtcgagtcgatgatattgctccaccctcacctgtgaaggcccctgatgatgatgagacagacaaggctgaaggggaagagagccctatgatggaaactgtccggagcaaatgtatcacacagttgctgctgctcggggcaattgacagcatacagaagaggtattggagcaggttaaaagctacacaacagatagcaataatggatatcttgctctcactgctagaatttgcttcttcgtataactcaccttcaaattttcggacgagaatgcaccatatacctctagaaagacctccactgaatcttctccgtcaagaactagttggaacaacaatttatttagatatccttcataagtcaacagtggagcaggacaaaattgactccattgaggaaacaaatggtttaaatgtggaatctggtgaccaggaaaagatcaagtacctagcagaagggaagctggtttctttttgtgggcagattttgaaagaggcgtctgttctccagcctagcactggggaggctgccagtgcagacatacatcgtgtattagacttacgggcacctgttattgtaaaggttttgaaaggaatgtgcatcatggatgctcagatcttcagaaggcacctgaaagagttctatccattaattaccaaacttatctgttgtgatcagatggatgttcgtggagcccttggtgatctctttagcaaacagcttactccactcatgccctgaagtctggcagtatttcctcccttgcatagatcttgttggaacatattcttcgtcagcatttttgtgcaaacatggagcaccggttgggtgcttgacatccttaacgcgctttctggtgcaacagctactccctaggaacttaagagcttgatcagcgggaacggcaggtccctaggccacatcttttttttttggatgacgcaagggaagtagcttgactgatgcgcacaccgtgtttttcctagcaggcttgtactttggagctatttatctgtgcccggacagggatgatgcttccattatacagtagagtagtgttggtaatatgtacacattgttgagaacgttgtacttgaggcctgttgttattatacggcaatagtagattgtttgcggcaagcctcgttttttgtgcgtctaattctctgacttgcagaattgcggtggcaaatacccattgccctccaagttgtgcgttagcgtatttatccgtagttgacagcaatgaacatattactactgctttctgtattttctattaacgcatgcacatagtttattgggtttccatattttcaatc

SEQ ID NO: 219307 - DNA, 6208 bp, Zea Mays
cgtaaaagaaaaattcagagatggtcctcgactcctggtgggtggtggcgatctcccagctgaactgaaagagcaagcgtgcgtgtgagacaaccaggtccgatccgcccccgccgagccgaggacagcagcgggggctctcggtctcctcctaggctcctacagatctcgtaccccgtcacagatctcgcgccctctccatcccatgcccaccccccctcgtcggatctgaccactccgcccctcctcccgtctccgccgccggagctgatatccgcggtcatggcgggcgccgcgggcgggttcgtcacgcgggccttcgaggccatgctcaaggagtgcgctgccaaccgcggcaagttcgccgcgctgcagcaatccatccagtcatacctcgatagtatcaagggggctacagcagagggcgcggtcatcaccgaggcgctcgggtcagctgggcgcgtgctcgacgggccgcaggccgagctggtgctgcagccgctccgcctcgccgtcgagaccaagcacgtcaagctcgtcgagcccgcgctcgactgcctccacaaacttattgcttatgaccatttagaaggcgatcctggtttagaaggtggtaaaaattccccaatatttacagacatcctgaacatggtatgtggttgcgtcgataacacctcctctgacagtactgttctccaagtcttgaaagtgcttcttaatgctgttgcttcaaataagtttagagttcatggagagccattgcttggggtcattagagtatgctataacattgctcttaataggctacctcaaaggctatgttaacccagatgatcagcattgtattcaggagaatggaatctgagcaggtttctgtatcgcccggaagctctgtggttaaagatatgccttcatctatcacaaatgattctgaaaatggagaaatatctactgatggccaagatgaggaaaaggttactctgggagatgcattgtccatgaatcggccttctgaagctcctccaacgtctgttgaagagcttcagaatcttgcaggtggagcagatattaaggggctggaagctgttctagataaggctgttgaacttgaagacgggaaaaaagtgtcacgtggaattgacctggacactgtgaatataatacagcgtgatgcactattgctctttcgaactctctgcaagatgagcatgaaagaagaaagtgatgaggttgctaccaagacaaggctgctatcacttgaactgctccagggattgctagagggagtcagcaatgtgttcatcaaaaattttcacttcattgattcagtcaaagcatatctttcgtatgctcttctgcgagcatctgtctcttcatctccagttgtttttcagtatgcttgtggtatgttttcagttctgttgctccggtttagagagagtctgaagggggaaattggtgtcttctttcctttgatagttttaaggtctctggatagctctgatagccccctcagccagaaggctagtgttcttaggatgttggagaaagtttgcaaagatccccaaatgcttgcagatgtgtttgtgaactatgactgtgatcttgaggggccaaatctttttgaacgcacggttagtgcgctatcaagaatagcacaaggatctcaaattgctgatactaactccatcgtgtcatcccaaacagtttctgtaaaaagctcctctctccagtgtttggtgattattctgaagtcattggctgattgggagcaacttcgaagagattcctcaaagcaagggagcattgttgaatctcatgaagaggatgcttcaaggagattgacaactgatgagatgaagaaccaagaggatggtcggaatcagtttgagagagccaaagctcataagtcgacaatggaggctgcaatctctgagtttaatcgtaaaccaagtaaagggattgaatatttgttgtcaaataaattggtagaaaataaggcatcatctgtagctcagtttctcaagagcaatcccagcttggataaggttatgattggtgaatacttgggacagcatgaggagttccctcttgctgtgatgcattcctatgttgactccatgaagtttatagggttgaaatttgatgctgcaattcgtgcgttcctgaaaggatttcgccttcctggtgaggcgcagaagatagatcgcataatggaaaagtttgctgagcggtactgtgctgataatcctgagcttttcaaaaatgcagatactgcttatgttcttgcttatgctgttataatgttgaatactgatgcacataatccaatggtgtggcctaagatgtcaaaatcagattttgttcgtatgaacactgcaagtgatgcagaagaatgtgtcccaaatgagctcttggaagaaatttatgattccattgtcaaggaagagataaagatgaaagacgattctcatgatacttcaaaatccaccaagagacctgaaacagaagaaagaggccgtcttgtcaatattctcaatttagcccttccaagactgaagtcagctagtgatacaaaggcagagagtgaaaagatcatcaaacagacccaggcacttttcaagaaccagggacagaagaaaggtgtttttcatgttgcgcagcaggttgagcttgttagaccaatgcttgaagctgtaggatggcctttgcttgcaacattttctgtgaccatggaggaaggtgacagtaagcctagggttgtatcatgcatggaaggatttcgtgctggtatccatcttactcgtgttcttggaatggacaccatgcgctatgctttcttgacgtccttagtgcggtttacatttttgcacgctcccaaggagatgcgcagtaaaaatgttgaggcactgaggactcttcttggtttagctgacactgatatggatgctttacaagatacttggaatgctgttttagaatgtgtctcaagactcgagtatatcacttcgaacccttcaatttctgcaactgtaatgctgggatcaaatcaaatatcgagggattctgtagtccaatcgctgaaagagttggctggaaagcctgctgaacaaatctttgtaaacagtgtaaaactgccaagtgattcaattgttgaattcttcaccgccctatgtggtgtttctgctgaagaactaaaacaaacacctgctcgtgtctttagcttgcagaagcttgtagagataagctattataacatggctcgcattcggctggtgtgggctagaatatggtctgtgttggcccagcactttattgctgctggaagccacaatgaggagaaagttgcaatgtatgccattgattcactaagacagcttggtatgaagtacttggagcgtgctgaattaaacaatttcacatttcagagtgacatactgaaaccttttgtcattttaatgaggaatacccacaactcaaaaatccgaggtttaattgttgattgcattgttcagttgatcaagtcaaaagttggtagcataaagtcagggtggcgttgcgtattcatgatatttactgcagcagctgatgatgaggatgaatcaattgttgagagtgcttttgaaaatgtagaacaagttatcttggaacattttgaccaagttgttggtgattgcttcatggattgcgtcaactgtcttattggttttgcaaataacaagtgcactcctcggattagtttgaaggctattgctctcctgcgtatatgtgaagatcgtttggcagagggattcattccaggcggcgctattaaacctattgatgttgttccagaggccaattttgatgtgactgagcattattggtttcctatgctagctggtttgtctgatttgactttagactccagaccagaagcatgctggaagggatgggctttcttcttctggggatgattggcttcgtgatactagcattcattcgctgcagttaatctgcaaccttttcaatacattctataaggtagcatgtgttcttccttttagttgcttgacaaacatcctttgtataattcagaatataagtgtgatgaaactggtcatccgctacttctatagatatcacattgaaacttgtttggttggccatcgtctgactgtggcacttacaggaggtatcctttatgcttccacctcttctcagtttgctgcttgaatgtgcgaaaaaaacagaccaaactgtcgtttcaatttctcttggcgctttagttcatctgattgaagttggtggtcaccagttcagtgatggtgattgggaaacattattaaagagtattagggatgcgtcatacacaactcagcctcttgaactgctcaattcattaggattccataaatcaaacaaccagcagttactttcaagagaagaaagcaatgcacatggcaatagttaccatggcagccggggggaaccctccatcgttaataatggtgagcatagtcatgcagaggcaggtccacaaactagcctggagaattcggaaggtaccacgagcagaggtttaccgtcaccatcagggagaacacaacctgctgtttccccacgtggccaaagctttggacaaagaattatgggcaatatgatggataatcttttggttagaagtcttacatccaaatcaaaaggtcgagtcgatgatattgctccaccctcacctgtgaaggcccctgatgatgatgagacagacaaggctgaaggggaagagagccctatgatggaaactgtccggagcaaatgtatcacacagttgctgctgctcggggcaattgacagcatacaggtaagcagtttcctccactttatatgcatgctcttagatctgagtccatccattgtttctctgacaatgtggactggaagcacctttgtctgtgatacaattgaggacttctagttgcaaataaggaattcatcaccctaatatattagccagccctacttgggttgatatactgtgattaactattgatgaaacatttcagaagaggtattggagcaggttaaaagctacacaacagatagcaataatggatatcttgctctcactgctagaatttgcttcttcgtataactcaccttcaaattttcggacgagaatgcaccatatacctctagaaagacctccactgaatcttctccgtcaagaactagttggaacaacaatttatttagatatccttcataagtcaacagtggagcaggacaaaattgactccattgaggaaacaaatggtttaaatgtggaatctggtgaccaggaaaagatcaagtacctagcagaagggaagctggtttctttttgtgggcagattttgaaagaggcgtctgttctccagcctagcactggggaggctgccagtgcagacatacatcgtgtattagacttacgggcacctgttattgtaaaggttttgaaaggaatgtgcatcatggatgctcagatcttcagaaggcacctgaaagagttctatccattaattaccaaacttatctgttgtgatcagatggatgttcgtggagcccttggtgatctctttagcaaacagcttactccactcatgccctgaagtctggcagtatttcctcccttgcatagatcttgttggaacatattcttcgtcagcatttttgtgcaaacatggagcaccggttgggtgcttgacatccttaacgcgctttctggtgcaacagctactccctaggaacttaagagcttgatcagcgggaacggcaggtccctaggccacatcttttttttttggatgacgcaagggaagtagcttgactgatgcgcacaccgtgtttttcctagcaggcttgtactttggagctatttatctgtgcccggacagggatgatgcttccattatacagtagagtagtgttggtaatatgtacacattgttgagaacgttgtacttgaggcctgttgttattatacggcaatagtagattgtttgcggcaagcctcgttttttgtgcgtctaattctctgacttgcagaattgcggtggcaaatacccattgccctccaagttgtgcgttagcgtatttatccgtagttgacagcaatgaacatattactactgctttctgtattttctattaacgcatgcacatagtttattgggtttccatattttcaatc

SEQ ID NO: 219308 - DNA, 6332 bp, Zea Mays
cgtaaaagaaaaattcagagatggtcctcgactcctggtgggtggtggcgatctcccagctgaactgaaagagcaagcgtgcgtgtgagacaaccaggtccgatccgcccccgccgagccgaggacagcagcgggggctctcggtctcctcctaggctcctacagatctcgtaccccgtcacagatctcgcgccctctccatcccatgcccaccccccctcgtcggatctgaccactccgcccctcctcccgtctccgccgccggagctgatatccgcggtcatggcgggcgccgcgggcgggttcgtcacgcgggccttcgaggccatgctcaaggagtgcgctgccaaccgcggcaagttcgccgcgctgcagcaatccatccagtcatacctcgatagtatcaagggggctacagcagagggcgcggtcatcaccgaggcgctcgggtcagctgggcgcgtgctcgacgggccgcaggccgagctggtgctgcagccgctccgcctcgccgtcgagaccaagcacgtcaagctcgtcgagcccgcgctcgactgcctccacaaacttattgcttatgaccatttagaaggcgatcctggtttagaaggtggtaaaaattccccaatatttacagacatcctgaacatggtatgtggttgcgtcgataacacctcctctgacagtactgttctccaagtcttgaaagtgcttcttaatgctgttgcttcaaataagtttagagttcatggagagccattgcttggggtcattagagtatgctataacattgctcttaataggctacctcaaaggctatgttaacccagatgatcagcattgtattcaggagaatggaatctgagcaggtttctgtatcgcccggaagctctgtggttaaagatatgccttcatctatcacaaatgattctgaaaatggagaaatatctactgatggccaagatgaggaaaaggttactctgggagatgcattgtccatgaatcggccttctgaagctcctccaacgtctgttgaagagcttcagaatcttgcaggtggagcagatattaaggggctggaagctgttctagataaggctgttgaacttgaagacgggaaaaaagtgtcacgtggaattgacctggacactgtgaatataatacagcgtgatgcactattgctctttcgaactctctgcaagatgagcatgaaagaagaaagtgatgaggttgctaccaagacaaggctgctatcacttgaactgctccagggattgctagagggagtcagcaatgtgttcatcaaaaattttcacttcattgattcagtcaaagcatatctttcgtatgctcttctgcgagcatctgtctcttcatctccagttgtttttcagtatgcttgtggtatgttttcagttctgttgctccggtttagagagagtctgaagagggggaaattggtgtcttctttcctttgatagttttaaggtctctggatagctctgatagccccctcagccagaaggctagtgttcttaggatgttggagaaagtttgcaaagatccccaaatgcttgcagatgtgtttgtgaactatgactgtgatcttgaggggccaaatctttttgaacgcacggttagtgcgctatcaagaatagcacaaggatctcaaattgctgatactaactccatcgtgtcatcccaaacagtttctgtaaaaagctcctctctccagtgtttggtgattattctgaagtcattggctgattgggagcaacttcgaagagattcctcaaagcaagggagcattgttgaatctcatgaagaggatgcttcaaggagattgacaactgatgagatgaagaaccaagaggatggtcggaatcagtttgagagagccaaagctcataagtcgacaatggaggctgcaatctctgagtttaatcgtaaaccaagtaaagggattgaatatttgttgtcaaataaattggtagaaaataaggcatcatctgtagctcagtttctcaagagcaatcccagcttggataaggttatgattggtgaatacttgggacagcatgaggagttccctcttgctgtgatgcattcctatgttgactccatgaagtttatagggttgaaatttgatgctgcaattcgtgcgttcctgaaaggatttcgccttcctggtgaggcgcagaagatagatcgcataatggaaaagtttgctgagcggtactgtgctgataatcctgagcttttcaaaaatgcagatactgcttatgttcttgcttatgctgttataatgttgaatactgatgcacataatccaatggtgtggcctaagatgtcaaaatcagattttgttcgtatgaacactgcaagtgatgcagaagaatgtgtcccaaatgagctcttggaagaaatttatgattccattgtcaaggaagagataaagatgaaagacgattctcatgatacttcaaaatccaccaagagacctgaaacagaagaaagaggccgtcttgtcaatattctcaatttagcccttccaagactgaagtcagctagtgatacaaaggcagagagtgaaaagatcatcaaacagacccaggcacttttcaagaaccagggacagaagaaaggtgtttttcatgttgcgcagcaggttgagcttgttagaccaatgcttgaagctgtaggatggcctttgcttgcaacattttctgtgaccatggaggaaggtgacagtaagcctagggttgtatcatgcatggaaggatttcgtgctggtatccatcttactcgtgttcttggaatggacaccatgcgctatgctttcttgacgtccttagtgcggtttacatttttgcacgctcccaaggagatgcgcagtaaaaatgttgaggcactgaggactcttcttggtttagctgacactgatatggatgctttacaagatacttggaatgctgttttagaatgtgtctcaagactcgagtatatcacttcgaacccttcaatttctgcaactgtaatgctgggatcaaatcaaatatcgagggattctgtagtccaatcgctgaaagagttggctggaaagcctgctgaacaaatctttgtaaacagtgtaaaactgccaagtgattcaattgttgaattcttcaccgccctatgtggtgtttctgctgaagaactaaaacaaacacctgctcgtgtctttagcttgcagaagcttgtagagataagctattataacatggctcgcattcggctggtgtgggctagaatatggtctgtgttggcccagcactttattgctgctggaagccacaatgaggagaaagttgcaatgtatgccattgattcactaagacagcttggtatgaagtacttggagcgtgctgaattaaacaatttcacatttcagagtgacatactgaaaccttttgtcattttaatgaggaatacccacaactcaaaaatccgaggtttaattgttgattgcattgttcagttgatcaagtcaaaagttggtagcataaagtcagggtggcgttgcgtattcatgatatttactgcagcagctgatgatgaggatgaatcaattgttgagagtgcttttgaaaatgtagaacaagttatcttggaacattttgaccaagttgttggtgattgcttcatggattgcgtcaactgtcttattggttttgcaaataacaagtgcactcctcggattagtttgaaggctattgctctcctgcgtatatgtgaagatcgtttggcagagggattcattccaggcggcgctattaaacctattgatgttgttccagaggccaattttgatgtgactgagcattattggtttcctatgctagctggtttgtctgatttgactttagactccagaccagaagtcagacactgtgcactggaagtgttgtttgatttgttgaatgaaagaggacataagttctcttctcccttctgggagagtatttttcatcgtgtactatttccaatttttgatcatgtaaggcatgctggaagggatgggctttcttcttctggggatgattggcttcgtgatactagcattcattcgctgcagttaatctgcaaccttttcaatacattctataaggtagcatgtgttcttccttttagttgcttgacaaacatcctttgtataattcagaatataagtgtgatgaaactggtcatccgctacttctatagatatcacattgaaacttgtttggttggccatcgtctgactgtggcacttacaggaggtatcctttatgcttccacctcttctcagtttgctgcttgaatgtgcgaaaaaaacagaccaaactgtcgtttcaatttctcttggcgctttagttcatctgattgaagttggtggtcaccagttcagtgatggtgattgggaaacattattaaagagtattagggatgcgtcatacacaactcagcctcttgaactgctcaattcattaggattccataaatcaaacaaccagcagttactttcaagagaagaaagcaatgcacatggcaatagttaccatggcagccggggggaaccctccatcgttaataatggtgagcatagtcatgcagaggcaggtccacaaactagcctggagaattcggaaggtaccacgagcagaggtttaccgtcaccatcagggagaacacaacctgctgtttccccacgtggccaaagctttggacaaagaattatgggcaatatgatggataatcttttggttagaagtcttacatccaaatcaaaaggtcgagtcgatgatattgctccaccctcacctgtgaaggcccctgatgatgatgagacagacaaggctgaaggggaagagagccctatgatggaaactgtccggagcaaatgtatcacacagttgctgctgctcggggcaattgacagcatacaggtaagcagtttcctccactttatatgcatgctcttagatctgagtccatccattgtttctctgacaatgtggactggaagcacctttgtctgtgatacaattgaggacttctagttgcaaataaggaattcatcaccctaatatattagccagccctacttgggttgatatactgtgattaactattgatgaaacatttcagaagaggtattggagcaggttaaaagctacacaacagatagcaataatggatatcttgctctcactgctagaatttgcttcttcgtataactcaccttcaaattttcggacgagaatgcaccatatacctctagaaagacctccactgaatcttctccgtcaagaactagttggaacaacaatttatttagatatccttcataagtcaacagtggagcaggacaaaattgactccattgaggaaacaaatggtttaaatgtggaatctggtgaccaggaaaagatcaagtacctagcagaagggaagctggtttctttttgtgggcagattttgaaagaggcgtctgttctccagcctagcactggggaggctgccagtgcagacatacatcgtgtattagacttacgggcacctgttattgtaaaggttttgaaaggaatgtgcatcatggatgctcagatcttcagaaggcacctgaaagagttctatccattaattaccaaacttatctgttgtgatcagatggatgttcgtggagcccttggtgatctctttagcaaacagcttactccactcatgccctgaagtctggcagtatttcctcccttgcatagatcttgttggaacatattcttcgtcagcatttttgtgcaaacatggagcaccggttgggtgcttgacatccttaacgcgctttctggtgcaacagctactccctaggaacttaagagcttgatcagcgggaacggcaggtccctaggccacatcttttttttttggatgacgcaagggaagtagcttgactgatgcgcacaccgtgtttttcctagcaggcttgtactttggagctatttatctgtgcccggacagggatgatgcttccattatacagtagagtagtgttggtaatatgtacacattgttgagaacgttgtacttgaggcctgttgttattatacggcaatagtagattgtttgcggcaagcctcgttttttgtgcgtctaattctctgacttgcagaattgcggtggcaaatacccattgccctccaagttgtgcgttagcgtatttatccgtagttgacagcaatgaacatattactactgctttctgtattttctattaacgcatgcacatagtttattgggtttccatattttcaatc

SEQ ID NO: 219309 - DNA, 5890 bp, Zea Mays
cgtaaaagaaaaattcagagatggtcctcgactcctggtgggtggtggcgatctcccagctgaactgaaagagcaagcgtgcgtgtgagacaaccaggtccgatccgcccccgccgagccgaggacagcagcgggggctctcggtctcctcctaggctcctacagatctcgtaccccgtcacagatctcgcgccctctccatcccatgcccaccccccctcgtcggatctgaccactccgcccctcctcccgtctccgccgccggagctgatatccgcggtcatggcgggcgccgcgggcgggttcgtcacgcgggccttcgaggccatgctcaaggagtgcgctgccaaccgcggcaagttcgccgcgctgcagcaatccatccagtcatacctcgatagtatcaagggggctacagcagagggcgcggtcatcaccgaggcgctcgggtcagctgggcgcgtgctcgacgggccgcaggccgagctggtgctgcagccgctccgcctcgccgtcgagaccaagcacgtcaagctcgtcgagcccgcgctcgactgcctccacaaacttattgcttatgaccatttagaaggcgatcctggtttagaaggtggtaaaaattccccaatatttacagacatcctgaacatggtatgtggttgcgtcgataacacctcctctgacagtactgttctccaagtcttgaaagtgcttcttaatgctgttgcttcaaataagtttagagttcatggagagccattgcttggggtcattagagtatgctataacattgctcttaataggctacctcaaaggctatgttaacccagatgatcagcattgtattcaggagaatggaatctgagcaggtttctgtatcgcccggaagctctgtggttaaagatatgccttcatctatcacaaatgattctgaaaatggagaaatatctactgatggccaagatgaggaaaaggttactctgggagatgcattgtccatgaatcggccttctgaagctcctccaacgtctgttgaagagcttcagaatcttgcaggtggagcagatattaaggggctggaagctgttctagataaggctgttgaacttgaagacgggaaaaaagtgtcacgtggaattgacctggacactgtgaatataatacagcgtgatgcactattgctctttcgaactctctgcaagatgagcatgaaagaagaaagtgatgaggttgctaccaagacaaggctgctatcacttgaactgctccagggattgctagagggagtcagcaatgtgttcatcaaaaattttcacttcattgattcagtcaaagcatatctttcgtatgctcttctgcgagcatctgtctcttcatctccagttgtttttcagtatgcttgtggtatgttttcagttctgttgctccggtttagagagagtctgaagggggaaattggtgtcttctttcctttgatagttttaaggtctctggatagctctgatagccccctcagccagaaggctagtgttcttaggatgttggagaaagtttgcaaagatccccaaatgcttgcagatgtgtttgtgaactatgactgtgatcttgaggggccaaatctttttgaacgcacggttagtgcgctatcaagaatagcacaaggatctcaaattgctgatactaactccatcgtgtcatcccaaacagtttctgtaaaaagctcctctctccagtgtttggtgattattctgaagtcattggctgattgggagcaacttcgaagagattcctcaaagcaagggagcattgttgaatctcatgaagaggatgcttcaaggagattgacaactgatgagatgaagaaccaagaggatggtcggaatcagtttgagagagccaaagctcataagtcgacaatggaggctgcaatctctgagtttaatcgtaaaccaagtaaagggattgaatatttgttgtcaaataaattggtagaaaataaggcatcatctgtagctcagtttctcaagagcaatcccagcttggataaggttatgattggtgaatacttgggacagcatgaggagttccctcttgctgtgatgcattcctatgttgactccatgaagtttatagggttgaaatttgatgctgcaattcgtgcgttcctgaaaggatttcgccttcctggtgaggcgcagaagatagatcgcataatggaaaagtttgctgagcgatactgcttatgttcttgcttatgctgttataatgttgaatactgatgcacataatccaatggtgtggcctaagatgtcaaaatcagattttgttcgtatgaacactgcaagtgatgcagaagaatgtgtcccaaatgagctcttggaagaaatttatgattccattgtcaaggaagagataaagatgaaagacgattctcatgatacttcaaaatccaccaagagacctgaaacagaagaaagaggccgtcttgtcaatattctcaatttagcccttccaagactgaagtcagctagtgatacaaaggcagagagtgaaaagatcatcaaacagacccaggcacttttcaagaaccagggacagaagaaaggtgtttttcatgttgcgcagcaggttgagcttgttagaccaatgcttgaagctgtaggatggcctttgcttgcaacattttctgtgaccatggaggaaggtgacagtaagcctagggttgtatcatgcatggaaggatttcgtgctggtatccatcttactcgtgttcttggaatggacaccatgcgctatgctttcttgacgtccttagtgcggtttacatttttgcacgctcccaaggagatgcgcagtaaaaatgttgaggcactgaggactcttcttggtttagctgacactgatatggatgctttacaagatacttggaatgctgttttagaatgtgtctcaagactcgagtatatcacttcgaacccttcaatttctgcaactgtaatgctgggatcaaatcaaatatcgagggattctgtagtccaatcgctgaaagagttggctggaaagcctgctgaacaaatctttgtaaacagtgtaaaactgccaagtgattcaattgttgaattcttcaccgccctatgtggtgtttctgctgaagaactaaaacaaacacctgctcgtgtctttagcttgcagaagcttgtagagataagctattataacatggctcgcattcggctggtgtgggctagaatatggtctgtgttggcccagcactttattgctgctggaagccacaatgaggagaaagttgcaatgtatgccattgattcactaagacagcttggtatgaagtacttggagcgtgctgaattaaacaatttcacatttcagagtgacatactgaaaccttttgtcattttaatgaggaatacccacaactcaaaaatccgaggtttaattgttgattgcattgttcagttgatcaagtcaaaagttggtagcataaagtcagggtggcgttgcgtattcatgatatttactgcagcagctgatgatgaggatgaatcaattgttgagagtgcttttgaaaatgtagaacaagttatcttggaacattttgaccaagttgttggtgattgcttcatggattgcgtcaactgtcttattggttttgcaaataacaagtgcactcctcggattagtttgaaggctattgctctcctgcgtatatgtgaagatcgtttggcagagggattcattccaggcggcgctattaaacctattgatgttgttccagaggccaattttgatgtgactgagcattattggtttcctatgctagctggtttgtctgatttgactttagactccagaccagaagcatgctggaagggatgggctttcttcttctggggatgattggcttcgtgatactagcattcattcgctgcagttaatctgcaaccttttcaatacattctataagtttgctgcttgaatgtgcgaaaaaaacagaccaaactgtcgtttcaatttctcttggcgctttagttcatctgattgaagttggtggtcaccagttcagtgatggtgattgggaaacattattaaagagtattagggatgcgtcatacacaactcagcctcttgaactgctcaattcattaggattccataaatcaaacaaccagcagttactttcaagagaagaaagcaatgcacatggcaatagttaccatggcagccggggggaaccctccatcgttaataatggtgagcatagtcatgcagaggcaggtccacaaactagcctggagaattcggaaggtttaccgtcaccatcagggagaacacaacctgctgtttccccacgtggccaaagctttggacaaagaattatgggcaatatgatggataatcttttggttagaagtcttacatccaaatcaaaaggtcgagtcgatgatattgctccaccctcacctgtgaaggcccctgatgatgatgagacagacaaggctgaaggggaagagagccctatgatggaaactgtccggagcaaatgtatcacacagttgctgctgctcggggcaattgacagcatacaggtaagcagtttcctccactttatatgcatgctcttagatctgagtccatccattgtttctctgacaatgtggactggaagcacctttgtctgtgatacaattgaggacttctagttgcaaataaggaattcatcaccctaatatattagccagccctacttgggttgatatactgtgattaactattgatgaaacatttcagaagaggtattggagcaggttaaaagctacacaacagatagcaataatggatatcttgctctcactgctagaatttgcttcttcgtataactcaccttcaaattttcggacgagaatgcaccatatacctctagaaagacctccactgaatcttctccgtcaagaactagttggaacaacaatttatttagatatccttcataagtcaacagtggagcaggacaaaattgactccattgaggaaacaaatggtttaaatgtggaatctggtgaccaggaaaagatcaagtacctagcagaagggaagctggtttctttttgtgggcagattttgaaagaggcgtctgttctccagcctagcactggggaggctgccagtgcagacatacatcgtgtattagacttacgggcacctgttattgtaaaggttttgaaaggaatgtgcatcatggatgctcagatcttcagaaggcacctgaaagagttctatccattaattaccaaacttatctgttgtgatcagatggatgttcgtggagcccttggtgatctctttagcaaacagcttactccactcatgccctgaagtctggcagtatttcctcccttgcatagatcttgttggaacatattcttcgtcagcatttttgtgcaaacatggagcaccggttgggtgcttgacatccttaacgcgctttctggtgcaacagctactccctaggaacttaagagcttgatcagcgggaacggcttgtactttggagctatttatctgtgcccggacagggatgatgcttccattatacagtagagtagtgttggtaatatgtacacattgttgagaacgttgtacttgaggcctgttgttattatacggcaatagtagattgtttgcggcaagcctcgttttttgtgcgtctaattctctgacttgcagaattgcggtggcaaatacccattgccctccaagttgtgcgttagcgtatttatccgtagttgacagcaatgaacatattactactgctttctgtattttctattaacgcatgcacatagtttattgggtttccatattttcaatc

SEQ ID NO: 219310 - DNA, 6062 bp, Zea Mays
gccatggtacgtgcctgcgtaaaagaaaaattcagagatggtcctcgactcctggtgggtggtggcgatctcccagctgaactgaaagagcaagcgtgcgtgtgagacaaccaggtccgatccgcccccgccgagccgaggacagcagcgggggctctcggtctcctcctaggctcctacagatctcgtaccccgtcacagatctcgcgccctctccatcccatgcccaccccccctcgtcggatctgaccactccgcccctcctcccgtctccgccgccggagctgatatccgcggtcatggcgggcgccgcgggcgggttcgtcacgcgggccttcgaggccatgctcaaggagtgcgctgccaaccgcggcaagttcgccgcgctgcagcaatccatccagtcatacctcgatagtatcaagggggctacagcagagggcgcggtcatcaccgaggcgctcgggtcagctgggcgcgtgctcgacgggccgcaggccgagctggtgctgcagccgctccgcctcgccgtcgagaccaagcacgtcaagctcgtcgagcccgcgctcgactgcctccacaaacttattgcttatgaccatttagaaggcgatcctggtttagaaggtggtaaaaattccccaatatttacagacatcctgaacatggtatgtggttgcgtcgataacacctcctctgacagtactgttctccaagtcttgaaagtgcttcttaatgctgttgcttcaaataagtttagagttcatggagagccattgcttggggtcattagagtatgctataacattgctcttaataggtacctgttatatcgctaccttcttgtttgcagtatgttgccttgttgccctttggaccatgtatgataatttattcatttgtattttcttagcaagagccctgtgaaccaggctacctcaaaggctatgttaacccagatgatcagcattgtattcaggagaatggaatctgagcaggtttctgtatcgcccggaagctctgtggttaaagatatgccttcatctatcacaaatgattctgaaaatggagaaatatctactgatggccaagatgaggaaaaggttactctgggagatgcattgtccatgaatcggccttctgaagctcctccaacgtctgttgaagagcttcagaatcttgcaggtggagcagatattaaggggctggaagctgttctagataaggctgttgaacttgaagacgggaaaaaagtgtcacgtggaattgacctggacactgtgaatataatacagcgtgatgcactattgctctttcgaactctctgcaagatgagcatgaaagaagaaagtgatgaggttgctaccaagacaaggctgctatcacttgaactgctccagggattgctagagggagtcagcaatgtgttcatcaaaaattttcacttcattgattcagtcaaagcatatctttcgtatgctcttctgcgagcatctgtctcttcatctccagttgtttttcagtatgcttgtggtatgttttcagttctgttgctccggtttagagagagtctgaagggggaaattggtgtcttctttcctttgatagttttaaggtctctggatagctctgatagccccctcagccagaaggctagtgttcttaggatgttggagaaagtttgcaaagatccccaaatgcttgcagatgtgtttgtgaactatgactgtgatcttgaggggccaaatctttttgaacgcacggttagtgcgctatcaagaatagcacaaggatctcaaattgctgatactaactccatcgtgtcatcccaaacagtttctgtaaaaagctcctctctccagtgtttggtgattattctgaagtcattggctgattgggagcaacttcgaagagattcctcaaagcaagggagcattgttgaatctcatgaagaggatgcttcaaggagattgacaactgatgagatgaagaaccaagaggatggtcggaatcagtttgagagagccaaagctcataagtcgacaatggaggctgcaatctctgagtttaatcgtaaaccaagtaaagggattgaatatttgttgtcaaataaattggtagaaaataaggcatcatctgtagctcagtttctcaagagcaatcccagcttggataaggttatgattggtgaatacttgggacagcatgaggagttccctcttgctgtgatgcattcctatgttgactccatgaagtttatagggttgaaatttgatgctgcaattcgtgcgttcctgaaaggatttcgccttcctggtgaggcgcagaagatagatcgcataatggaaaagtttgctgagcggtactgtgctgataatcctgagcttttcaaaaatgcagatactgcttatgttcttgcttatgctgttataatgttgaatactgatgcacataatccaatggtgtggcctaagatgtcaaaatcagattttgttcgtatgaacactgcaagtgatgcagaagaatgtgtcccaaatgagctcttggaagaaatttatgattccattgtcaaggaagagataaagatgaaagacgattctcatgatacttcaaaatccaccaagagacctgaaacagaagaaagaggccgtcttgtcaatattctcaatttagcccttccaagactgaagtcagctagtgatacaaaggcagagagtgaaaagatcatcaaacagacccaggcacttttcaagaaccagggacagaagaaaggtgtttttcatgttgcgcagcaggttgagcttgttagaccaatgcttgaagctgtaggatggcctttgcttgcaacattttctgtgaccatggaggaaggtgacagtaagcctagggttgtatcatgcatggaaggatttcgtgctggtatccatcttactcgtgttcttggaatggacaccatgcgctatgctttcttgacgtccttagtgcggtttacatttttgcacgctcccaaggagatgcgcagtaaaaatgttgaggcactgaggactcttcttggtttagctgacactgatatggatgctttacaagatacttggaatgctgttttagaatgtgtctcaagactcgagtatatcacttcgaacccttcaatttctgcaactgtaatgctgggatcaaatcaaatatcgagggattctgtagtccaatcgctgaaagagttggctggaaagcctgctgaacaaatctttgtaaacagtgtaaaactgccaagtgattcaattgttgaattcttcaccgccctatgtggtgtttctgctgaagaactaaaacaaacacctgctcgtgtctttagcttgcagaagcttgtagagataagctattataacatggctcgcattcggctggtgtgggctagaatatggtctgtgttggcccagcactttattgctgctggaagccacaatgaggagaaagttgcaatgtatgccattgattcactaagacagcttggtatgaagtacttggagcgtgctgaattaaacaatttcacatttcagagtgacatactgaaaccttttgtcattttaatgaggaatacccacaactcaaaaatccgaggtttaattgttgattgcattgttcagttgatcaagtcaaaagttggtagcataaagtcagggtggcgttgcgtattcatgatatttactgcagcagctgatgatgaggatgaatcaattgttgagagtgcttttgaaaatgtagaacaagttatcttggaacattttgaccaagttgttggtgattgcttcatggattgcgtcaactgtcttattggttttgcaaataacaagtgcactcctcggattagtttgaaggctattgctctcctgcgtatatgtgaagatcgtttggcagagggattcattccaggcggcgctattaaacctattgatgttgttccagaggccaattttgatgtgactgagcattattggtttcctatgctagctggtttgtctgatttgactttagactccagaccagaagtcagacactgtgcactggaagtgttgtttgatttgttgaatgaaagaggacataagttctcttctcccttctgggagagtatttttcatcgtgtactatttccaatttttgatcatgtaaggcatgctggaagggatgggctttcttcttctggggatgattggcttcgtgatactagcattcattcgctgcagttaatctgcaaccttttcaatacattctataagtttgctgcttgaatgtgcgaaaaaaacagaccaaactgtcgtttcaatttctcttggcgctttagttcatctgattgaagttggtggtcaccagttcagtgatggtgattgggaaacattattaaagagtattagggatgcgtcatacacaactcagcctcttgaactgctcaattcattaggattccataaatcaaacaaccagcagttactttcaagagaagaaagcaatgcacatggcaatagttaccatggcagccggggggaaccctccatcgttaataatggtgagcatagtcatgcagaggcaggtccacaaactagcctggagaattcggaaggtttaccgtcaccatcagggagaacacaacctgctgtttccccacgtggccaaagctttggacaaagaattatgggcaatatgatggataatcttttggttagaagtcttacatccaaatcaaaaggtcgagtcgatgatattgctccaccctcacctgtgaaggcccctgatgatgatgagacagacaaggctgaaggggaagagagccctatgatggaaactgtccggagcaaatgtatcacacagttgctgctgctcggggcaattgacagcatacagaagaggtattggagcaggttaaaagctacacaacagatagcaataatggatatcttgctctcactgctagaatttgcttcttcgtataactcaccttcaaattttcggacgagaatgcaccatatacctctagaaagacctccactgaatcttctccgtcaagaactagttggaacaacaatttatttagatatccttcataagtcaacagtggagcaggacaaaattgactccattgaggaaacaaatggtttaaatgtggaatctggtgaccaggaaaagatcaagtacctagcagaagggaagctggtttctttttgtgggcagattttgaaagaggcgtctgttctccagcctagcactggggaggctgccagtgcagacatacatcgtgtattagacttacgggcacctgttattgtaaaggttttgaaaggaatgtgcatcatggatgctcagatcttcagaaggcacctgaaagagttctatccattaattaccaaacttatctgttgtgatcagatggatgttcgtggagcccttggtgatctctttagcaaacagcttactccactcatgccctgaagtctggcagtatttcctcccttgcatagatcttgttggaacatattcttcgtcagcatttttgtgcaaacatggagcaccggttgggtgcttgacatccttaacgcgctttctggtgcaacagctactccctaggaacttaagagcttgatcagcgggaacggcaggtccctaggccacatcttttttttttggatgacgcaagggaagtagcttgactgatgcgcacaccgtgtttttcctagcaggcttgtactttggagctatttatctgtgcccggacagggatgatgcttccattatacagtagagtagtgttggtaatatgtacacattgttgagaacgttgtacttgaggcctgttgttattatacggcaatagtagattgtttgcggcaagcctcgttttttgtgcgtctaattctctgacttgcagaattgcggtggcaaatacccattgccctccaagttgtgcgttagcgtatttatccgtagttgacagcaatgaacatattactactgctttctgtattttctattaacgcatgcacatagtttattgggtttccatattttcaatc

SEQ ID NO: 219311 - DNA, 3365 bp, Zea Mays
cgtaggaatgccgaccactacataagccgctggcggagaaagctcgaagagcttcccttcattcgcttcgcgggagtcgcacacagcacatagctggaagtcagagggcccgtactacctgcctaacccttcggtccgagggaccgtagaacggaaagcgccttctaaacaactcggcagaagggaaggggcctatgtatttgcatgacccctgcggatttgaccctacctacacccggagccaatcccctagcggtcctgccaccacgccgcagaacaggagctcgtgtggaaccttggatttctggcgtaacagcggtggaaggtataaaaatattacggccgcataaccgggcctacgctaaggtcggccaaaatatggacacccgaagggcccggcgcgcacaatcctatcctatctgagcccgtcattgcatgcacttcggacagccgtccgtagcatcataaagagcacctccctttcgaggtacccaaatggaacggtctttatttgtgttgttggttggtctttctcaacgtggtctatagcacgaaaaaccattctttacaagatagggccgttcacatgaaagaaaagctaaaatccattcttcatggtcgggcgcatttctccaaatcctccaggatcacaagtggaacgctaagcaagggtggggaggctgcgagctccgcgtcgaacagaaagaagcaagcagggggtgttgccgtagcgcgccccggagagcaagcgtaggcaaccaaactaaaaaaggctacaaaagtagctagctagcgtttttaagctggctgccttttctagcgcgcgtactcttctgtggagtcgcacggaacgagccttgtcttccctccaacgactagctcccttttcttgttccggtcacccttctcttgccgtggaaggacttttgcctgtggtccaacccgtgagtcgccctcatcccctcattgctcagtgctccctgcagcttcgcagggctttacccgcgtggacgcgggcttctataagagaatgaaaagctctctctttacaattacaataaaacgcgaactgcgcggagcccaccctttttcgttttctgccgccactgggtggccgctggggaaacacagcccggccgcctctcgggaaaggaggggtgggggatgggcctacctatcccgagggagcagttgagaggttccatatgccgagccgaagggcagaacttcagtgcgtgatcgtagtatgtcacctcgtctcgtcctcgcagcatcgaagagtacctatgcactatgttccggttcactgataaggaagatagagttggggtgggggtctacgatgtgatactatagtatgccccggggagaaagatgcgcaactcaaaacggaagcaggaagcgtgttgtaaaaaatatcggaggttaccagatctctgagactaccattgatccgacagagcggaacaaccagaaaaagaagtggagttagaaagccgtatgataggtggtaactatcttgtacggttcggggggtaagcggcgtactccgggggaatattaggctctatcgaacataccgggaattggaggtagcattttacttatgttaagtcatggactggtttcttcagccctttttctatgtgttggtgttctatatgaccgacataagactcgacttgttagatattatggaggtttagtgagcaccatgccgaatttctctaccattttcttctttttcactttagccaatatgagtttacccggcactagcagctttatcggggaatttctaatcttagtaggagctttccaaagaaatagcttagtagccacattagcagcgcttgggatgattttaggcgcggcgtattccctttggctatataatcgtgtggtttctggaaatttaaaacccgatttcctctataaattctccgatctaaatggcagagaagtttccatatttctaccttttcttgttggagttgttcggatgggtgttcaccccaaagtgttcccggactgcatgcatacatccgtaagtaacttagtgcaacatggcaaatttcattgagaggaatcagcaaagaaaagaaatcttctccgggtgactggatcgccccggaaccacaagaatccttagaatgggattccaactcagcaccttttgttttgggattttgagaagagttgctctttggagagcacagtacgatgaaagttgtaagctgtgttcgggggggagttattgcctatcgttgtcctctatggtagaacccgtcggggaggcctgagaggcggtggtttaccctgtggcggatgtcagcggttcgagtccgcttatctccagcccgtgaacttagcggatactatgatagcaccgaaggttgccaattcgtcagttcgatctatgatttcgcattcatggacgttgataagatccttccatttagtagcaccttaggatggcatagccttaacgttaatggcgaggttcaaaagaggaaaggcttgcggtggatacctaggcacccagagacgaggaagggcgtagcaagcgacgaaatgcttcggggagttgaaaataagcatagatccggagattcccaaataggtcaaccttttgaactgcctgctgaatccatgagcaggcaagagacaacctggcgaactgaaacatcttagtagccagaggaaaagaaagcaaaagcgattcccgtacccgtaccgtagtagcggcgagcgaaatgggagcagcctaaaccgtgaaaacggggttgtgggagagcaatacaagcgttgtgctgctaggcgaagcggttgagtgccgcaccctagatggctaaagtccagtagccgaaagcatcactagcttacgctctgacccgagtagcatggggcacgtggaatcccgtgtgaatcagcaaggaaaggaccaccttgcaaggctaaatactcctgggtgaccgatagcgaagtagtaccgtgagggaaaggtgaaaagaacccccagtgggtagtgaaatagaacgtgaaaccgtgctgagctcccggaggggaaagtgatctctgaccgcgtgcctgttgaagaatgagccggcgactcataggcagtggcttggttaagggaatggaacccaccggagccgtagcgaaagcgagtcttcatagggcgattgtcactgcttatggacccgaacctgggtgatctatccatgaccaggatgaagcttggatgaaactaagcagaggtccgaaccgactgatgttgaagaatcagcggatgagttgtggttaggggtgaaatgccactcgaacccagagctagctggttctccccgaaatgagtttgtttc

SEQ ID NO: 219312 - DNA, 5738 bp, Zea Mays
agaaatcatacggattgcaacctacagatgaagaatctgcttcattgttcccaccatctatatcagatgtttaataagaataggaatcgaataagctgctgattgactgaggaagcatttgaaaagaaaggaagggtgatgcttgttaaacaaagctgcgtgtggggccgccacgtatagctgtagtttctgctgtagcatcggttatttccgttattgctgtagtagcatcggttattgctcaggttacgaatgacccaatctatctatggcaaccacccctacttttagtagatagagatgcgcacctagaaaagacggatgaaagagaacctgcccttctgacttcttctcttgtctgtcctttacgcaaagcgatctatggtctcaacaagccccgatagcgtcggtttttgaagttcagcacagtggttatccaggcagggtttgctcggagtgatcatgattcggccatgttcgtatcagtttatcctcgaggacgtgctattctgttgttgtatgttgatgatatcaaactgactggtgattactccgttaccatatcgctgatcgagtgtcgccttcatcaattatttgctatgaaggcgctgacgcgccctaagccttttcttggcttggaggtcgcatcgcacattctcctcgtggatatttggtatctcagatcaaataacgtcatgacttgatcactcgagctcaactcaatgatgagaagactgttgacactcccttggagctttacgttaaactccgtccgactgatggctcaccattatctgatccgacgcagtacagacagtaggtcggcagtttggtttatctgacgatctcttgcccagatggcttttcttaagaaagtcagcctttcatggctgcgctgccccccggtcagttcactttgcagcagttcatcggattcttagatatattcgaggtaccttttctcgagccgtccttttttccgtcatcgtcttctttagagttgcgtgcaactactgatgccgattgggccttcagataggtgctcaactacaggcttctctattttttggggagactctccactatcttatcttggatgagataaaagcaatagacagttgctccttccactgccgaagcggagtaccgtgccatggcacactactagatagattgtatggctccgttggtgactttctgatcgcgggtttcatttttaaaaccccaaattcatcttgcgtcaaatccggtctttcatgcaagagtttcatttgctactacgttcgtcgaaaacttcttgatgacaccatcatctcattaccttatttttttccttcgacttcggctatgaccaatgccccacctagctgaataggcgtaacaaagctacctgaaaaaggcaaggtaaggtgtaccttaaattgaaatcgacaaattgcgttttgccagatggattctttagaaagattcccggataaagttcagtataatatttagttagaatctaaataaaggcgcatacgtgggcgggcagggggccccactacttcttcattcaggggggctagcctcatgacttcccactgggcgaggggtgcacctaacccacctactcactcatcaattacggtgttcagctgacttgcacagaaagacccctattgtttagtaatttggcgcctgattgactgttgtcaactaatcttttcaatgttcgattctactctatgttagaacatttcagtgaatgctatttcgatctaagtggtcctattctctgtcccgtgctaggaagcattactcctcttttcattccaaattcttcaataagaccgatacgattgattggtctgtgcgtttctcttattacttttttgtatccccctgttcctcggatacaattcgatccttctacggccaattctcaatttgtggaaagccttcgatggcttccttatgaaaacatccatttgtatatgggtatagacggtctttcattattcttcgtgatattgaccacatttctgatccctatttgcatttcagtgggttggtctggtatgagaagttttgggaaagagtatattacagcatttctaattcgtgaatttctaatgatcgccgtgtcctgcatgctggatcctctactattctatgttctttccgaaagcgtgccaatccctatgttgtgcggagctgagcatcttctattcgctgggatcaagcttttcctctgcaggggccttgtgcagtaaaccccctacgggcggtcccccgtcgtcgtaaagtagtcaaggtccccgcgaagctttcgggaagaggggtagtcttgtgcgtaagcatagcatttctggtcgaaccaccgaaccacacatctttttttggtgggagggtactccgagtagtgggtacctcgtaggacctcgacccgcctactcaggtcttgtatggatatgcaggaaggggtgctcctaggtgtgtgtaggggggtgtgtttgttcgcgagaatggattcctcgtcaagtcagggggggtgtggacacacttgcgcgaattcgggtaacggctacaagggataaaaataaaggaaactgtacccgaccagggatggacgtaaactcgtaagctaccgagggtagggataatcgtccaggtcttattgttgtttaaagccgccccgccacagcaggcaggttagttcctctgtcgttgccggagagttcttggcgaagagaccttaggataagttgctaaaacaaacggaggggaggatcgacccgttcagtagaattccgaagaaagactgttggcagcaggtggagacatttctttggcccccttccaaataaatgcgggcagggtagagctcggcagagggttcgagaatagggtagggtcctgtcctaataaagataaataaaggggcgggtccctttatgcatgcatcttcgtacaagtggaggccggaaagatcaaaccaatagaaccgctcacatcacagtagtcgtagttgcgtaaaggccgtggggggcgaccataacataaggcaatgactttcacggatctctctctatctatagatataacgaacgggcgggttcgaaaggtagggttttttacggtcgggtcccctaccactagtccggctagccttcttcgggcaggaagcaggccgggcccgacgggcgggcatctcccgcaacgcaagctgcattgttcgccaccacccgagaagcaaaagattcgagagtcaaggcggaaaagacaagcatagtggtctaatgacaagggccgacgacggaagctcgggacggagccgtatgatgcggaagtctcacgtacggttccctgagaagggagtggctacccactggagcttcgaccaaccaccaccggtcaattccgctttggggccacccctgactctaccatcattataggggtatggggttcgagacaaagaaagatcaaggcagcatatcagtttttcctatatactttacttggatccgtttttatgctattagctattctgttgattcttctccaaacaggaaccaccgatttacaaattttattaaccacagaatttagtgagcggcgccaaatccttctatggattgcctttttcgcctcttttgccgtcaaagtgcctatggtaccagttcatatttggttacccgaagcccatgtagaggcacctacggctggatccgtcatcttggcaggaattcttttaaaattgggaacctacgggtttttaagattttcaatacccatgtttcccgaagcgacactttgtttcactcctttcatttatactctaagtgcgattgctataatatatacttccttgaccactttaagacagatcgatcttaagaagatcattgcctactcctcagtagcccatatgaatttggtgactattggtatgtttagtccgaacataccgggaattggaggtagcattttacttatgttaagtcatggactggtttcttcagccctttttctatgtgttggtgttctatatgaccgacataagactcgacttgttagatattatggaggtttagtgagcaccatgccgaatttctctaccattttcttctttttcactttagccaatatgagtttacccggcactagcagctttatcggggaatttctaatcttagtaggagctttccaaagaaatagcttagtagccacattagcagcgcttgggatgattttaggcgcggcgtattccctttggctatataatcgtgtggtttctggaaatttaaaacccgatttcctctataaattctccgatctaaatggcagagaagtttccatatttctaccttttcttgttggagttgttcggatgggtgttcaccccaaagtgttcccggactgcatgcatacatccgtaagtaacttagtgcaacatggcaaatttcattgagaggaatcagcaaagaaaagaaatcttctccgggtgactggatcgccccggaaccacaagaatccttagaatgggattccaactcagcaccttttgttttgggattttgagaagagttgctctttggagagcacagtacgatgaaagttgtaagctgtgttcgggggggagttattgcctatcgttgtcctctatggtagaacccgtcggggaggcctgagaggcggtggtttaccctgtggcggatgtcagcggttcgagtccgcttatctccagcccgtgaacttagcggatactatgatagcaccgaaggttgccaattcgtcagttcgatctatgatttcgcattcatggacgttgataagatccttccatttagtagcaccttaggatggcatagccttaacgttaatggcgaggttcaaaagaggaaaggcttgcggtggatacctaggcacccagagacgaggaagggcgtagcaagcgacgaaatgcttcggggagttgaaaataagcatagatccggagattcccaaataggtcaaccttttgaactgcctgctgaatccatgagcaggcaagagacaacctggcgaactgaaacatcttagtagccagaggaaaagaaagcaaaagcgattcccgtacccgtaccgtagtagcggcgagcgaaatgggagcagcctaaaccgtgaaaacggggttgtgggagagcaatacaagcgttgtgctgctaggcgaagcggttgagtgccgcaccctagatggctaaagtccagtagccgaaagcatcactagcttacgctctgacccgagtagcatggggcacgtggaatcccgtgtgaatcagcaaggaaaggaccaccttgcaaggctaaatactcctgggtgaccgatagcgaagtagtaccgtgagggaaaggtgaaaagaacccccagtgggtagtgaaatagaacgtgaaaccgtgctgagctcccggaggggaaagtgatctctgaccgcgtgcctgttgaagaatgagccggcgactcataggcagtggcttggttaagggaatggaacccaccggagccgtagcgaaagcgagtcttcatagggcgattgtcactgcttatggacccgaacctgggtgatctatccatgaccaggatgaagcttggatgaaactaagcagaggtccgaaccgactgatgttgaagaatcagcggatgagttgtggttaggggtgaaatgccactcgaacccagagctagctggttctccccgaaatgagtttgtttc

SEQ ID NO: 219313 - DNA, 5546 bp, Zea Mays
agaaatcatacggattgcaacctacagatgaagaatctgcttcattgttcccaccatctatatcagatgtttaataagaataggaatcgaataagctgctgattgactgaggaagcatttgaaaagaaaggaagggtgatgcttgttaaacaaagctgcgtgtggggccgccacgtatagctgtagtttctgctgtagcatcggttatttccgttattgctgtagtagcatcggttattgctcaggttacgaatgacccaatctatctatggcaaccacccctacttttagtagatagagatgcgcacctagaaaagacggatgaaagagaacctgcccttctgacttcttctcttgtctgtcctttacgcaaagcgatctatggtctcaacaagccccgatagcgtcggtttttgaagttcagcacagtggttatccaggcagggtttgctcggagtgatcatgattcggccatgttcgtatcagtttatcctcgaggacgtgctattctgttgttgtatgttgatgatatcaaactgactggtgattactccgttaccatatcgctgatcgagtgtcgccttcatcaattatttgctatgaaggcgctgacgcgccctaagccttttcttggcttggaggtcgcatcgcacattctcctcgtggatatttggtatctcagatcaaataacgtcatgacttgatcactcgagctcaactcaatgatgagaagactgttgacactcccttggagctttacgttaaactccgtccgactgatggctcaccattatctgatccgacgcagtacagacagtaggtcggcagtttggtttatctgacgatctcttgcccagatggcttttcttaagaaagtcagcctttcatggctgcgctgccccccggtcagttcactttgcagcagttcatcggattcttagatatattcgaggtaccttttctcgagccgtccttttttccgtcatcgtcttctttagagttgcgtgcaactactgatgccgattgggccttcagataggtgctcaactacaggcttctctattttttggggagactctccactatcttatcttggatgagataaaagcaatagacagttgctccttccactgccgaagcggagtaccgtgccatggcacactactagatagattgtatggctccgttggtgactttctgatcgcgggtttcatttttaaaaccccaaattcatcttgcgtcaaatccggtctttcatgcaagagtttcatttgctactacgttcgtcgaaaacttcttgatgacaccatcatctcattaccttatttttttccttcgacttcggctatgaccaatgccccacctagctgaataggcgtaacaaagctacctgaaaaaggcaaggtaaggtgtaccttaaattgaaatcgacaaattgcgttttgccagatggattctttagaaagattcccggataaagttcagtataatatttagttagaatctaaataaaggcgcatacgtgggcgggcagggggccccactacttcttcattcaggggggctagcctcatgacttcccactgggcgaggggtgcacctaacccacctactcactcatcaattacggtgttcagctgacttgcacagaaagacccctattgtttagtaatttggcgcctgattgactgttgtcaactaatcttttcaatgttcgattctactctatgttagaacatttcagtgaatgctatttcgatctaagtggtcctattctctgtcccgtgctaggaagcattactcctcttttcattccaaattcttcaataagaccgatacgattgattggtctgtgcgtttctcttattacttttttgtatccccctgttcctcggatacaattcgatccttctacggccaattctcaatttgtggaaagccttcgatggcttccttatgaaaacatccatttgtatatgggtatagacggtctttcattattcttcgtgatattgaccacatttctgatccctatttgcatttcagtgggttggtctggtatgagaagttttgggaaagagtatattacagcatttctaattcgtgaatttctaatgatcgccgtgtcctgcatgctggatcctctactattctatgttctttccgaaagcgtgccaatccctatgttcatcattataggggtatggggttcgagacaaagaaagatcaaggcagcatatcagtttttcctatatactttacttggatccgtttttatgctattagctattctgttgattcttctccaaacaggaaccaccgatttacaaattttattaaccacagaatttagtgagcggcgccaaatccttctatggattgcctttttcgcctcttttgccgtcaaagtgcctatggtaccagttcatatttggttacccgaagcccatgtagaggcacctacggctggatccgtcatcttggcaggaattcttttaaaattgggaacctacgggtttttaagattttcaatacccatgtttcccgaagcgacactttgtttcactcctttcatttatactctaagtgcgattgctataatatatacttccttgaccactttaagacagatcgatcttaagaagatcattgcctactcctcagtagcccatatgaatttggtgactattggtatgtttagtccgaacataccgggaattggaggtagcattttacttatgttaagtcatggactggtttcttcagccctttttctatgtgttggtgttctatatgaccgacataagactcgacttgttagatattatggaggtttagtgagcaccatgccgaatttctctaccattttcttctttttcactttagccaatatgagtttacccggcactagcagctttatcggggaatttctaatcttagtaggagctttccaaagaaatagcttagtagccacattagcagcgcttgggatgattttaggcgcggcgtattccctttggctatataatcgtgtggtttctggaaatttaaaacccgatttcctctataaattctccgatctaaatggcagagaagtttccatatttctaccttttcttgttggaggggcgaccgtccgttgaactaccaaaaaagggtaaaccaatgtgatcataacattgtaggtgcttgcgatgggacggatgcgacttccctcataagtaaagtaatgggtggcatagcccgtagcagaagtcccctttttttatccatttctttattaccccagaggggcccgccctggtgggaccgagagaaagaaaggacggggggggggcgaccatgcatggcacttctcgaccgtgtctccgagggacagttgaacgagcgactcatgaatgctgccgggtcggacgagccaataactcgaacgtgttcggtcagttttttgagcaagaatcacagcgttaccttaccttcaccatgatacggactccaagttcttatggcagagcacgaggagtttccttcaatatgatgatgagaatggaaaccagaagcacgactgggtcttcgtagtccgagatcatacttatatatcagtcacagtaacgtaagcatgagactttttggtagtaccggtgaaccagatggccgcggcgagggaatctaggacggaggactcgtaatatctctatagatctggcaaaagcgaaagacccctaacgtcaggggctgaccactgagctcactcaggcctcgctgggcgggccagagtgggtgcgagctggaattgccatagcttatggttagagcaataggaaagggcccagcggagagaacagtcaggataacgagcgcggagcccgcttggcaggcggcaggagctgtgggcaagtgcttgcttggtaggccaacagccctgtgaaccgggcggggcactcgacgaaagggggcacactgagcaagtacgcaaaattggccccgcggagctttcaaaaagaaaagcaaggaccactacgggaggtcgaaccacggaccggaggtagtagaacgtgatccgcaccggtcaatattggatcaaacaataggggaccgtagcactgacctttctttttcaagacaataggtactgttccctaccgagacaagggacactctcaacggatcctccacgcgctgggcataccatagttcttccgtgcgtctttatcgtggcggaaacagaacaaaagggaagacccggccgactcgcccagggctcgagggcgagccatacgagagtgagtcgaattctgtttacgttctcggtttggttcgggcccctctcgatcttttgcgtataagggaagggggaaggagtctcaatctatggacattaatgaaccaccattgatgggcgttgcacatgacacgatcaattcgactcgacggtccggtgctaatagaagtcgcttactctccgtctagcgaaggtgccagggcagggcttttttgtagtaatagtgggctgggcgggtctcatgagatttcatctatgccggctcaaacgagggtcgaaggaccattcgattcattaagggggacggcccatttgtaaggcgggggggggcctgaatgaagagcggaccagactcttctttgtttcagctgctcccacgcacgcagaccggaagatctcagttgtcctggactagacaagtacgtagagatcttcgtggaaccggggagggagtctcaatcgatcttttctaggattccaactcacgccacgcacgaagatttatctattgatagagttaagggctcggctcccccgactctaaaaggttaggttactaccagcttgcctctacggaagaggtgtactttgtactgtctagaggtcatatagatcggaacccggagcgagttgaacgaaagccttacccactgctacaactactggcgcttcaaagggcttagattctaaggtaggggtgtcagccgtgaaagcctttggtactttagtaaggcgagcagcccttaaacaaaagaaaaggcgcgaccatcccccccttcccctatttttgcatttcattctctatttggcccgcctcatgaaaaatgataggcctattgattcgaagtaagtacgaaagggtcggtcaatagcatagctcttttttttttctcctttcgaaggaaaggccttcgcattcttaatctggtagggccggacggctttgtttgccctagcttggcgaatcgcgcccctgaccgttctcgcgaagtctttgcaacggctgggaaacctgtctacgaagctaagcatattgccacgccgaccatcaaatacgagattgggccccttctcaaagatggaatggcccagcccaataaaggaaggttaacgtacgcgatgccttccatttgtacgaatcgcgaacataccacgcacgaccggacgtagagccaaaattcactggcagaccgagtcgggcgcaggtgccagatcctcaaagtatcgtaaagttaagttaagtatcgtaaagtatcgatcagcc

SEQ ID NO: 219314 - DNA, 2050 bp, Zea Mays
gctgtttggagtcaggttgccaaagcccagttacgtgaaggtcttgtcagtgaagcaattgagtccttcattcgtgcagatgatgctgcacacttccttgatgtcatccgtgctgcggaggaagctaatgtgtacaatgatttagtgaagtaccttctgatggtaaggcaaaaggcacgggaacccaaagtcgatggagaactcatctttgcatatgctaagattgacaggctcagtgatattgaggaattcattcttatgccaaatgttgccaaccttcaaaatgttggcgaccgtctgtatgatgaagaactatatgaagctgcaaaaatcatctatgctttcatttcaaactgggctaagctggctgttaccctggttaagctgaagcagttccaaggtgctgtggatgctgctcgcaaggctaacagtgccaaaacatggaaggaggtctgctttgcttgtgttgacgccgaggagttccgtcttgcacaaatttgtggtctcaatattattattcaggttgatgacttggaagaagtcagtgagtactaccagaatagaggatgcttcagtgaacttattgctctcatggagagtggtcttggacttgaacgtgcacacatgggcatcttcacagaattgggagttctgtatgctagataccgctctgagaagcttatggagcacatcaaacttttctccacccgtctcaatattcctaagcttattcgagcctgtgatgaacagcagcactggaaagaacttacctacctgtacatacagtatgatgaatttgacaatgcagtcaccactattatgaaccactctcctgatgcatgggatcatatgcagttcaaggatgtttgcgttaaagttgcaaacgttgagctatattacaaggcagttcacttctatttgcaagagcatcctgatctcatcaatgatatgctgaatgtgcttgcacttcgtttagatcataccagagttgtagacataatgcgcaaggctggtcaattgcatcttgtgaaaccatatatggttgcagttcagagtaataatgtctctgctgtgaatgaagccttgaatgagctttatgttgaagaggaagactatgagagactccgtgaatcagttgacatgcatgacaactttgaccaaataggtcttgcccagaaggtggaagcaatccattgctctatcaaagaaagataacatgtacaaggattgtatggagacatgctcacaatctggtgaccgtgaactgtcagaggacttgcttgtgtattttatcgagcagggtaagaaagaatgctttgcttcttgcctcttcatttgctacgacctgatccggccggatgtcgctcttgagcttgcgtggatgaacaacatgttggactttgccttcccatacctgttgcagttcatccgtgaatacactagcaaggtggatgatttagtgaaggacagaattgagtcacagaatgaagaaagagtcaaagagaaggaggagaaagatcttgttgctcagcagaacatgtatgcgcaattgcttcctcttgctttgcctgctccgccaatgcctggcatgggtggccctccacctccgatgggtgggatgggcatgcctccaatgggtggaatgggtatgccgccgatgggccctggtccgatgccagcattcgggatgccagcaatgggaagctactgagatgtttttgcagagagcttagacgatgatttgaatcgtccctgtgtaagcgaaggtggaaacttcattggagttgtagatggttacagtttggaattaatattctttatggtaccagaatttttttggcaagtgaaaccttagccagagtctgagaattgcaacctgttataccgtaggatcggataggatgagggtgattaggttggttgagcgagctgttgaaagctggtatcatttgtatagtgtgatgaaaactttgtagacattttgcttgtataatactcctacttgttggcacagtgaaggacaaacaaatgtatgctgacttgttatgtc

SEQ ID NO: 219315 - DNA, 1725 bp, Zea Mays
aggtacaccaatcgcttcgtccccgcgtctcgccgcgtagcggcgtaggcgccacagaaactcgcacgccgctccccgccgtccggcccgagtcgccgtcgctgccgaatccaatccatggctccgcccgccgcacccaccgcgctgcaccaccgcacgcccctcctcctcccccgccgcaccgtcgccttgggtgccaccgccaccgcgcgcgccgccagggccgcttctctcgccgtcagggcccagccggacaccaccgccgcagccgtctccacctccgcgcctgagccggcgcccgagttcaagcctccgccggggttcaaggcgcccgagcccaagaggtacgaggtcaagtccggccaggtgggcagcgtcctcggcgcctcgctcgccatcccccttcgcctcggcaccggcgtcttcgtcctcgggtactcgccatctcttgtttctccatcagagataccatcagaccagtatgcactggaatttggagcttggaaggtgaaagaggaatcaaaaataggacagtgcaaacgaccagaaaagcctatcgagatatatgaatttgaaggttgtccattttgtcggaaggtcagagagatggtaacagtcttggacctagatgtattattttacccctgtcctcaaaaaggcccaacattccgacctaaagtcctcgaaatgggtggaaagaaacaattcccttacatggtagatccaaacacaggggtcgccatgtatgaatccgatgacatcataaaatatctagctgatacatatggtgtgtattcaacacatctccttttcacttttgctcttaaaggttgttcctccctatttgtgggggaaaaggcttgtcttggtttatccccgagaccccattcatgtgggagcctcactggatttgtgtgtgaaaaggattgtatcgttttatccccttcctagaccccatttttggcactgggtatgccctcttaaagtttcttcctataatgaccttactgacctcactcacttatgcttgtttttcttaggcgatggaactgttccaattatgctatcacttggtctgttgacagtaagtaaacaagcacccagcaatttaaaagtatattatatgttttaaccagtgtacatattagtccaaatgtataaaaatatgtttgaactaagtacccccaactattatcgaggaatatttgacatatttacactttgctttcagtatgcttcagtatttgcctatccgatgggtataatgctttattttgtgccaaggatcagtttgcagttttgataacttttaaatattttttaggcaattacagcagggcttgctactcttggtcgtattggaaagggaaattcctacattgcttcaaaagtcccaccgcagcccatagagatatgggcatgtgagggatctcccttctgtaaattagtacgagagacacttgtcgagttggaattgccacatctgctacacagctgcgcacgaggcagccccaaacgacaagaatttttcaagaaaaaggggcttttccaggcgccgtacatcgaagatcctaacacgggagtccagatgtttgaaagcgctgaaatcatagactacctgaaggcaacatatgccctgtacccaagctcgtagtgatgtatcagaaatggtcattgtaatgttgcgtgtagattcagttcttcccggtaataaaaggaaaagaa

SEQ ID NO: 219316 - DNA, 1162 bp, Zea Mays
aggtacaccaatcgcttcgtccccgcgtctcgccgcgtagcggcgtaggcgccacagaaactcgcacgccgctccccgccgtccggcccgagtcgccgtcgctgccgaatccaatccatggctccgcccgccgcacccaccgcgctgcaccaccgcacgcccctcctcctcccccgccgcaccgtcgccttgggtgccaccgccaccgcgcgcgccgccagggccgcttctctcgccgtcagggcccagccggacaccaccgccgcagccgtctccacctccgcgcctgagccggcgcccgagttcaagcctccgccggggttcaaggcgcccgagcccaagaggtacgaggtcaagtccggccaggtgggcagcgtcctcggcgcctcgctcgccatcccccttcgcctcggcaccggcgtcttcgtcctcgggtactcgccatctcttgtttctccatcagagataccatcagaccagtatgcactggaatttggagcttggaaggtgaaagaggaatcaaaaataggacagtgcaaacgaccagaaaagcctatcgagatatatgaatttgaaggttgtccattttgtcggaaggtcagagagatggtaacagtcttggacctagatgtattattttacccctgtcctcaaaaaggcccaacattccgacctaaagtcctcgaaatgggtggaaagaaacaattcccttacatggcgatggaactgttccaattatgctatcacttggtctgttgacagcaattacagcagggcttgctactcttggtcgtattggaaagggaaattcctacattgcttcaaaagtcccaccgcagcccatagagatatgggcatgtgagggatctcccttctgtaaattagtacgagagacacttgtcgagttggaattgccacatctgctacacagctgcgcacgaggcagccccaaacgacaagaatttttcaagaaaaaggggcttttccaggcgccgtacatcgaagatcctaacacgggagtccagatgtttgaaagcgctgaaatcatagactacctgaaggcaacatatgccctgtacccaagctcgtagtgatgtatcagaaatggtcattgtaatgttgcgtgtagattcagttcttcccggtaataaaaggaaaagaa

SEQ ID NO: 219317 - DNA, 1044 bp, Zea Mays
ctgcgcactgcttctccccacggcgcacgccagccgtcagcccgtcaccgattgttctggctcctgcgcgccgccagccccgcttgttctggctcctgcgcgccgccagccgtcagcccgtcaccgattggagatccttggacacctgcgcgccgccagcccgtcaccgcttggagacccgcgcagccgcgcttccctgcgcgccgccagccgtcgccgatccgtggccgcgtccgccgccgccagccctaaggtcgcgccgtcagccagcccgtctgccgtcgtgaggtactgaggaatttttctggtaatcagcatggcactgtcatcaatgtttaagagaataaatgtgaaagatttgacctccaaggtttcagtctataccagtgctacaggcgctgggccacgaaaaggactgctggatcaacaaaaaatggtcgcgattccaatccaaagtatttgggggtaaagaagtttggtggagagaaagtactaccagggaacatcattgtccgccaaagagggacccgcttccatcctggaaactatgttggcatgggcaaggatcatacacttttctgcctgaaagaaggcaatgtacgctttgagcgcaacaaactctcaggcaggaaatgggttcatgttgatccagttgctggtcatgatcttcaccccatttacgcagatggttttgctactacatccgacactgagccaatgcaataaatgtgcttggggatttgggctgtcattttgttccaactcattcagctgccattttacagtttcatgtgtaaactttagcaggcttgaacgtagctggatcttttctttgtaatcataactactttgaataatataagttatacactgtaagctttgttctcatggttaacttcagatttcaaatatgatgtcactacaatggagttcttatcattgtagaggttgttttaccgtgtttacatattctttatcatgaattgtttgattattctgaaaatgcaatttgcatgagacttaagtgctagtatgttgttattt

SEQ ID NO: 219318 - DNA, 2543 bp, Zea Mays
cccagttccacacttccacccacctccagagccaaaagagccggcggtggccggcagccaaaacccacgtcggatttcgccgccgccgccaggagctaggggacaaggcaacgccggcaggtgcaacatttatgcgtgtaccgcccggcagccacgcgtacacttctgccgcagagctaaacgcgccactccgcggcaagctgatctgctgctcccaagtcccaccagccaccgcaccgagtgccaatggcgactgcagcgacttctacgccggcggcgtggcagtctactctggtctactctggtctacgccatgcagggacctgcccgtgcttctcgcccagccccgctcgctccccgtcatcgtcacctacaggccgaattgggagggaggccagtacgcaggcgaagatgagccacggtttgaggcgcttctactggcaatggagctgggagctgaatatgtcgatgtcgagttcaaggtcgccgacaaatttatgaagtatttgtctgggaagaaacctcaaaactgtaagctcatcatttcagcatacgactacaagaccactccatcggtacatgaacttctgaatttagtagctcagatacgagcaacgggggctgacattgtgaaaattgaaaccactgctgctgacattgtagacacatcaagaatgtttcaagtacttgcacattgccatgaaaagcaggtgcctatcattgggctggtgaggaaagaacatggttttatttctcgtattatttgcgcaaaatatggcggataccttacttttgcatctcttgaaaatggaaaagaatctaccactgagcagccgacagtagcagacttgataaataagtacaaaatacggcagataggcccagatactaaggtctttggtattattggaaatccagttagccacagtaaaagcccaattgtgcaaaatcaagctttcagatcagtgggtttcgatgctgtgtttttgccatttttgtcagatgacttggttcagtttctttataccttctcagcaccagattatgccggcttcagttgcacaatgccccataaagaaactgcacttaggtgctgtgacgatgtcgaccctatcgccagggacatcggagctattaatacaatcattagaagacctgatggaaaacttgtaggctacaatacagattattctggtgctatttctgctattgaggatggaataagagccccatgtgcagcatcacaaccaacagattcgatcacttcaccactggctggaagactttttgttgttattggggctggtggtgcaggaaaagcactagcatatggtgcaaaagagaagggagcaagagttgtgattgcaaaccgtacatttgcacgagctcaagaactcgcccacatcattggcgggactgctttgaccctgtcagagttggaaagctaccatccggagaaagggatgattcttgcaaacgcgacatctgtggggatgcatccaaacgtcgatgaaacccctttatctaagcacgcgctaaaatcctatgccgttgtcttcgacgcggtcttcgtgccgagagagaccagacttctccgagaagctgcagtgtgtggagccacagtcatcgacggtttggagatgctaatcaggctagtgatggttcagtttaagcttttcacggggggcatgacagctccagaaaggttgatgcgtgaggctatcctgacgaagacacattgagggtttgttcaaataacaagatctctacactacagatgtccctgcaaaaaaaaaggtcccagttgtacatgtcctccttcttgcttcttcctcggcgtctgggaagcaccgtatctcattttcaacccaagcaaggagaggaggtgcaggttgcaaaacaacgaatggtcatgttcaataaggaatggaatgtgatttggatcaacactagttttctgtcatatccattccacggtttggagataaaattggttggcaacccaacctgtgcagacgtgcaccagttccatattccccttcagatttggattcagagaagcctttcctgacatgagacgtctcattagacacgaactttcttttcccttaaaattcatttcagctggcccgaacttgtgcagtcttctcttctcctacactacaactgaaatgatttgtctctaaacaagtgttatgctataacatacaataaactgtatattattaactacgtttttgagaaacatagctcccaaacaggcccgaacttgtttgtcttgacttttctatctttttttagagatatttttagatatggattcagtgatcagtttgcctctcagccattgtaaaattagatgttccgagctcaaacattttggtttgccttattttgtatcagcataacgacatttgtgttcccctaccgtgcacatcaaagaaacagcatgaaagcttttgtatgtgattttgtactagtaggaaatagtatgcagttattcaaaaccaagcatggtgttgaagtgcggattttgatttgcg

SEQ ID NO: 219319 - DNA, 1093 bp, Zea Mays
atccctgcatcgcaccctcccgggccgccttctcttctccagcgtccgatctcccactcccctccctcaccgcagctctcccacctccgccctccccccgcacgcgctcgccacctcgccctcccctccacgttgctcgcacccgcgcttatataagtgcaggaggagctcatggcggaagctccggcgagccctggcggcggcggcgggagccacgagagcgggagccccaggggaggcggaggcggtggcagcgtcagggagcaggacaggttcctgcccatcgccaacatcagtcgcatcatgaagaaggccatcccggctaacgggaagatcgccaaggacgctaaggagaccgtgcaggagtgcgtctccgagttcatctccttcatcactagcgaagcgagtgacaagtgccagagggagaagcggaagaccatcaatggcgacgatctgctgtgggccatggccacgctggggtttgaagactacattgaacccctcaaggtgtacctgcagaagtacagagaggtgcagggtgatagcaagttaactgcaaaatctagcgatggctcaattaaaaaggatgcccttggtcatgtgggagcaagtagctcagctgcacaaggggttaagttttcttggactgttccgttattcttgtgatcatactgcaaaaggctaactttctgttacttttagatgggccaacagggagcatacaaccaaggaatgggttatatgcaaccccagtaccataacggggatatctcaaactaatggaggtatggaccttttctgcgacagctgctcttacctgagaactgatgaggtcgctcactaggagtaagtcgcttccctgggaacggttgtcggctagcaccgctcttgtatgtatattaagagtaacttaatgattggtcttttggctgcgatttgattacatgtatttgtatcgggaggcataaatattgtgtaatttgtgttaaagactggtgtaattgaactatgggaagagctgctttggttgtaaccatattttgatgcccgtatattaggcaaaaatagaaggctgtgggcgtgcacaacatat

SEQ ID NO: 219320 - DNA, 553 bp, Zea Mays
atccctgcatcgcaccctcccgggccgccttctcttctccagcgtccgatctcccactcccctccctcaccgcagctctcccacctccgccctccccccgcacgcgctcgccacctcgccctcccctccacgttgctcgcacccgcgcttatataagtgcaggaggagctcatggcggaagctccggcgagccctggcggcggcggcgggagccacgagagcgggagccccaggggaggcggaggcggtggcagcgtcagggagcaggacaggttcctgcccatcgccaacatcagtcgcatcatgaagaaggccatcccggctaacgggaagatcgccaaggacgctaaggagaccgtgcaggagtgcgtctccgagttcatctccttcatcactagcgaagcgagtgacaagtgccagagggagaagcggaagaccatcaatggcgacgatctgctgtgggccatggccacgctggggtttgaagactacattgaacccctcaaggtgtacctgcagaagtacagagagatggaggtatgtggtattaagc

SEQ ID NO: 219321 - DNA, 636 bp, Zea Mays
ctcagagtccaaggacacacaggaaatgcaaacaaggatcctgttcaatgaagctttcagcaggggacttcacatttctcaaatcattactggcaaaaaggcacatgtgttttgagctaaatacatattccaactgaccattttccaaagtgagctgcttcgtcattctggaggactagtttgtctccatggcctatggtttatacaagctttatggcgtgtagagtagatggatgatagctcttccctgtacaggcaatctatttgtcgccgattcttcttaactttcgatatacacttggatgttcatgctagagatgatagtccatctaatgagatgtcgatgctgtccgtattcgtaaaatcgtaactccagatttttggtagcctttagatatctagttaaggctgtacaaaacttcatcatgagcgctattcaagctatggtttctgtcccctactcttttgttgtaaagggtacgatatttctgcatacctgcacatatctcagcgttatgtggaggactaatcctgtacacctaaattactgcctgaaatgtcatcttgcttggtccatatgtgtctcgctgctgggctgcatctaagctcctgtgcatgtggcacgttacgcgcgag

SEQ ID NO: 219322 - DNA, 3727 bp, Zea Mays
atcagggacatgaaacagctgcgacttaggttccagttctttgcaagtgccatgtcattcaacatcatgccagaggagcagcaggtgaatgagagcttcttgcccagccgttttcgcaatttctggcagcgattacagctaaggtatggtttcagcagatcctttcggaagattgagtcaaatcaggtggaggcacggcggtttgcacttgtttggaatgagataataagcaagttccgggaggaagacattgttagtgatcgtgaggttgagcttcttgagctgccacctgagctgtggaatgtgcgtgtaatccgttggccttgtttcttgctctgtaatgagctgtcacttgcacttggtcaggcaaaagaagttacaggatctgatcgtaggctatggaggaagatatgtaagaatgattatcgtcgttgtgcagtgattgaggtctatgatagtgcaaaacacatgctgcttgagatcataaaggaggggactgaggagcatggtattgttacacaactgttcagcgattttgatggatccatgaagatggagaagttcactgtggagtataagatgactgagctgcacaatatccatacaaggcttgtagctctattggtcctcatcctcaaacccaccaaagatgttaccaagatagttaatgctttgcagactctctatgatgttgttgttcgtgatttccaagctgagaagaggagcatggaacaactgagaagtgaaggtcttgcacagtcaaggcccaccaggcttctctttgtggatgcagttgtgcttcctgaagaggacaatgctaccttctataagcaagtgaggcgcatgcacaccatcctgacctccagagactctatgattaatgtcccacagaaccttgaagctcgtcggaggattgcctttttcagcaattcattgtttatgaacataccaagggcaacccaggttgagaagatgatgtctttcagtgtcttgacgccttattataaggaggaggtgttgtacagcaaggaccaactctataaagagaatgaagatggcatctcaatattatactatctaaaacagatttacccagatgagtgggagtacttcgtagagcgaatgaaacgtgaggggatgtctgatattaatgagctgtacagtgagaaggaaaggctgagggatcttcggcactgggtctcatataggggacagacattatcacgtactgtgagaggaatgatgtactattatgaagctctcaagatgctgacctttttggattctgcctctgaacatgatttaaagactggatcaagggagttagctactatgggttcctcaagaattggatcctcaaggcatgacggagttgctggtgggtcagggtattacagcagggcatcttcctctcatgcattgagtagagcaagcagtagtgtgagctccttgtttaaaggaagcgaatatgggactgtcctcatgaaatacacatatgtagttgcatgccaggtatatggacagcagaaagctaagaatgaccccaatgcttttgaaatattggagctaatgaaaaattatgaagcattacgtgttgcttatgttgatgaaaggcagatcaatggcaacgaaaaagagttcttctctgttctcgtgaaatatgaccaacaattgcagcgggaggttgaaatctatcgggttaagttgcctggagagttgaagattggcgaaggaaagccagaaaatcagaatcatgcactcatcttcacaaggggcgatgcagttcaaactattgatatgaaccaagacaactactttgaagaagctctaaagatgagaaacctactagaagagttcaatcgttattatggaattcgcaagcctaaaattcttggggttcgggaacacgtcttcacgggttcagtttcttctcttgcttggttcatgtctgcccaggagacaagttttgtcactctggggcagcgtgttctggctgatccacttaaagtcagaatgcattatggccacccagatgtttttgatcgtctttggtttttgggccgaggtggtatcagtaaagcatcaagaataatcaacattagtgaggacatttttgctggtttcaactgtactctccgtggtggtaatgttacacaccacgagtatatccaggttggtaaaggtagagatgtgggcctcaaccaggtctctatgtttgaagccaaggttgctagtggcaatggtgaacaaactttgagccgagatgtttacaggctgggccaccgattggatttcttccggatgctctctttcttctatacaactgttggattctatttcaatacaatgatggttgtgctaactgtctatgcatttgtatgggggcgcttttaccttgcactcagtgggcttgaggactacatcaacaagaacacttcctcttccaataatgcagccctgggagctgttctcaatcagcagttcgtcatacagctaggcctgttcacagctttacccatgattattgaaaattcacttgagcacgggttcctcactgctgtgtgggatttcatgaaaatgcagctacagtttgcatctgttttctacacattctccatgggaacaaagacacactattatgggaggacaatccttcacggaggagcgaaatatcgagccactggcagaggttttgttgtggagcataagaagtttgctgaaaactataggctctatgctcgcagccatttcatcaaagctatagaacttggtgttatattaactctttatgcatcttatggcagtgcatctgggaatacattggtgtatattctgctgacactttcaagttggtttcttgtgtcatcatggattcttgctccattcatttttaatccctctggttttgactggctgaagaattttaatgactttgaggattttctaaactggatatggttccggggtgggatctcagttcagtcagatcaaagctgggagaagtggtgggaggatgaaactgatcatctccggacgacaggtctatggggctgcatcttggaaatcatattagaccttcgatttttcttttttcagtatgcaattgtatatcggcttcacattgctgataatagtagaagcatccttgtctatcttctttcgtggacatgcatcctcctagcttttgtggctcttgtgacagtggcttactttcgagacagatattcagcaaagaagcacatacggtatcgccttgtccaggcaatcattgttgggagcactgtggctgctattgttgtgctgttggaattcacaaagtttcagtttgttgacacttttactagtcttttggcttttctgccgactggctggggaatcatatctattgctctggtattcaagccatatctgaggagatctgagatggtctggaaaactgtggttaccgtggcacgtttgtatgacatattgtttggagtaattgttatggcacctgtggctgtattatcatggttgcctgggcttcaggaaatgcaaacaaggatcctgttcaatgaagctttcagcaggggacttcacatttctcaaatcattactggcaaaaaggcacatgtgttttgagttatattatatttgcccgtgctactgtttgtatgccatgttgaaaacaggatgatcttgcacactgaactgcagattaagagagtatgcacttgctttatgttct

SEQ ID NO: 219323 - DNA, 1419 bp, Zea Mays
atgttggcgtggtacagcagcagcgtccgcggcaggttgtcgtcccaccccatcgtcacgtactccgcgaacgcccgcgacagcatcgtccacgccgaccctgcacgcgacagcgtcgtcatcgcccgcgacaggatgggtgggcggatgcgtgcgtgttttgctttgccattgccaaccgcaatggtctctgcctggattggcgagcctccaaagcataaacaagcctggatcacagatctgggggaataatcaattgcagtgaaggtcgatccgtacgtgaacggcgctaccctcacctgctccattgactagacgccattccagataagattattctttctgggccggaccggaccggaattcgtccatcacgggctcggctgtcggctcacgcccacacccgtcactcgatcggaatcgaaggacggccaaagtctgagggcaaccactggcacggcatcgactgtgtgacaggacacaccatagcacagccaggcgccgcggggagtagtacggcaccgtacactcccctagtccgatcaacaaccgattgacgaggccatgctgtcctaatcggttgctcacaagcatgcttccgttgcgttgtaccacaaggcacgttttcggactcgttcggtgtgtgcggggcattgccttgggttttcaaaggtttacagcaaaatggacggagtacctgtgaagagcttgaatgccgtgggcagcctcctgaggttggtggagatgttcaccgggcggatcagctccgccctcccgtcctcgtacagcgccgtgtccaggatcaccggccgcgcccgcttctttatcttccagcccaggtggctcgtgtgctggatgaagttgaggtccctgggcagcccggcgaacgcctccatcaaatctgcaacccccaaaattcagaaacagtctgtccatccagtggacgaccaacagcaagcaagcaagcaagcatcacagggtaccgtcctgggtgacgagcgggtagtcggaggcgctgaggttgatgaaccagtcccagcggcggcggaggcggagcagcacggcgacggcgtgcagcgtggtggtcagcatggtggggccacggtaggttaccaggttgggcctgcccacgatccacacgttgcccgcgcgcgcgtacacgccgcgcccggacaccagctccgccagacgccggtgctcctccgcgggggcctcccggtccaggtgcagcaggtagctgttgcccgggtggtacagcgccgccagcagccgcgcggcgcgggacgcgtcccccgtcgacgccgagatcaggtacgcgaacgtcacggggtaccgcgcctgctgctcctcctcctcgccgatgccggcatccttcgacggggacagggacggccacctgatgggcccagcgcccgttag

SEQ ID NO: 219324 - DNA, 1276 bp, Zea Mays
cccgcctccccggtctgtgtttgccccctgcccggttggcccctggctctcctcccgcccgcccggccgcccccaccccacccaatcctaccccgcggggggaattctcagttctcgcggcgacgactgggagaccgccgccgccgccatcctactccaggtgccctgagaactcgatcgggctcttcgctggcgacgaacacccaccagctatcaggtgtacaaccatgcggcgtggttagctgctgccttcaagaatgcagagacccaatgcgccgtcggcttgcgccaccatcaccttcgcggaggctctaaggagggagatggagtaccgcaagtgggtggagaggacccacccacatctgctcgtcggaatctgcggagcccctgaaatgcagagagatttcagtgcaggaccagtacctgatgcgatcaagagaaaactagctgccgagaccagtgtgcctccacaacaatcaagtttcagctgtgtaactggacagaagcagccccaaaactggtaccccacaaagaaaaaggtgaaagttccacatcttccatcgcagattctgcagtgtcccagaccaaacgtggtgccatccttctggtgcaaaatctgcaaggtcgactgtgtcaccgagttcaatttcagcgctcacgttggaggcaaaaagcacaaggccaaaaagctagagattctaggtaagaggaacgctgggggacctgctagccgatgcgcaggcaacaggagcgctggacagaatggactagcagtttctgggagcagaagcagcgaacagaatgtggctggcagcgttgctgctggaccgaactgtgacatgtcgtctgagagcagaactaatggaacagaaggaagtgggtgcactgtccggctatgagcagcttgggtttcactcgagtctggtatttcaataaaagttcgccttgcacattttcttctcaagggcacagttaacatatttatgtgtcagatggctaggccgctagggagatttcatctgatgggttggactgaacaacactagtcagataataagttgaaacgtatgcactatgcagtgtcctattcccatgtgagagcagtacattgtttggacatatatctgacagcagatgcatcctgtgtcctttcgcttccttctcgaaaatgtacagtagctaaccttgttcgggtaggaggtggaagttgaggacgctgttctgagtatgtactgggtagttataatgtatgacatcatggcttgtttgttgtttc

SEQ ID NO: 219325 - DNA, 1310 bp, Zea Mays
cccgcctccccggtctgtgtttgccccctgcccggttggcccctggctctcctcccgcccgcccggccgcccccaccccacccaatcctaccccgcggggggaattctcagttctcgcggcgacgactgggagaccgccgccgccgccatcctactccaggtgccctgagaactcgatcgggctcttcgctggcgacgaacacccaccagctacggtagacgccccgttcgctagctgaggacctcctggttcctgtgagcaggcggcgtggttagctgctgccttcaagaatgcagagacccaatgcgccgtcggcttgcgccaccatcaccttcgcggaggctctaaggagggagatggagtaccgcaagtgggtggagaggacccacccacatctgctcgtcggaatctgcggagcccctgaaatgcagagagatttcagtgcaggaccagtacctgatgcgatcaagagaaaactagctgccgagaccagtgtgcctccacaacaatcaagtttcagctgtgtaactggacagaagcagccccaaaactggtaccccacaaagaaaaaggtgaaagttccacatcttccatcgcagattctgcagtgtcccagaccaaacgtggtgccatccttctggtgcaaaatctgcaaggtcgactgtgtcaccgagttcaatttcagcgctcacgttggaggcaaaaagcacaaggccaaaaagctagagattctaggtaagaggaacgctgggggacctgctagccgatgcgcaggcaacaggagcgctggacagaatggactagcagtttctgggagcagaagcagcgaacagaatgtggctggcagcgttgctgctggaccgaactgtgacatgtcgtctgagagcagaactaatggaacagaaggaagtgggtgcactgtccggctatgagcagcttgggtttcactcgagtctggtatttcaataaaagttcgccttgcacattttcttctcaagggcacagttaacatatttatgtgtcagatggctaggccgctagggagatttcatctgatgggttggactgaacaacactagtcagataataagttgaaacgtatgcactatgcagtgtcctattcccatgtgagagcagtacattgtttggacatatatctgacagcagatgcatcctgtgtcctttcgcttccttctcgaaaatgtacagtagctaaccttgttcgggtaggaggtggaagttgaggacgctgttctgagtatgtactgggtagttataatgtatgacatcatggcttgtttgttgtttc

SEQ ID NO: 219326 - DNA, 1257 bp, Zea Mays
cccgcctccccggtctgtgtttgccccctgcccggttggcccctggctctcctcccgcccgcccggccgcccccaccccacccaatcctaccccgcggggggaattctcagttctcgcggcgacgactgggagaccgccgccgccgccatcctactccaggtgccctgagaactcgatcgggctcttcgctggcgacgaacacccaccaggcggcgtggttagctgctgccttcaagaatgcagagacccaatgcgccgtcggcttgcgccaccatcaccttcgcggaggctctaaggagggagatggagtaccgcaagtgggtggagaggacccacccacatctgctcgtcggaatctgcggagcccctgaaatgcagagagatttcagtgcaggaccagtacctgatgcgatcaagagaaaactagctgccgagaccagtgtgcctccacaacaatcaagtttcagctgtgtaactggacagaagcagccccaaaactggtaccccacaaagaaaaaggtgaaagttccacatcttccatcgcagattctgcagtgtcccagaccaaacgtggtgccatccttctggtgcaaaatctgcaaggtcgactgtgtcaccgagttcaatttcagcgctcacgttggaggcaaaaagcacaaggccaaaaagctagagattctaggtaagaggaacgctgggggacctgctagccgatgcgcaggcaacaggagcgctggacagaatggactagcagtttctgggagcagaagcagcgaacagaatgtggctggcagcgttgctgctggaccgaactgtgacatgtcgtctgagagcagaactaatggaacagaaggaagtgggtgcactgtccggctatgagcagcttgggtttcactcgagtctggtatttcaataaaagttcgccttgcacattttcttctcaagggcacagttaacatatttatgtgtcagatggctaggccgctagggagatttcatctgatgggttggactgaacaacactagtcagataataagttgaaacgtatgcactatgcagtgtcctattcccatgtgagagcagtacattgtttggacatatatctgacagcagatgcatcctgtgtcctttcgcttccttctcgaaaatgtacagtagctaaccttgttcgggtaggaggtggaagttgaggacgctgttctgagtatgtactgggtagttataatgtatgacatcatggcttgtttgttgtttc

SEQ ID NO: 219327 - DNA, 1367 bp, Zea Mays
cccgcctccccggtctgtgtttgccccctgcccggttggcccctggctctcctcccgcccgcccggccgcccccaccccacccaatcctaccccgcggggggaattctcagttctcgcggcgacgactgggagaccgccgccgccgccatcctactccaggtgccctgagaactcgatcgggctcttcgctggcgacgaacacccaccaggtgtacaaccatgtacttcaccgtgtccgcccctgcaatgtctctatgatcctccagctacggtagacgccccgttcgctagctgaggacctcctggttcctgtgagcaggcggcgtggttagctgctgccttcaagaatgcagagacccaatgcgccgtcggcttgcgccaccatcaccttcgcggaggctctaaggagggagatggagtaccgcaagtgggtggagaggacccacccacatctgctcgtcggaatctgcggagcccctgaaatgcagagagatttcagtgcaggaccagtacctgatgcgatcaagagaaaactagctgccgagaccagtgtgcctccacaacaatcaagtttcagctgtgtaactggacagaagcagccccaaaactggtaccccacaaagaaaaaggtgaaagttccacatcttccatcgcagattctgcagtgtcccagaccaaacgtggtgccatccttctggtgcaaaatctgcaaggtcgactgtgtcaccgagttcaatttcagcgctcacgttggaggcaaaaagcacaaggccaaaaagctagagattctaggtaagaggaacgctgggggacctgctagccgatgcgcaggcaacaggagcgctggacagaatggactagcagtttctgggagcagaagcagcgaacagaatgtggctggcagcgttgctgctggaccgaactgtgacatgtcgtctgagagcagaactaatggaacagaaggaagtgggtgcactgtccggctatgagcagcttgggtttcactcgagtctggtatttcaataaaagttcgccttgcacattttcttctcaagggcacagttaacatatttatgtgtcagatggctaggccgctagggagatttcatctgatgggttggactgaacaacactagtcagataataagttgaaacgtatgcactatgcagtgtcctattcccatgtgagagcagtacattgtttggacatatatctgacagcagatgcatcctgtgtcctttcgcttccttctcgaaaatgtacagtagctaaccttgttcgggtaggaggtggaagttgaggacgctgttctgagtatgtactgggtagttataatgtatgacatcatggcttgtttgttgtttc

SEQ ID NO: 219328 - DNA, 1264 bp, Zea Mays
cccgcctccccggtctgtgtttgccccctgcccggttggcccctggctctcctcccgcccgcccggccgcccccaccccacccaatcctaccccgcggggggaattctcagttctcgcggcgacgactgggagaccgccgccgccgccatcctactccaggtgccctgagaactcgatcgggctcttcgctggcgacgaacacccaccagctatcaggcggcgtggttagctgctgccttcaagaatgcagagacccaatgcgccgtcggcttgcgccaccatcaccttcgcggaggctctaaggagggagatggagtaccgcaagtgggtggagaggacccacccacatctgctcgtcggaatctgcggagcccctgaaatgcagagagatttcagtgcaggaccagtacctgatgcgatcaagagaaaactagctgccgagaccagtgtgcctccacaacaatcaagtttcagctgtgtaactggacagaagcagccccaaaactggtaccccacaaagaaaaaggtgaaagttccacatcttccatcgcagattctgcagtgtcccagaccaaacgtggtgccatccttctggtgcaaaatctgcaaggtcgactgtgtcaccgagttcaatttcagcgctcacgttggaggcaaaaagcacaaggccaaaaagctagagattctaggtaagaggaacgctgggggacctgctagccgatgcgcaggcaacaggagcgctggacagaatggactagcagtttctgggagcagaagcagcgaacagaatgtggctggcagcgttgctgctggaccgaactgtgacatgtcgtctgagagcagaactaatggaacagaaggaagtgggtgcactgtccggctatgagcagcttgggtttcactcgagtctggtatttcaataaaagttcgccttgcacattttcttctcaagggcacagttaacatatttatgtgtcagatggctaggccgctagggagatttcatctgatgggttggactgaacaacactagtcagataataagttgaaacgtatgcactatgcagtgtcctattcccatgtgagagcagtacattgtttggacatatatctgacagcagatgcatcctgtgtcctttcgcttccttctcgaaaatgtacagtagctaaccttgttcgggtaggaggtggaagttgaggacgctgttctgagtatgtactgggtagttataatgtatgacatcatggcttgtttgttgtttc

SEQ ID NO: 219329 - DNA, 1327 bp, Zea Mays
cccgtctcagcgccaccgccacgtattgcgcccatcccttatccgaaaaatcagcccgaaacccgtactcgctctcgccacggctccaaccgcactcggccctcgtctccgccactcggcgcggcgctatggcccctgccgcgcttctcccgctcgcccctttgccgcatcacccgaacccaccacggcgacccctatgccgctgcggggcctcacgccgcggcttcactgtccacaccgtcatcgccattgcctcggtctcggactccgcctccgaccccaccgcggccgcggaggcgacgtccccatctccgcccccctcgctgccaacgcaaacgccttcctctaaaccaggacccccggctttgggcggcatcgcgaacacgaggtcttggtcgcagtactacggcagcggcttctccatccgcgtgcctccgtccttcgacgacatcctcgagcccgatgactacaacgccgggatgacatactacggtgacaaggccaagccccgggcgtacgcggcccgctttgcatctccagatagggatgagctcatcagtgtggtgattaagccgtcaaatcagctcaaaatcacattcctagaggcaaaagatataactgatttgggaactctaaaagaggcatccaagatatttgtaccggctggtgcaaaaatattctcggctcgaacaattaaagttaaggaagaggaggatattaggacatattacttctatgaattcagtctggacaagcaacacgtagctctgatggctaccgtgaatagtgggaagacgtacattgccggcgctaccgctccagagatgaaatggggtgatgatggcgtgaagttacgttcggctgccgtatctctatcggtttcatgatttattgtgcagaagataacaactaaaaaaatgtgatacaactctcagattcagcggtacgcatagagggttctattactgttctagtcattgaaagaaggtaaatagttgggttagtcggcaaaagcaacaaaagcactggatgagactgcaaggtttcagtcaagtctgtaaacaattttggaagtggatatgtattgttatgaagactggcatcatgattgaaatttgataattgagttcttgtctgcctataactgatatgttcattctaaactgtgctgattgtataaacttggtcaaagttaaaacaatttgactttggacaaaaccaggacaagtgtattattataacatttcagctgtaccataggtcgtcccgtaccctgtcatgtagaggaatgttattgatgcaaagggaaaagagtaatgttgagaga

SEQ ID NO: 219330 - DNA, 1146 bp, Zea Mays
gaaaaatcagcccgaaacccgtactcgctctcgccacggctccaaccgcactcggccctcgtctccgccactcggcgcggcgctatggcccctgccgcgcttctcccgctcgcccctttgccgcatcacccgaacccaccacggcgacccctatgccgctgcggggcctcacgccgcggcttcactgtccacaccgtcatcgccattgcctcggtctcggactccgcctccgaccccaccgcggccgcggaggcgacgtccccatctccgcccccctcgctgccaacgcaaacgccttcctctaaaccaggacccccggctttgggcggcatcgcgaacacgaggtcttggtcgcagtactacggcagcggcttctccatccgcgtgcctccgtccttcgacgacatcctcgagcccgatgactacaacgccgggatgacatactacggtgacaaggccaagccccgggcgtacgcggcccgctttgcatctccagatagggatgagctcatcagtgtggtgattaagccgtcaaatcagctcaaaatcacattcctagaggcaaaagatataactgatttgggaactctaaaagaggcatccaagatatttgtaccgggtgatttctgttatcttagaattggatgctctggtgcaaaaatattctcggctcgaacaattaaagttaaggaagaggaggatattaggacatattacttctatgaattcagtctggacaagcaacacgtagctctgatggctaccgtgaatagtgggaagacgtacattgccggcgctaccgctccagagatgaaatggggtgatgatggcgtgaagttacgttcggctgccgtatctctatcggtttcatgatttattgtgcagaagataacaactaaaaaaatgtgatacaactctcagattcagcggtacgcatagagggttctattactgttctagtcattgaaagaaggtaaatagttgggttagtcggcaaaagcaacaaaagcactggatgagactgcaaggtttcagtcaagtctgtaaacaattttggaagtggatatgtattgttatgaagactggcatcatgattgaaatttgataattgagttcttgtctgcctataactgatatgttcattct

SEQ ID NO: 219331 - DNA, 920 bp, Zea Mays
cggcgctatggcccctgccgcgcttctcccgctcgcccctttgccgcatcacccgaacccaccacggcgacccctatgccgctgcggggcctcacgccgcggcttcactgtccacaccgtcatcgccattgcctcggtctcggactccgcctccgaccccaccgcggccgcggaggcgacgtccccatctccgcccccctcgctgccaacgcaaacgccttcctctaaaccaggacccccggctttgggcggcatcgcgaacacgaggtcttggtcgcagtactacggcagcggcttctccatccgcgtgcctccgtccttcgacgacatcctcgagcccgatgactacaacgccgggatgacatactacggtgacaaggccaagccccgggcgtacgcggcccgctttgcatctccagatagctggtgcaaaaatattctcggctcgaacaattaaagttaaggaagaggaggatattaggacatattacttctatgaattcagtctggacaagcaacacgtagctctgatggctaccgtgaatagtgggaagacgtacattgccggcgctaccgctccagagatgaaatggggtgatgatggcgtgaagttacgttcggctgccgtatctctatcggtttcatgatttattgtgcagaagataacaactaaaaaaatgtgatacaactctcagattcagcggtacgcatagagggttctattactgttctagtcattgaaagaaggtaaatagttgggttagtcggcaaaagcaacaaaagcactggatgagactgcaaggtttcagtcaagtctgtaaacaattttggaagtggatatgtattgttatgaagactggcatcatgattgaaatttgataattgagttcttgtctgcctataactgatatgttcattct

SEQ ID NO: 219332 - DNA, 974 bp, Zea Mays
atggcccctgccgcgcttctcccgctcgcccctttgccgcatcacccgaacccaccacggcgacccctatgccgctgcggggcctcacgccgcggcttcactgtccacaccgtcatcgccattgcctcggtctcggactccgcctccgaccccaccgcggccgcggaggcgacgtccccatctccgcccccctcgctgccaacgcaaacgccttcctctaaaccaggacccccggctttgggcggcatcgcgaacacgaggtcttggtcgcagtactacggcagcggcttctccatccgcgtgcctccgtccttcgacgacatcctcgagcccgatgactacaacgccgggatgacatactacggtgacaaggccaagccccgggcgtacgcggcccgctttgcatctccagatagggatgagctcatcagtgtggtgattaagccgtcaaatcagctcaaaatcacattcctagagctggtgcaaaaatattctcggctcgaacaattaaagttaaggaagaggaggatattaggacatattacttctatgaattcagtctggacaagcaacacgtagctctgatggctaccgtgaatagtgggaagacgtacattgccggcgctaccgctccagagatgaaatggggtgatgatggcgtgaagttacgttcggctgccgtatctctatcggtttcatgatttattgtgcagaagataacaactaaaaaaatgtgatacaactctcagattcagcggtacgcatagagggttctattactgttctagtcattgaaagaaggtaaatagttgggttagtcggcaaaagcaacaaaagcactggatgagactgcaaggtttcagtcaagtctgtaaacaattttggaagtggatatgtattgttatgaagactggcatcatgattgaaatttgataattgagttcttgtctgcctataactgatatgttcattct

SEQ ID NO: 219333 - DNA, 1157 bp, Zea Mays
gtgtagtgataccgtagtcacatctcatatatttggttttagttctattgagtctataacctttgtattctagagtcttccgccatgactctagtttgctattttactcttgctctactttcatcaactaacactacatcgttcgcaaaaagcatttaccaagagatatccccttgtgatcttatccatcaccaaggcaaagaggtaatgactcaaagatgacctttgatgtagtcttattctaattaggaagtcatttctcatttgtgtctctgttacttgttcgaacactagtcacaacatcgttgtactgtcattaatgagtcgaaggtattttgttgaaacactatgtttgttcgaagcccaccacacaatgttccttgatattttatcataagccttcttcaagtcaatgaaaaccatgtataggtccttgtgctcccacttgtcttattaagaaaaacagcttttatgggtgaccttccatgcatgaaaccaaattgtttcatagagatcctcattattacttttagttgatgcttgacaattctctctcatagcttcatagtatggctcgttaatttaattccttagtaattagtacaactttgaatatctccctttttttagattggtatcaatatgctctccactcgtcagctggtgcaaaaatattctcggctcgaacaattaaagttaaggaagaggaggatattaggacatattacttctatgaattcagtctggacaagcaacacgtagctctgatggctaccgtgaatagtgggaagacgtacattgccggcgctaccgctccagagatgaaatggggtgatgatggcgtgaagttacgttcggctgccgtatctctatcggtttcatgatttattgtgcagaagataacaactaaaaaaatgtgatacaactctcagattcagcggtacgcatagagggttctattactgttctagtcattgaaagaaggtaaatagttgggttagtcggcaaaagcaacaaaagcactggatgagactgcaaggtttcagtcaagtctgtaaacaattttggaagtggatatgtattgttatgaagactggcatcatgattgaaatttgataattgagttcttgtctgcctataactgatatgttcattct

SEQ ID NO: 219334 - DNA, 3079 bp, Zea Mays
cttccgcttcctccgtcctcaccttccagcaggccatccagcgcctccaggagtactgggcctccgtaggatgcgccgtcatgcagtgtagcaacaccgagggtcttaggtcctgagccatggaatgtcgcttacgtggagccaagtataagaccagacgacagtcgctatggggacaatcccaataggcttcagcgccatactcagtttcaggtaattctgaagcctgatcctggaaattcgcaagatctctttctgcacagcctttcagcaataggtattaacatccatgaacatgacatccgcttcgttgaagacaactgggagagtccggttcttggtgcttggggactgggctgggaggtttggatggatggcatggaaatcacacagttcacatattttcagcagtcaggaagccttccattgcagccggtttctgttgaaataacatatggacttgaacgtatcctcatgtcactccaggaagttgatcacttcaagaatatactatacaccgaaggaatcacatatggagagctgttccttgagaacgagaaggagatgagtgcatattatttagaacatgcggatgtcagtcacattcaaaagcactttgacaattttgaagaagaggctcgatctttattatcactggggctgccaattccagcgtatgatcaggttctgaaggcctctcatgctttcaatatattagattctagaggttttgttggtgtaactgagcgtgcaagatattttggtcgcatgcgaagccttgctcgtcaatgtgctcagctttgggtggaaactcgagaaaaccttggacatcctttgggtgcttatgaagaggataaccttatctatcctcatgtctccaaaaaaactcatagagaggaagtgctggtacaaccacgtgcatttgttcttgaaataggaacagaagagttgccaccccgtgacgtcgtagaagcaactgaacagcttgagaaatctctagttaatacattggagaaacgtagattgacccatgggaaagtgcacacttacgggacaccaaggagattggcgattgttgttgaaaatcttagtatgaagcaaacagaggtagaggtggaactacgtggcccaccagttgcgaaggcatttgacgaagaaggaaaccccactaaggccgctgagggattttgtcgaaagaataatgtctctgtcgatcacctatatagaagaatagatggtaaaacagaatatatctacgctagagtcagagagtctgctcgttttgctgatgaggtcctaactgaagatttacctactattgtttctggtatttcatttcccaagtcgatgcgctggaactccaatattgtttttagtcgtccaatacgctggatcctggcacttcatggcgattttgttgtgccattttattttgctggcatctcaaggtttgcattggcagtgggaatcagtcatgtggccttcgtaactcttctttggctaattttaaggtggaaactgcagaatcatatttaggtactgtggaaaaagctgggatcttgattaatatgcaggagcggaaggaaaaagtcttacatgcctctactgtattggctcaaggtgttggtggcgatttcattgcgcctgatagcttgctgcaggaggttgtcaatcttgtggaggcacctgtgcccatccttggtcgatatgatgattccttcttagaacttcctaaagatgtactgattacggttatgcagaaacatcagaagtattttgctgtaatctccaagtccactggcgatctgctaccttattttattgctgttgccaatggtgcaattagcaaggaagttgttcgcaaagggaatgaagctgttctcagggcaaggtatgaggatgccaaattcttttataagatggatacacaaaagaaattttctgaattccgaggccagcttagtggcattctttttcatgaaaaacttgggacaatgctcgataaaatgacacgtgtcgagaataccgttgctgaattggcccttattcttggaataaatgagagaacggtcccaattatcaaagatgcggctgcattggctatgtcagatcttgccacttctattgtcacagaatttacttcacttgctggaattatggcacgccattatgctttgagagacagcatccctgaagagattgcagaagcactatttgagataacactccctcggtcttcgggtgatgtgtttccaagaacagatgctggtatagttcttgcggttgctgatagattggatagcctagttggattgtttggagctggatgccagccaagttctaccaatgatccatttggacttcgaagggtctcttatggattggtccaaatattagttgagaacaaaaagagctttgacctcagacgagctctcaccttattggcaggggtgcaacccatagcaatagagagtgatgttatagatgaggcagtacagttcgtcacaaggagactggaacagcttctggtggatgagggaattaactgcgagatagtccgatcagtgcttatggagcgtgcaaactgcccttatctagcagcacaaacagcgaccgaaatggaagcattttcgagaacagaaacatttcaaaaaatcgttgaagcgtattcaaggccaacaaggatcatccgtggaaaagaaattgagtctgctttggaggttgacccacacgtatttgagaaagatgaagagaaagttttgtggagcgcctacttggaggttgctgataagatccatcctggtgttgatattaagacctttgtggatgcttctcttatcctgatacaacccctagaagatttcttcaatagtgtcttcgtgatggcggaagacgagagagttcgcaacaaccggctaacgttgctgaggaagattgagagtttgcccaaggggattgcggacctgtcagttttacctgggttttaagctgcctattccagccagggggtgtgagcaatagccgtagcggagagatgattttgattttacaagtatttctgattaaaggaaaaaaaaac

SEQ ID NO: 219335 - DNA, 3247 bp, Zea Mays
cgacgcctccacctcctccaccgtgtccgctgccaaccaacggggctcttccgcttcctccgtcctcaccttccagcaggccatccagcgcctccaggagtactgggcctccgtaggatgcgccgtcatgcagtgtagcaacaccgaggttggagcgggcacaatgaatcctctcacatttcttagggtcttaggtcctgagccatggaatgtcgcttacgtggagccaagtataagaccagacgacagtcgctatggggacaatcccaataggcttcagcgccatactcagtttcaggtaattctgaagcctgatcctggaaattcgcaagatctctttctgcacagcctttcagcaataggtattaacatccatgaacatgacatccgcttcgttgaagacaactgggagagtccggttcttggtgcttggggactgggctgggaggtttggatggatggcatggaaatcacacagttcacatattttcagcagtcaggaagccttccattgcagccggtttctgttgaaataacatatggacttgaaccacggcagctgtgatacaaacttctccattgagatcatttctaccatactatgctggggcctttgaaaaagctgaccttacttcaatttagatgctgtgacaggaagttgatcacttcaagaatatactatacaccgaaggaatcacatatggagagctgttccttgagaacgagaaggagatgagtgcatattatttagaacatgcggatgtcagtcacattcaaaagcactttgacaattttgaagaagaggctcgatctttattatcactggggctgccaattccagcgtatgatcaggttctgaaggcctctcatgctttcaatatattagattctagaggttttgttggtgtaactgagcgtgcaagatattttggtcgcatgcgaagccttgctcgtcaatgtgctcagctttgggtggaaactcgagaaaaccttggacatcctttgggtgcttatgaagaggataaccttatctatcctcatgtctccaaaaaaactcatagagaggaagtgctggtacaaccacgtgcatttgttcttgaaataggaacagaagagttgccaccccgtgacgtcgtagaagcaactgaacagcttgagaaatctctagttaatacattggagaaacgtagattgacccatgggaaagtgcacacttacgggacaccaaggagattggcgattgttgttgaaaatcttagtatgaagcaaacagaggtagaggtggaactacgtggcccaccagttgcgaaggcatttgacgaagaaggaaaccccactaaggccgctgagggattttgtcgaaagaataatgtctctgtcgatcacctatatagaagaatagatggtaaaacagaatatatctacgctagagtcagagagtctgctcgttttgctgatgaggtcctaactgaagatttacctactattgtttctggtatttcatttcccaagtcgatgcgctggaactccaatattgtttttagtcgtccaatacgctggatcctggcacttcatggcgattttgttgtgccattttattttgctggcatctcaaggtttgcattggcagtgggaatcagtcatgtggccttcgtaactcttctttggctaattttaaggtggaaactgcagaatcatatttaggtactgtggaaaaagctgggatcttgattaatatgcaggagcggaaggaaaaagtcttacatgcctctactgtattggctcaaggtgttggtggcgatttcattgcgcctgatagcttgctgcaggaggttgtcaatcttgtggaggcacctgtgcccatccttggtcgatatgatgattccttcttagaacttcctaaagatgtactgattacggttatgcagaaacatcagaagtattttgctgtaatctccaagtccactggcgatctgctaccttattttattgctgttgccaatggtgcaattagcaaggaagttgttcgcaaagggaatgaagctgttctcagggcaaggtatgaggatgccaaattcttttataagatggatacacaaaagaaattttctgaattccgaggccagcttagtggcattctttttcatgaaaaacttgggacaatgctcgataaaatgacacgtgtcgagaataccgttgctgaattggcccttattcttggaataaatgagagaacggtcccaattatcaaagatgcggctgcattggctatgtcagatcttgccacttctattgtcacagaatttacttcacttgctggaattatggcacgccattatgctttgagagacagcatccctgaagagattgcagaagcactatttgagataacactccctcggtcttcgggtgatgtgtttccaagaacagatgctggtatagttcttgcggttgctgatagattggatagcctagttggattgtttggagctggatgccagccaagttctaccaatgatccatttggacttcgaagggtctcttatggattggtccaaatattagttgagaacaaaaagagctttgacctcagacgagctctcaccttattggcaggggtgcaacccatagcaatagagagtgatgttatagatgaggcagtacagttcgtcacaaggagactggaacagcttctggtggatgagggaattaactgcgagatagtccgatcagtgcttatggagcgtgcaaactgcccttatctagcagcacaaacagcgaccgaaatggaagcattttcgagaacagaaacatttcaaaaaatcgttgaagcgtattcaaggccaacaaggatcatccgtggaaaagaaattgagtctgctttggaggttgacccacacgtatttgagaaagatgaagagaaagttttgtggagcgcctacttggaggttgctgataagatccatcctggtgttgatattaagacctttgtggatgcttctcttatcctgatacaacccctagaagatttcttcaatagtgtcttcgtgatggcggaagacgagagagttcgcaacaaccggctaacgttgctgaggaagattgagagtttgcccaaggggattgcggacctgtcagttttacctgggttttaagctgcctattccagccagggggtgtgagcaatagccgtagcggagagatgattttgattttacaagtatttctgattaaaggaaaaaaaaac

SEQ ID NO: 219336 - DNA, 3174 bp, Zea Mays
ccgcagacggcgacgcctccacctcctccaccgtgtccgctgccaaccaacggggctcttccgcttcctccgtcctcaccttccagcaggccatccagcgcctccaggagtactgggcctccgtaggatgcgccgtcatgcagtgtagcaacaccgaggttggagcgggcacaatgaatcctctcacatttcttagggtcttaggtcctgagccatggaatgtcgcttacgtggagccaagtataagaccagacgacagtcgctatggggacaatcccaataggcttcagcgccatactcagtttcaggtaattctgaagcctgatcctggaaattcgcaagatctctttctgcacagcctttcagcaataggtattaacatccatgaacatgacatccgcttcgttgaagacaactgggagagtccggttcttggtgcttggggactgggctgggaggtttggatggatggcatggaaatcacacagttcacatattttcagcagtcaggaagccttccattgcagccggtttctgttgaaataacatatggacttgaacgtatcctcatgtcactccaggaagttgatcacttcaagaatatactatacaccgaaggaatcacatatggagagctgttccttgagaacgagaaggagatgagtgcatattatttagaacatgcggatgtcagtcacattcaaaagcactttgacaattttgaagaagaggctcgatctttattatcactggggctgccaattccagcgtatgatcaggttctgaaggcctctcatgctttcaatatattagattctagaggttttgttggtgtaactgagcgtgcaagatattttggtcgcatgcgaagccttgctcgtcaatgtgctcagctttgggtggaaactcgagaaaaccttggacatcctttgggtgcttatgaagaggataaccttatctatcctcatgtctccaaaaaaactcatagagaggaagtgctggtacaaccacgtgcatttgttcttgaaataggaacagaagagttgccaccccgtgacgtcgtagaagcaactgaacagcttgagaaatctctagttaatacattggagaaacgtagattgacccatgggaaagtgcacacttacgggacaccaaggagattggcgattgttgttgaaaatcttagtatgaagcaaacagaggtagaggtggaactacgtggcccaccagttgcgaaggcatttgacgaagaaggaaaccccactaaggccgctgagggattttgtcgaaagaataatgtctctgtcgatcacctatatagaagaatagatggtaaaacagaatatatctacgctagagtcagagagtctgctcgttttgctgatgaggtcctaactgaagatttacctactattgtttctggtatttcatttcccaagtcgatgcgctggaactccaatattgtttttagtcgtccaatacgctggatcctggcacttcatggcgattttgttgtgccattttattttgctggcatctcaaggtttgcattggcagtgggaatcagtcatgtggccttcgtaactcttctttggctaattttaaggtggaaactgcagaatcatatttaggtactgtggaaaaagctgggatcttgattaatatgcaggagcggaaggaaaaagtcttacatgcctctactgtattggctcaaggtgttggtggcgatttcattgcgcctgatagcttgctgcaggaggttgtcaatcttgtggaggcacctgtgcccatccttggtcgatatgatgattccttcttagaacttcctaaagatgtactgattacggttatgcagaaacatcagaagtattttgctgtaatctccaagtccactggcgatctgctaccttattttattgctgttgccaatggtgcaattagcaaggaagttgttcgcaaagggaatgaagctgttctcagggcaaggtatgaggatgccaaattcttttataagatggatacacaaaagaaattttctgaattccgaggccagcttagtggcattctttttcatgaaaaacttgggacaatgctcgataaaatgacacgtgtcgagaataccgttgctgaattggcccttattcttggaataaatgagagaacggtcccaattatcaaagatgcggctgcattggctatgtcagatcttgccacttctattgtcacagaatttacttcacttgctggaattatggcacgccattatgctttgagagacagcatccctgaagagattgcagaagcactatttgagataacactccctcggtcttcgggtgatgtgtttccaagaacagatgctggtatagttcttgcggttgctgatagattggatagcctagttggattgtttggagctggatgccagccaagttctaccaatgatccatttggacttcgaagggtctcttatggattggtccaaatattagttgagaacaaaaagagctttgacctcagacgagctctcaccttattggcaggggtgcaacccatagcaatagagagtgatgttatagatgaggcagtacagttcgtcacaaggagactggaacagcttctggtggatgagggaattaactgcgagatagtccgatcagtgcttatggagcgtgcaaactgcccttatctagcagcacaaacagcgaccgaaatggaagcattttcgagaacagaaacatttcaaaaaatcgttgaagcgtattcaaggccaacaaggatcatccgtggaaaagaaattgagtctgctttggaggttgacccacacgtatttgagaaagatgaagagaaagttttgtggagcgcctacttggaggttgctgataagatccatcctggtgttgatattaagacctttgtggatgcttctcttatcctgatacaacccctagaagatttcttcaatagtgtcttcgtgatggcggaagacgagagagttcgcaacaaccggctaacgttgctgaggaagattgagagtttgcccaaggggattgcggacctgtcagttttacctgggttttaagctgcctattccagccagggggtgtgagcaatagccgtagcggagagatgattttgattttacaagtatttctgattaaaggaaaaaaaaac

SEQ ID NO: 219337 - DNA, 3160 bp, Zea Mays
ccgcagacggcgacgcctccacctcctccaccgtgtccgctgccaaccaacggggctcttccgcttcctccgtcctcaccttccagcaggccatccagcgcctccaggagtactgggcctccgtaggatgcgccgtcatgcagtgtagcaacaccgaggttggagcgggcacaatgaatcctctcacatttcttagggtcttaggtcctgagccatggaatgtcgcttacgtggagccaagtataagaccagacgacagtcgctatggggacaatcccaataggcttcagcgccatactcagtttcaggtaattctgaagcctgatcctggaaattcgcaagatctctttctgcacagcctttcagcaataggtattaacatccatgaacatgacatccgcttcgttgaagacaactgggagagtccggttcttggtgcttggggactgggctgggaggtttggatggatggcatggaaatcacacagttcacatattttcagcagtcaggaagccttccattgcagccggtttctgttgaaataacatatggacttgaacgtatcctcatgtcactccaggaagttgatcacttcaagaatatactatacaccgaaggaatcacatatggagagctgttccttgagaacgagaaggagatgagtgcatattatttagaacatgcggatgtcagtcacattcaaaagcactttgacaattttgaagaagaggctcgatctttattatcactggggctgccaattccagcgtatgatcaggttctgaaggcctctcatgctttcaatatattagattctagaggttttgttggtgtaactgagcgtgcaagatattttggtcgcatgcgaagccttgctcgtcaatgtgctcagctttgggtggaaactcgagaaaaccttggacatcctttgggtgcttatgaagaggataaccttatctatcctcatgtctccaaaaaaactcatagagaggaagtgctggtacaaccacgtgcatttgttcttgaaataggaacagaagagttgccaccccgtgacgtcgtagaagcaactgaacagcttgagaaatctctagttaatacattggagaaacgtagattgacccatgggaaagtgcacacttacgggacaccaaggagattggcgattgttgttgaaaatcttagtatgaagcaaacagaggtagaggtggaactacgtggcccaccagttgcgaaggcatttgacgaagaaggaaaccccactaaggccgctgagggattttgtcgaaagaataatgtctctgtcgatcacctatatagaagaatagatggtaaaacagaatatatctacgctagagtcagagagtctgctcgttttgctgatgaggtcctaactgaagatttacctactattgtttctggtatttcatttcccaagtcgatgcgctggaactccaatattgtttttagtcgtccaatacgctggatcctggcacttcatggcgattttgttgtgccattttattttgctggcatctcaagtgggaatcagtcatgtggccttcgtaactcttctttggctaattttaaggtggaaactgcagaatcatatttaggtactgtggaaaaagctgggatcttgattaatatgcaggagcggaaggaaaaagtcttacatgcctctactgtattggctcaaggtgttggtggcgatttcattgcgcctgatagcttgctgcaggaggttgtcaatcttgtggaggcacctgtgcccatccttggtcgatatgatgattccttcttagaacttcctaaagatgtactgattacggttatgcagaaacatcagaagtattttgctgtaatctccaagtccactggcgatctgctaccttattttattgctgttgccaatggtgcaattagcaaggaagttgttcgcaaagggaatgaagctgttctcagggcaaggtatgaggatgccaaattcttttataagatggatacacaaaagaaattttctgaattccgaggccagcttagtggcattctttttcatgaaaaacttgggacaatgctcgataaaatgacacgtgtcgagaataccgttgctgaattggcccttattcttggaataaatgagagaacggtcccaattatcaaagatgcggctgcattggctatgtcagatcttgccacttctattgtcacagaatttacttcacttgctggaattatggcacgccattatgctttgagagacagcatccctgaagagattgcagaagcactatttgagataacactccctcggtcttcgggtgatgtgtttccaagaacagatgctggtatagttcttgcggttgctgatagattggatagcctagttggattgtttggagctggatgccagccaagttctaccaatgatccatttggacttcgaagggtctcttatggattggtccaaatattagttgagaacaaaaagagctttgacctcagacgagctctcaccttattggcaggggtgcaacccatagcaatagagagtgatgttatagatgaggcagtacagttcgtcacaaggagactggaacagcttctggtggatgagggaattaactgcgagatagtccgatcagtgcttatggagcgtgcaaactgcccttatctagcagcacaaacagcgaccgaaatggaagcattttcgagaacagaaacatttcaaaaaatcgttgaagcgtattcaaggccaacaaggatcatccgtggaaaagaaattgagtctgctttggaggttgacccacacgtatttgagaaagatgaagagaaagttttgtggagcgcctacttggaggttgctgataagatccatcctggtgttgatattaagacctttgtggatgcttctcttatcctgatacaacccctagaagatttcttcaatagtgtcttcgtgatggcggaagacgagagagttcgcaacaaccggctaacgttgctgaggaagattgagagtttgcccaaggggattgcggacctgtcagttttacctgggttttaagctgcctattccagccagggggtgtgagcaatagccgtagcggagagatgattttgattttacaagtatttctgattaaaggaaaaaaaaac

SEQ ID NO: 219338 - DNA, 3020 bp, Zea Mays
ccgcagacggcgacgcctccacctcctccaccgtgtccgctgccaaccaacggggctcttccgcttcctccgtcctcaccttccagcaggccatccagcgcctccaggagtactgggcctccgtaggatgcgccgtcatgcagtgtagcaacaccgaggttggagcgggcacaatgaatcctctcacatttcttagggtcttaggtcctgagccatggaatgtcgcttacgtggagccaagtataagaccagacgacagtcgctatggggacaatcccaataggcttcagcgccatactcagtttcaggtaattctgaagcctgatcctggaaattcgcaagatctctttctgcacagcctttcagcaataggtattaacatccatgaacatgacatccgcttcgttgaagacaactgggagagtccggttcttggtgcttggggactgggctgggaggtttggatggatggcatggaaatcacacagttcacatattttcagcagtcaggaagccttccattgcagccggtttctgttgaaataacatatggacttgaacgtatcctcatgtcactccaggaagttgatcacttcaagaatatactatacaccgaaggaatcacatatggagagctgttccttgagaacgagaaggagatgagtgcatattatttagaacatgcggatgtcagtcacattcaaaagcactttgacaattttgaagaagaggctcgatctttattatcactggggctgccaattccagcgtatgatcaggttctgaaggcctctcatgctttcaatatattagattctagaggttttgttggtgtaactgagcgtgcaagatattttggtcgcatgcgaagccttgctcgtcaatgtgctcagctttgggtggaaactcgagaaaaccttggacatcctttgggtgcttatgaagaggataaccttatctatcctcatgtctccaaaaaaactcatagagaggaacagaagagttgccaccccgtgacgtcgtagaagcaactgaacagcttgagaaatctctagttaatacattggagaaacgtagattgacccatgggaaagtgcacacttacgggacaccaaggagattggcgattgttgttgaaaatcttagtatgaagcaaacagaggtagaggtggaactacgtggcccaccagttgcgaaggcatttgacgaagaaggaaaccccactaaggccgctgagggattttgtcgaaagaataatgtctctgtcgatcacctatatagaagaatagatggtaaaacagaatatatctacgctagagtcagagagtctgctcgttttgctgatgaggtcctaactgaagatttacctactattgtttctggtatttcatttcccaagtcgatgcgctggaactccaatattgtttttagtcgtccaatacgctggatcctggcacttcatggcgattttgttgtgccattttattttgctggcatctcaagtgggaatcagtcatgtggccttcgtaactcttctttggctaattttaaggtggaaactgcagaatcatatttaggtactgtggaaaaagctgggatcttgattaatatgcaggagcggaaggaaaaagtcttacatgcctctactgtattggctcaaggtgttggtggcgatttcattgcgcctgatagcttgctgcaggaggttgtcaatcttgtggaggcacctgtgcccatccttggtcgatatgatgattccttcttagaacttcctaaagatgtactgattacggttgccaatggtgcaattagcaaggaagttgttcgcaaagggaatgaagctgttctcagggcaaggtatgaggatgccaaattcttttataagatggatacacaaaagaaattttctgaattccgaggccagcttagtggcattctttttcatgaaaaacttgggacaatgctcgataaaatgacacgtgtcgagaataccgttgctgaattggcccttattcttggaataaatgagagaacggtcccaattatcaaagatgcggctgcattggctatgtcagatcttgccacttctattgtcacagaatttacttcacttgctggaattatggcacgccattatgctttgagagacagcatccctgaagagattgcagaagcactatttgagataacactccctcggtcttcgggtgatgtgtttccaagaacagatgctgattggatagcctagttggattgtttggagctggatgccagccaagttctaccaatgatccatttggacttcgaagggtctcttatggattggtccaaatattagttgagaacaaaaagagctttgacctcagacgagctctcaccttattggcaggggtgcaacccatagcaatagagagtgatgttatagatgaggcagtacagttcgtcacaaggagactggaacagcttctggtggatgagggaattaactgcgagatagtccgatcagtgcttatggagcgtgcaaactgcccttatctagcagcacaaacagcgaccgaaatggaagcattttcgagaacagaaacatttcaaaaaatcgttgaagcgtattcaaggccaacaaggatcatccgtggaaaagaaattgagtctgctttggaggttgacccacacgtatttgagaaagatgaagagaaagttttgtggagcgcctacttggaggttgctgataagatccatcctggtgttgatattaagacctttgtggatgcttctcttatcctgatacaacccctagaagatttcttcaatagtgtcttcgtgatggcggaagacgagagagttcgcaacaaccggctaacgttgctgaggaagattgagagtttgcccaaggggattgcggacctgtcagttttacctgggttttaagctgcctattccagccagggggtgtgagcaatagccgtagcggagagatgattttgattttacaagtatttctgattaaaggaaaaaaaaac

SEQ ID NO: 219339 - DNA, 3177 bp, Zea Mays
atccgccgcagacggcgacgcctccacctcctccaccgtgtccgctgccaaccaacggggctcttccgcttcctccgtcctcaccttccagcaggccatccagcgcctccaggagtactgggcctccgtaggatgcgccgtcatgcagtgtagcaacaccgaggttggagcgggcacaatgaatcctctcacatttcttagggtcttaggtcctgagccatggaatgtcgcttacgtggagccaagtataagaccagacgacagtcgctatggggacaatcccaataggcttcagcgccatactcagtttcaggtaattctgaagcctgatcctggaaattcgcaagatctctttctgcacagcctttcagcaataggtattaacatccatgaacatgacatccgcttcgttgaagacaactgggagagtccggttcttggtgcttggggactgggctgggaggtttggatggatggcatggaaatcacacagttcacatattttcagcagtcaggaagccttccattgcagccggtttctgttgaaataacatatggacttgaacgtatcctcatgtcactccagatgctgtgacaggaagttgatcacttcaagaatatactatacaccgaaggaatcacatatggagagctgttccttgagaacgagaaggagatgagtgcatattatttagaacatgcggatgtcagtcacattcaaaagcactttgacaattttgaagaagaggctcgatctttattatcactggggctgccaattccagcgtatgatcaggttctgaaggcctctcatgctttcaatatattagattctagaggttttgttggtgtaactgagcgtgcaagatattttggtcgcatgcgaagccttgctcgtcaatgtgctcagctttgggtggaaactcgagaaaaccttggacatcctttgggtgcttatgaagaggataaccttatctatcctcatgtctccaaaaaaactcatagagaggaagtgctggtacaaccacgtgcatttgttcttgaaataggaacagaagagttgccaccccgtgacgtcgtagaagcaactgaacagcttgagaaatctctagttaatacattggagaaacgtagattgacccatgggaaagtgcacacttacgggacaccaaggagattggcgattgttgttgaaaatcttagtatgaagcaaacagaggtagaggtggaactacgtggcccaccagttgcgaaggcatttgacgaagaaggaaaccccactaaggccgctgagggattttgtcgaaagaataatgtctctgtcgatcacctatatagaagaatagatggtaaaacagaatatatctacgctagagtcagagagtctgctcgttttgctgatgaggtcctaactgaagatttacctactattgtttctggtatttcatttcccaagtcgatgcgctggaactccaatattgtttttagtcgtccaatacgctggatcctggcacttcatggcgattttgttgtgccattttattttgctggcatctcaagtgggaatcagtcatgtggccttcgtaactcttctttggctaattttaaggtggaaactgcagaatcatatttaggtactgtggaaaaagctgggatcttgattaatatgcaggagcggaaggaaaaagtcttacatgcctctactgtattggctcaaggtgttggtggcgatttcattgcgcctgatagcttgctgcaggaggttgtcaatcttgtggaggcacctgtgcccatccttggtcgatatgatgattccttcttagaacttcctaaagatgtactgattacggttatgcagaaacatcagaagtattttgctgtaatctccaagtccactggcgatctgctaccttattttattgctgttgccaatggtgcaattagcaaggaagttgttcgcaaagggaatgaagctgttctcagggcaaggtatgaggatgccaaattcttttataagatggatacacaaaagaaattttctgaattccgaggccagcttagtggcattctttttcatgaaaaacttgggacaatgctcgataaaatgacacgtgtcgagaataccgttgctgaattggcccttattcttggaataaatgagagaacggtcccaattatcaaagatgcggctgcattggctatgtcagatcttgccacttctattgtcacagaatttacttcacttgctggaattatggcacgccattatgctttgagagacagcatccctgaagagattgcagaagcactatttgagataacactccctcggtcttcgggtgatgtgtttccaagaacagatgctggtatagttcttgcggttgctgatagattggatagcctagttggattgtttggagctggatgccagccaagttctaccaatgatccatttggacttcgaagggtctcttatggattggtccaaatattagttgagaacaaaaagagctttgacctcagacgagctctcaccttattggcaggggtgcaacccatagcaatagagagtgatgttatagatgaggcagtacagttcgtcacaaggagactggaacagcttctggtggatgagggaattaactgcgagatagtccgatcagtgcttatggagcgtgcaaactgcccttatctagcagcacaaacagcgaccgaaatggaagcattttcgagaacagaaacatttcaaaaaatcgttgaagcgtattcaaggccaacaaggatcatccgtggaaaagaaattgagtctgctttggaggttgacccacacgtatttgagaaagatgaagagaaagttttgtggagcgcctacttggaggttgctgataagatccatcctggtgttgatattaagacctttgtggatgcttctcttatcctgatacaacccctagaagatttcttcaatagtgtcttcgtgatggcggaagacgagagagttcgcaacaaccggctaacgttgctgaggaagattgagagtttgcccaaggggattgcggacctgtcagttttacctgggttttaagctgcctattccagccagggggtgtgagcaatagccgtagcggagagatgattttgattttacaagtatttctgattaaaggaaaaaaaaac

SEQ ID NO: 219340 - DNA, 3139 bp, Zea Mays
atccgccgcagacggcgacgcctccacctcctccaccgtgtccgctgccaaccaacggggctcttccgcttcctccgtcctcaccttccagcaggccatccagcgcctccaggagtactgggcctccgtaggatgcgccgtcatgcagtgtagcaacaccgaggttggagcgggcacaatgaatcctctcacatttcttagggtcttaggtcctgagccatggaatgtcgcttacgtggagccaagtataagaccagacgacagtcgctatggggacaatcccaataggcttcagcgccatactcagtttcaggtaattctgaagcctgatcctggaaattcgcaagatctctttctgcacagcctttcagcaataggtattaacatccatgaacatgacatccgcttcgttgaagacaactgggagagtccggttcttggtgcttggggactgggctgggaggtttggatggatggcatggaaatcacacagttcacatattttcagcagtcaggaagccttccattgcagccggtttctgttgaaataacatatggacttgaacgtatcctcatgtcactccagatgctgtgacaggaagttgatcacttcaagaatatactatacaccgaaggaatcacatatggagagctgttccttgagaacgagaaggagatgagtgcatattatttagaacatgcggatgtcagtcacattcaaaagcactttgacaattttgaagaagaggctcgatctttattatcactggggctgccaattccagcgtatgatcaggttctgaaggcctctcatgctttcaatatattagattctagaggttttgttggtgtaactgagcgtgcaagatattttggtcgcatgcgaagccttgctcgtcaatgtgctcagctttgggtggaaactcgagaaaaccttggacatcctttgggtgcttatgaagaggataaccttatctatcctcatgtctccaaaaaaactcatagagaggaagtgctggtacaaccacgtgcatttgttcttgaaataggaacagaagagttgccaccccgtgacgtcgtagaagcaactgaacagcttgagaaatctctagttaatacattggagaaacgtagattgacccatgggaaagtgcacacttacgggacaccaaggagattggcgattgttgttgaaaatcttagtatgaagcaaacagaggtagaggtggaactacgtggcccaccagttgcgaaggcatttgacgaagaaggaaaccccactaaggccgctgagggattttgtcgaaagaataatgtctctgtcgatcacctatatagaagaatagatggtaaaacagaatatatctacgctagagtcagagagtctgctcgttttgctgatgaggtcctaactgaagatttacctactattgtttctggtatttcatttcccaagtcgatgcgctggaactccaatattgtttttagtcgtccaatacgctggatcctggcacttcatggcgattttgttgtgccattttattttgctggcatctcaagtgggaatcagtcatgtggccttcgtaactcttctttggctaattttaaggtggaaactgcagaatcatatttaggagcggaaggaaaaagtcttacatgcctctactgtattggctcaaggtgttggtggcgatttcattgcgcctgatagcttgctgcaggaggttgtcaatcttgtggaggcacctgtgcccatccttggtcgatatgatgattccttcttagaacttcctaaagatgtactgattacggttatgcagaaacatcagaagtattttgctgtaatctccaagtccactggcgatctgctaccttattttattgctgttgccaatggtgcaattagcaaggaagttgttcgcaaagggaatgaagctgttctcagggcaaggtatgaggatgccaaattcttttataagatggatacacaaaagaaattttctgaattccgaggccagcttagtggcattctttttcatgaaaaacttgggacaatgctcgataaaatgacacgtgtcgagaataccgttgctgaattggcccttattcttggaataaatgagagaacggtcccaattatcaaagatgcggctgcattggctatgtcagatcttgccacttctattgtcacagaatttacttcacttgctggaattatggcacgccattatgctttgagagacagcatccctgaagagattgcagaagcactatttgagataacactccctcggtcttcgggtgatgtgtttccaagaacagatgctggtatagttcttgcggttgctgatagattggatagcctagttggattgtttggagctggatgccagccaagttctaccaatgatccatttggacttcgaagggtctcttatggattggtccaaatattagttgagaacaaaaagagctttgacctcagacgagctctcaccttattggcaggggtgcaacccatagcaatagagagtgatgttatagatgaggcagtacagttcgtcacaaggagactggaacagcttctggtggatgagggaattaactgcgagatagtccgatcagtgcttatggagcgtgcaaactgcccttatctagcagcacaaacagcgaccgaaatggaagcattttcgagaacagaaacatttcaaaaaatcgttgaagcgtattcaaggccaacaaggatcatccgtggaaaagaaattgagtctgctttggaggttgacccacacgtatttgagaaagatgaagagaaagttttgtggagcgcctacttggaggttgctgataagatccatcctggtgttgatattaagacctttgtggatgcttctcttatcctgatacaacccctagaagatttcttcaatagtgtcttcgtgatggcggaagacgagagagttcgcaacaaccggctaacgttgctgaggaagattgagagtttgcccaaggggattgcggacctgtcagttttacctgggttttaagctgcctattccagccagggggtgtgagcaatagccgtagcggagagatgattttgattttacaagtatttctgattaaaggaaaaaaaaac

SEQ ID NO: 219341 - DNA, 1250 bp, Zea Mays
ccggatggccgcgccgcgcccgtccggcgggatggacccgcgcagcggcttctgcgccgcgacgcggaccttccatagcctgcgcccgtccgccgcgctcccgccggactcgctcccggccaccgcggccgcctacgctttctccatcctctcctccccgctacccgatcgccccgccctcgtcgacgctgccaccagcatttccgtctcctacccctcgttcctcgccgccgtccgctccctcgcggggggcctctggtccgttctcggtctccgccccggggacgtcgtcctcgtagtctccccgtcccgcatcgacgtccccgtcatagacttcgcgctcatgtccatcggcgctgtcgtctcgcctgccaacccggcgtccaccgccgaggagtacacgcacatggtcgcgctctccagaccggtcgtcgcgctcgcggctcccgaggtggccgctaagcttccgaggaacctcaggtgcgttgtcatcggctcgaatgagtacaagagcctctcctccgccggcggcgtagcgccgtccccgccggtggcggtgaagcagtccgacacggcggccgtactgtactcgtcgggcaccacgggccgggtcaaggccgccgcggtctcgcaccgcaacctcatcgcggtgatcagcgcgcacaggaacaaccgggttatagcggagaaggaggctgccgaggccggcgaggagccgctcccgcctacggtgacgctgttccccctcccactcttccacgtattcgggttcatgatgctgctgaggtcggtggccatgggggagactgccgtcctcatggaccgattcgacttcatcgcagcgctgcgcgccattgagcggtaccgcgtcacgctgctgcccgcggcgcccccggtgctggtggccatgatcaagtccgaggaggcgcgccgctgcgacctctcctccctcctcttcatcggcatcggcggtgcgcccctcggccgcgaggtcgccgagcgcttcgccgccatcttccccaacatagaactcattcagggctacggtctgacggagacatctggttcggtggcttcgacggtcgggccagatgaatgcaaagcgtacggttcggtcgggaagctggcatcgcacttggaggcaaagatcgtcgatccctccaccggcgaggtgcttgggccagggcagcgcggcgagctctgggtccgaggaccagtcgtcatgaaagacgatgccattgtttactgaa

SEQ ID NO: 219342 - DNA, 589 bp, Zea Mays
cttgaggaactcaaggagatccttgagtacgatgtcactgttgtcgttcctcattagaagttcagcaacctccgcagaatccggaacgactccggggtgcagtaccccatgtttatgtgcatgtccatccttccaggccgcagaagtgctgggtcaagccgctccctgtagtttgtggtgaagacaatgatcctctcctccccgcttgtcgaccagagaccatcaacgaagttgagcagaccagatagcgtcacctgcagatcaccaaaattccaaacttgggcctggcggtacgcctctcgccttcatcccgcagctgcagctcaatgctgcagtcaatgtcttcaaccacgagaatggagcggttgctggtcccgacgagcagcctccggaggtcggagttggacttgacctcggtgagctcgaggtcgtagatgtcaaacttgaggaagttggccatggcggcgacgaggctggacttgccggtccccggtggtccgtagagcaggtagccccgcttccaggccctcccgatcctcctgtagtagtccttcctcctgacgaaccgctggaggtcctcgacgacgga

SEQ ID NO: 219343 - DNA, 1110 bp, Zea Mays
  misc_feature (1109)..(1110): n is a, c, g, or t
cccttaataaaccccaccgccccgccacctcgcccaccatccagaaactcgaatcgtagacacgaacgactacttgagagaggagaggcggcgggagagagaagagtcgacgacgacggtaaccggccgccatggaggtgagggtgccgcttcttccgcagcacatattgcggaacggcgacggacgggagaagaagtgcggcgtgaggcggtggagggagctgctagcgcgggaggccgggaaggtcggctgcgtggccctgccgatggcggccgtgagcgtgtcgcagtacgcggtgcaggtggcgtccaacatgatggtcggccccctccccggcgtcctcccgctctccgcctccgccatcgccacctccctcaccaccgtatccggtttcagcctcctcattggtatggcaagtggactggaaactctatgcggtcaagcctatggagcaaaacagtatgataaactggggatgcacacctacagagctatagtcacactcattgctggcaaactcctgatcctcataggtcaggaccccttgatctcaagggaagctgggagatacatagtctggttgattccaggtctctatgcatatgccatcagccagcctctcacaaaatttctacagtctcagagcctgataattcctatgctttggtcctccattgcaactctgctcttgcacattcctctttgttggttactagtgttcaagaccagtatggggtacattggagcttctttggcaataagcttgtcgtattggttaaacgtgatgatgcttgccgcttacatcagatactcggattcttgtaaggagacccgctcacctccaaccgttgaggccttcaaaggagtcagtgtgtttctacgcctggctctgccgtctgcactgatgttgtgtttcgaatggtggtcttttgagatccttattcttgtctcaggaattttaccaaatccagagctgcaaacttcagttctttcaatctgtttgacgactatcacattaatgtatactataccttatgggcttggagcggctgcaagcactagggtagcaaatgagttgggtggtggtaaccctgaaggagctcgatcnn

SEQ ID NO: 219344 - DNA, 3253 bp, Zea Mays
tgagcccaacccaaccatgagtccacgaccacgaccactcctgtagtctagatgaaaagggagggcctgccgcctgcgcggctgcgcccggcacgcgcaaagcgaaaaagcgccggcgagcaaaggagagcgagggaatcgggttggcgtcgggtgggcagcctggcatcccattcctgccttcctccccgaagagccggacggacttcgttttctcccccctcacccacactgccactgactgcatgctctccgattccgctcccgcggtcccgaccccgcctcctccttcgtcgggctcgatgcggcggcgcctcgcgccggtgcttcttctcgccgccgcgctgctgctggcggcgcgcccgtggccagcggtgatcgcagcagattgtcctttggatttgagttggcccaactacggactgatagcttccgtgtgctcggaccaaaatggacactcaaagtgttgccgctacatcaatgctgttcttgcggtctcgtctgccatgtatgcaaacacaacaggcactcttggggttccggctcaattttctgattcctgcattgccaatatctctgatacattggtgtcaaaggggatactgcctactgccgcttcgttttgtggtcttgggatcaaaattcaagtgtcctatcagtgtgatgggatgaccaccatccttgagatgttgcagtctccgaatttcattgatatcacaagaagctgtgcaactacactttcagatgatatcacctgcaagaggtgcttaaactctggtctgtcgtacctccgccatcttgtcggggaacaagataatgtcaccttgaatacctgccgtgatgctgcttttgttgcacttgtgagtcaagggaatatatctaccgttgatacagctggttgcttttttagtgttcaggggcttagtgctcttcaagtgaacatatctggaccagctccaactggacttgttgcgccagatatttctcctagtccacttacggtgcaagttcctgtagtgccacccaagcatcatcgcagttacaagcttgttctgttcccagctattggagttttagtcactggtgtagcaattctactaatgatagtactgattttcctaatccgtagaaagaataaagaactcaaaaagatggaaggaaataaccctctggatgcatggagtttttcctgtgtcaagaaaggccaagaaggcaattccaccatttttggcagatttagttacaaagaaatgaagaatgcaacaaggaacttcagcacagtgttaggaggaggtgaaaatggtacagtattcagaggacaactaaatgatggatctgtggttgctatcagacgcgttgagagttcaccaaaacaaagtcacaatgaattttgtaaagaaatggaatttcttgggcggttgcatcatcgacatcttgttggactaaaagggttttgttcaacaagatttgagaggtgtatgaatacatggaaaatggaagccttcaagatcacctacattcgccaagtaaacatctgctaccatggaaaaatagggtccaaattgccatcgatgttgccaatgctctggagtaccttcatttttattgtgatcctccactataccatggagatgttaagcctagcaatgtcttcttggacaagaattaccttgcaaagcttgctggttgcggtcttgcacaccactctagtagtggcaatacaactcccagttgcacaccagtaaatgtcaaggcccaagcaactcctggctacgtagaccccgagtacatggtgacccaggagttgaccccgaagagcgacgtgtacagctacggcgtgctgttgctggagctggtgacggggaagccggtgatccaggacaacaagagtctggtggagtggtcccgcgagctgatcggcacggactaccggctccacgagctggtcgacccgtctgtggcggacgcgttcgacctggacgagttgcaggtggtggcggacgtgattcactggtgcacgcaccgggacggcgcagcgcggccgtccatgaagcaggtgctccgcatcctgtatgagcggctggacccgctgtccgggcggttcgcgcgcgccgtggagggcgaggaggggtactactactgccacggtggcgggcgggtgaaggggaagcaggcgggcgacggcgtgatccagttcagcggcgacgcggcgcggtcttggctgccgtcgtcgagcagcacgtccaggtcgcactgcagccgcagcgtgctgctggagtgcaactcgcccgagccgcagtcgtccccggcccacggcaacggagcgttcctggcttgatagcaccggtccgtcacccgtgttgcgtccgtttcatgggatcgatccgtgcaccgttcatggtggttcgtgatgactgacgagtgacgactgacggatcctgctacgggatcgggagcccgtgcatggctgcatgagagtcatgtggagccagaggcagagagtgatgggagcacaactgtgctctgtgcaagaggtacactgacactgactgctgtttttcggttcgcttccctaggtgttggtggttgtttttcattgatctatgcattgatgtgcttcgggaacatggctacgcattcgaagtcgtgacagggatttcactgatactcctacttccattgttccgtactatactctgttctggcttcatcgtgggcagctgggctctggacttgtgggagagccggagaggcttgctcaagtttcctctgcgagaattttggctactgctccagttctacttgtacgtttcacttctgctttgctgatgcttgcatgatgtcacctgcttgaacgtccttgcctccttggggggtccattctcagtatctgtcaagtgagtccttggaactctgttatagactcttttgtgggccggcaatatgccaggcgccagaataattagacccagctatttgttagatggtggctgagtgttagagaagttttaggaggcttatcctccctggagcttatctccttaataatctcctaagttgttctctggagcttatctcttaataatctcctaagttgttaggccccggagctataagggtgcctcagattgtaatagggttttttatcaaaagaagtcgcacctgcgtgggcggttgcttgatcacaatggcgacccacacgcgccctggtgatcgtgttcctcagccgccacgctgcatgccctattccctg

SEQ ID NO: 219345 - DNA, 1996 bp, Zea Mays
accggggcagagctggcaagtggcaaggctgcgcagagggactttttgtgtaaaatgcggtgggaaggtgcgctgcacctgcaagcagaggtgtgctctactgacagagtttgaactcaagaggaggcgaggcagaaccgcaatcgcgaccgcgacccgcaggtgacatacatacggtgcgagcgccggaagccggaagcaccggtgacgaagccttccgtgtcatcactcatcaggatctcagggttttgtttcgtttcgcgggcgttgggaatccatccatggcgaggaagatgctcatcgacggggaggtggcggccgtcgcggatggtgggcactatgactacgatctcttcgtcatcggggcgggcagcggcggcgttcgcggctctcgcaccgccgcctccttcggagctaaggttgcgatttgtgagctcccattccaccccatcagctcagagtggctaggaggacatggtgggacttgcgtgatacgtggttgcgtacctaaaaagatactcgtgtatggtgcatcattccgtggagaatttgaggattcgaagaattttgggtgggagattaacggagatattaacttcaattggaaaacgctattggaaaataaggtcatgtttaaatctctaccatgactgtgagcatgttctccgcaactgctgaccctgaaggaatatcatattgcccaaggggcaggcagtctagttgatgctcatactgttgaagttagccagcctgatggttcaaagcaaaggtatacagcgaagcacattttgatcgcgactggtagccgtgctcaacgtgtcaacatacctggaaaggatctggctattacttctgatgaggccttgagcttggaggagcttccaaagcgcgctgtaatcctgggtggcggatatattgctgttgaatttgcttctatctggagggggatgggtgctgaagtagatttgttttatcgaagagatcttcctctaagaggttttgatgatgagatgagagctattgttgcaagcaaccttgagggaaggggaatcaagttgcatccagggacaaatctctctgagttgagtaaaacggctgacggaataaaagttgtaactgataaaggagaagagctcattgcagatgttgtcctatttgcgacagggcgcacaccaaactcccagagactgaacttgcaagctgcaggcgttgagattgaccgggttggagccatcaaggttgacgaatattctcgtacttctgctcctagtgtatgggctgtgggtgatgtaacaaaccggattaatttaacacctgttgcattgatggaggcaacttgctttgctaaaactgtgtttggtggccagcaagttaagcctgatcacagagatgttccttgtgctgttttctccattccaccactatctgtagtgggcctcagcgaagaacaggccttggaggaagctaatggtgatattcttgttttcatctcatcattcaacccaatgaagaacagcatatccaagcgccaggagaagactatcatgaaactggtagttgatgctgaaactgacaaagtacttggtgcatccatgtgtggaccagacgcacctgaaattatccagggcatcgctattgcggttaaatgtggagccaccaaagcagacttcgacagcactgtcggaatccacccttccgctgctgaagagttcgtgaccatgcgcaccgtgacgaggcgcttgagcccgacatccaagccaaagacgaacttgtaagcaagaaattggtattctggggaaatgttacaccggacaaatactctggtttcatcacgttggtaatttttacgtcattggaactggaaccatgtatattgaaggaataagttgtttttttcatggcaacacaccgaaaataatgagaccgtggactttcttgatacaaataatgagctcaagcagagaacgtttatggttggttctcatctgaattcttt

SEQ ID NO: 219346 - DNA, 1814 bp, Zea Mays
ccggggcagagctggcaagtggcaaggctgcgcagagggactttttgtgtaaaatgcggtgggaaggtgcgctgcacctgcaagcagaggtgtgctctactgacagagtttgaactcaagaggaggcgaggcagaaccgcaatcgcgaccgcgacccgcaggtgacatacatacggtgcgagcgccggaagccggaagcaccggtgacgaagccttccgtgtcatcactcatcaggatctcaggttgcgatttgtgagctcccattccaccccatcagctcagagtggctaggaggacatggtgggacttgcgtgatacgtggttgcgtacctaaaaagatactcgtgtatggtgcatcattccgtggagaatttgaggattcgaagaattttgggtgggagattaacggagatattaacttcaattggaaaacgctattggaaaataagactaaagaaattgttagattaaatggtgtgtatcagaggatccttaccagtgccggtgtgacaatgattgaaggggcaggcagtctagttgatgctcatactgttgaagttagccagcctgatggttcaaagcaaaggtatacagcgaagcacattttgatcgcgactggtagccgtgctcaacgtgtcaacatacctggaaaggatctggctattacttctgatgaggccttgagcttggaggagcttccaaagcgcgctgtaatcctgggtggcggatatattgctgttgaatttgcttctatctggagggggatgggtgctgaagtagatttgttttatcgaagagatcttcctctaagaggttttgatgatgagatgagagctattgttgcaagcaaccttgagggaaggggaatcaagttgcatccagggacaaatctctctgagttgagtaaaacggctgacggaataaaagttgtaactgataaaggagaagagctcattgcagatgttgtcctatttgcgacagggcgcacaccaaactcccagagactgaacttgcaagctgcaggcgttgagattgaccgggttggagccatcaaggttgacgaatattctcgtacttctgctcctagtgtatgggctgtgggtgatgtaacaaaccggattaatttaacacctgttgcattgatggaggcaacttgctttgctaaaactgtgtttggtggccagcaagttaagcctgatcacagagatgttccttgtgctgttttctccattccaccactatctgtagtgggcctcagcgaagaacaggccttggaggaagctaatggtgatattcttgttttcatctcatcattcaacccaatgaagaacagcatatccaagcgccaggagaagactatcatgaaactggtagttgatgctgaaactgacaaagtacttggtgcatccatgtgtggaccagacgcacctgaaattatccagggcatcgctattgcggttaaatgtggagccaccaaagcagacttcgacagcactgtcggaatccacccttccgctgctgaagagttcgtgaccatgcgcaccgtgacgaggcgcttgagcccgacatccaagccaaagacgaacttgtaagcaagaaattggtattctggggaaatgttacaccggacaaatactctggtttcatcacgttggtaatttttacgtcattggaactggaaccatgtatattgaaggaataagttgtttttttcatggcaacacaccgaaaataatgagaccgtggactttcttgatacaaataatgagctcaagcagagaacgtttatggttggttctcatctgaattcttt

SEQ ID NO: 219347 - DNA, 1805 bp, Zea Mays
ggggcagagctggcaagtggcaaggctgcgcagagggactttttgtgtaaaatgcggtgggaaggtgcgctgcacctgcaagcagaggtgtgctctactgacagagtttgaactcaagaggaggcgaggcagaaccgcaatcgcgaccgcgacccgcaggtgacatacatacggtgcgagcgccggaagccggaagcaccggtgacgaagccttccgtgtcatcactcatcaggatctcaggttgcgatttgtgagctcccattccaccccatcagctcagagtggctaggaggacatgttgcgtgatacgtggttgcgtacctaaaaagatactcgtgtatggtgcatcattccgtggagaatttgaggattcgaagaattttgggtgggagattaacggagatattaacttcaattggaaaacgctattggaaaataagactaaagaaattgttagattaaatggtgtgtatcagaggatccttaccagtgccggtgtgacaatgattgaaggggcaggcagtctagttgatgctcatactgttgaagttagccagcctgatggttcaaagcaaaggtatacagcgaagcacattttgatcgcgactggtagccgtgctcaacgtgtcaacatacctggaaaggatctggctattacttctgatgaggccttgagcttggaggagcttccaaagcgcgctgtaatcctgggtggcggatatattgctgttgaatttgcttctatctggagggggatgggtgctgaagtagatttgttttatcgaagagatcttcctctaagaggttttgatgatgagatgagagctattgttgcaagcaaccttgagggaaggggaatcaagttgcatccagggacaaatctctctgagttgagtaaaacggctgacggaataaaagttgtaactgataaaggagaagagctcattgcagatgttgtcctatttgcgacagggcgcacaccaaactcccagagactgaacttgcaagctgcaggcgttgagattgaccgggttggagccatcaaggttgacgaatattctcgtacttctgctcctagtgtatgggctgtgggtgatgtaacaaaccggattaatttaacacctgttgcattgatggaggcaacttgctttgctaaaactgtgtttggtggccagcaagttaagcctgatcacagagatgttccttgtgctgttttctccattccaccactatctgtagtgggcctcagcgaagaacaggccttggaggaagctaatggtgatattcttgttttcatctcatcattcaacccaatgaagaacagcatatccaagcgccaggagaagactatcatgaaactggtagttgatgctgaaactgacaaagtacttggtgcatccatgtgtggaccagacgcacctgaaattatccagggcatcgctattgcggttaaatgtggagccaccaaagcagacttcgacagcactgtcggaatccacccttccgctgctgaagagttcgtgaccatgcgcaccgtgacgaggcgcttgagcccgacatccaagccaaagacgaacttgtaagcaagaaattggtattctggggaaatgttacaccggacaaatactctggtttcatcacgttggtaatttttacgtcattggaactggaaccatgtatattgaaggaataagttgtttttttcatggcaacacaccgaaaataatgagaccgtggactttcttgatacaaataatgagctcaagcagagaacgtttatggttggttctcatctgaattcttt

SEQ ID NO: 219348 - DNA, 1905 bp, Zea Mays
ggggcagagctggcaagtggcaaggctgcgcagagggactttttgtgtaaaatgcggtgggaaggtgcgctgcacctgcaagcagaggtgtgctctactgacagagtttgaactcaagaggaggcgaggcagaaccgcaatcgcgaccgcgacccgcaggtgacatacatacggtgcgagcgccggaagccggaagcaccggtgacgaagccttccgtgtcatcactcatcaggatctcagggttttgtttcgtttcgcgggcgttgggaatccatccatggcgaggaagatgctcatcgacggggaggtggcggccgtcgcggatggtgggcactatgactacgatctcttcgtcatcggggcgggcagcggcggcgttcgcggctctcgcaccgccgcctccttcggagctaaggttgcgatttgtgagctcccattccaccccatcagctcagagtggctaggaggacatggtgggacttgcgtgatacgtggttgcgtacctaaaaagatactcgtgtatggtgcatcattccgtggagaatttgaggattcgaagaattttgggtgggagattaacggagatattaacttcaattggaaaacgctattggaaaataagactaaagaaattgttagattaaatggtgtgtatcagaggatccttaccagtgccggtgtgacaatgattgaaggggcaggcagtctagttgatgctcatactgttgaagttagccagcctgatggttcaaagcaaaggtatacagcgaagcacattttgatcgcgactggtagccgtgctcaacgtgtcaacatacctggaaaggatctggctattacttctgatgaggccttgagcttggaggagcttccaaagcgcgctgtaatcctgggtggcggatatattgctgttgaatttgcttctatctggagggggatgggtgctgaagtagatttgttttatcgaagagatcttcctctaagaggttttgatgatgagatgagagctattgttgcaagcaaccttgagggaaggggaatcaagttgcatccagggacaaatctctctgagggcgcacaccaaactcccagagactgaacttgcaagctgcaggcgttgagattgaccgggttggagccatcaaggttgacgaatattctcgtacttctgctcctagtgtatgggctgtgggtgatgtaacaaaccggattaatttaacacctgttgcattgatggaggcaacttgctttgctaaaactgtgtttggtggccagcaagttaagcctgatcacagagatgttccttgtgctgttttctccattccaccactatctgtagtgggcctcagcgaagaacaggccttggaggaagctaatggtgatattcttgttttcatctcatcattcaacccaatgaagaacagcatatccaagcgccaggagaagactatcatgaaactggtagttgatgctgaaactgacaaagtacttggtgcatccatgtgtggaccagacgcacctgaaattatccagggcatcgctattgcggttaaatgtggagccaccaaagcagacttcgacagcactgtcggaatccacccttccgctgctgaagagttcgtgaccatgcgcaccgtgacgaggcgcttgagcccgacatccaagccaaagacgaacttgtaagcaagaaattggtattctggggaaatgttacaccggacaaatactctggtttcatcacgttggtaatttttacgtcattggaactggaaccatgtatattgaaggaataagttgtttttttcatggcaacacaccgaaaataatgagaccgtggactttcttgatacaaataatgagctcaagcagagaacgtttatggttggttctcatctgaattcttt

SEQ ID NO: 219349 - DNA, 1795 bp, Zea Mays
agtcggcactctcatctccactctcccccaaaaccctataggctatagcggcagggagaaagtgagcacccacctcaacccgcccgccgccatggcgctccgccgcatcacaccgcggaggagacccgttctccccgtcccccgtgccttctcctcgagtccgccgtttcctccacccccgcctccggcgaacgaccccgaccccgacgccgcccaacccccatcctcttctccgccccctaattccggcgcgccgcggaacccggagtcctcgttcttccaggacatcaaagatcgcctccgttcgtctcccacgtctccgtctccgcgccggatcccgacgaccctgccccgccccgaccctgcgcgcggcgctccttcttcgggaccgcccattggagacatccgccggatgctccagaacttccgcttaaccggctcaaccagcgacgcgccctccacctccgctcccggatccaacccctccttcatggacctgctcaagaaccacttggaccagggtgccaacgcccggcaggcggagctcggcttcaatgccatcggagagagcctcaagcgcccccgtccgccgaagccttttataaccccttcgtcgagaaacatcttctgccgggagctagagaggacctcgaaggctttaggtgcgcggcaggaagagaatggctctgccattgagcttaaggggagctacagctacgaagagcttgggaagagactaggggagctgcggccggcgggtgcaggtaaagacggtaaggagtggttctcgctcaaggagctgcaggggcgtatcgccaagctcgcggagcaggagagccagcttgccgggccgttttcggaaatgcggcggggcattaggaacctgcagaaacaaggaaaaccgggtcggcctgtaaacatccaagcactgctgaaccctgtcggtcagccgacgccagactacatgagtgggcctccgcaggtggaattgttagagaagtacttccatccagatcatatgtcatccgaagagaagatgaaattggagctccaaagggtgagggacgaattcaagatgtccgagaatgactgtggttctgcacgagttcaaattgcccagctgactctgaaaatcaagcatctgtcaactgttctacacaagaaggataaacattctagaaaggggcttcaggagatggtccaaaggaggaagaaatacctgaaatacttgcgaaggacggactgggactcttactgtcttgttctgtcaaagctggggcttcgcgatgtgcccgagtacaaagctcctgactacaagagcaaagcaaccaccaaggccaaatctaagaagagcaagagcaagggcaagaagaggaaggtgaaggcataaaagtagcgaacaaatatgccctgtttttggtcttgaattgcatgctcagaaaatgaatcgagaagacgctcaggcctgagatggcttgatccaatcttgcaatgctgttttttttgcatggtcagaaaataaatcgagaagacgctcaggccccaattggctcgatccaatcttgtaatgttgttttcgaagctgtttgtaataaccatttcactgattcggtccagccttcaaacaatcgccttttaaaaaaaaaaacatatgctggggaaaaaagtcctttcccctggcattattttgtaagcaaatttttttagctcactttgttatgcgaaacatgattatacagatgtgtaatttgagtcgtaattcgttactggtatgacaaggacgacaattttctct

SEQ ID NO: 219350 - DNA, 5328 bp, Zea Mays
aaattcccacgttgctctcccgtcttccctcctcccctccccaaacccccaccccaacgcccagatctaccctccccatttacagctttctctccggccctgcgccccagggcaccgcgccgcccgaaaccgtcggcgccggcgcgatgcgcgtgccatgctgctcgttatgcaacgtcagatatgacgaggaggagcggacgccgctgctcctccactgcggccatggattctgccgcgcgtgcctctcccgcatgctagcggcagcccccggagccacgctgccgtgcccgcgatgtcgccatccgaccgccgtaggcaactcagtctctgcgctgcggaagaacttccccattctatcgctcctctccgcatccccctcatccccgtctttcctccactccgactcggggtcatcctccgacggctccgaagatgaggatgacttcttcgcacggcccactcgccgccccgcgcccgcgcccgccgccgcgtcgcccggatgcagctccttcgacctcgcctcgcacccggacctcaagctcgcccgtcgcatcgggagcggcccgcctgggcccgccgggcaggacgtgtgggtcggcacgctgtctcgtggcggcggcggggtcaagcggtgcaagcaccaggtggcagtgaagagggtgccccaaaccgcgggggatgggctcgaggttgttcaagaggaggtggagcggctgaggcgtgcctccacatggtgtcggaacgtgtgcaccttccatggtgctgtgagggtcggcggccacctctgtttcgtgatggatcattatgtcgggtctgtgcaggcggagatgcggcagaatggtggacgcctcacgctggagcagattctcagcaattctgaagaataggagagttcctgatgactccggtgctggcattgatgctatgctgcttagtcccaattatacagctcctgaggcatggggaccactgaagaagtcactgaatatgttttgggatagtgcaaacggtatatcaccagagtcggatgcatggagttttggttgcacgctcgtggaaatgtgtactggtgctgttccatgggctggactgactgcagaggagatctgtaagtctgttgcaaaagagaagaagccaccacctcaatattcaagagtagtaggtgtaggacttcctggggagctgtggaagatgattggtgaatgtttgcagttccgagcttcaagaagaccatccttccaggacatgctgaaaattttccttcgacaccttctggacataccacggagcccacctgctagtcctgagaatgatttcgcaaatgaaaacttgcccaatggcatggaacctccaacaacctccatcctagagatggttcgttataatccaaatgccttgcatcatcttgtatgcgaaggagatgctgctggtgttagggatctacttgcgaaggttgcatcagagagaaatggtggtttcatccgttctctcttagaagcacaaaatacagatggactcactgccctacatttagcatgtcgccgaggctcggcagagcttgtggaagctattgtggcttaccaagagaatgtagatatattagataaggatgaagacccacctatagtatttgctttggctgctggctctccacgatgtgttcgtgcacttgtaggcaggtctgctagtatcaattctaggcttagagaaggcctgggtcctactcttgcccatgtctgtgctcatcatggtcaaccagagtgcatgcaagagctgctgatggctggagctgatcccaacgcagtagatggtgaaggtgaatctgtcctgcatattgccgtggccaggagatatactgattgtgctattgctatacttgaaaatggaggctgcagatcgatgggaatatcaaattctcaacataaaacgccattgcatttatgtgttgagacatggaacacgactgtggtaagaagatgggttgatgttgcatctctagaggatatagcagaagcaattgatgtacccagccctgttggtacagctttatgcatggcagcagctcttaaaaaggagcacgagaaagagggtcgagagttagtaagaatattgcttgctgctggtgctgatcctacagcacaagatgatccacactgtagaactgcattacatactgcagcaatgatcaatgacgtggagcttgttaagattatactggaagcaggagtcgatgttaatataagaaatgctcaaaatacaaccccactccatgttgcacttaatagaggatgatgatggtgacaatgcttttcacatagctgctgacgcagcaaaaatgatacgcgaaaacttgacttggattgctcaaatgctactacagccgtcacctgctgttgatgtgagaaaccaccgaggttggacactacgagactttcttgagaggcttccacgagaatggatttatgaagaattgatggaaatgcttgaagataaaggagttcatctctcaccaaccatatatgaggttgcggattgggtaaaatttagaagaactgttacatcaccagcttttggctggcaaggtgcaggacctagaagcattggttttgtccagtctgttgtagacaatgaccaccttgcggtgtcattttgtactggagaagcccatgttttgacaagtgaagttatcaaagttattccattaaataggggccaacatgtgcaactcaagcctgatgtttctgaaccaagcattgggacagttctctgtgttgatgatgatggaatcttgagggttggttttccaggagcttctaggggatggagagctgatcctgcagaaattgaaagggttgaagaatataaggttggtaactgggttcggattcgtccttcactaacggttgctgtgcatggcatggagtccattactcctggaagtgttgggattgtatactccatcagaccagatagcagtcttttattgggactttgctatttgtccaatccatggctgtgtgaaccggaggaggttgaacatgttgacccattcaagattggggaccaagtatgtgtaaagaggtctgttgcagagcccagatatgcatggggcggtgagactcatcacagtgttgggaaaataattgacatcgagagtgatggcctgctcatcattgatattcctaatcgggctgcaccatggcaggcagatccatcggacatggaaaagattgagaacttcaaggttggcgattggattagagtcaaagtgacagttccctcacccaaatatggatgggaggatgtgactcgaaatagtattgggataattcatagtctacaagatgatggagatgtgggtgttgctttctgctttagaagcaagctttttctttgctcagttgcagatatcgagaaggcacaaccatttgaagtaggggaaaaagttcatgtgtcaccttccatatctgagccacgcctcggctggttaaatgaaactgcagctactattggagccatatcaaggattgacatggatgggactttaaatatcaaggtttctggccgaaaaagcttatggaaggttgctcctggtgacgctgagaggctttcagcttttgaggttggagattgggtccgcccaaaaccaagtattgggagcagacctacttatgactggaatagtgttgggagaataaacattgcagtagtccatagcattcaggactctggttacttggagttagctggctgtttcaggcatgggaagtggctaacccataacacagacattgagaaagtgcagacagtaaaaattggtcagcatgttcggttccgtgctggaatttcagagcctagatggggatggagagatgcgaaccctgattctagaggcatcatcgctggtgtacatgctgatggagaagtaagggtcgccttctttggtgtgccgggattgtggagaggcgatcctgcagatcttgaaattgagaatatcttcgaggttggagagtgggttaggctgaggaacgatgtggagcagtggagatcactcaagcctggtagcattggtgtggtgcatggggtgggatatcaaggtgatgcttgggatggaaccattcatgtcgctttttgtggtgagcaggaaaggtggattgggccttctagccagcttgaaggagttagcaagtttgttgttgggcagcgtgttcgaatcagaggctgtatccgccagccaagatttggttggtccaatcatagtcattcaagcatagggacaatctcatctattgacgcagatgggaaactgaggattcatacaccagctggtgccagggcttggttgacagacccagcagaggtggaaaaagtggaggacgaggaggaagtctgtattggggactgggtgaaggttaaggactcagttggaaccccagtgtatcaatggggtgatgtgaaccacagcagtataggggtggtccaccgggctgatgatggagagctctggattgctttctgcttctgtgagaggctgtggttatgcaaagcatgggaggtggaaaaggtgaggcccttcagacaaggtgacaaagtacggatacgatctggtcttgtatcccccagatggggctgggggatggagacctacgcgagcaaaggcgaggttgtgggtgtggatgcaaacggaaagctgaggataaagtttcggtggagggatagactttggattggggacccggctgatgtcgttcttgatgatgcccatttattgacggaggcttctaatggcttttgacctttttgttcataggcttgtggtattcttttgaccccatatctcatttcttgcacccatccattttgcagcatttcaaatttagcaaaatctcaacctgcagtggagttgcaagttgcacatagttatcatcgcataggcatgcatggcagggtgtatttcttgttgataaccggggaatgagaagacagcgatagtgaaatactcctagagttgataaccaccacctaggtttttttccctttggtctacatgtataattatgccgcctgataccttttgggtttcagtgtaccatatataccagtgtacaggttcggacctgaacattaatttgattgatagtggtctactggtcttgtatgtgctgactcgttgtgcaccgagtggctggcaatgccgcgtgtaccaggagttactgcaagctgctcagtggcatacgagtatgatgacgtatatggtacaaactgcactgctgtgtatgcgtggcaccagtgttggtgtggtaatggatcgtgatctaaataatt

SEQ ID NO: 219351 - DNA, 1386 bp, Zea Mays
caatttttagttcagttggtgttctcaaatttggcagtaatctcctgttctcaaacgaaattactctgttagagaggatccatatggggagattcgaagagtgagaccaaagatcaatggaaattcatgggacatttcaaaattcaagcaagttgatattattcgaaatcatccagctgcaaattcacgtgaagagctcactgccaggaatccaaatgcttccagagatggaaagaaactattaaaggatattatgggagccagcaatttaacataccctaactttatttcaaaagctgaaaccgctgatgaaacatcagatgtccccgataaaccttcagctgtaaccccacaacaacatgattccagcttcccgcaagctggtaagaaacaaaaaggttttgctgctacaacacttaatcagtgttctaatgaggacctgaagaaaggctttgctttgaaggtggagcctttgaatgcatttattcctttcgagcagcagatgatggacctatctcacaggaagcaagagaatgctgcctgtgacgattcatgctctctctcaaaactaatgttgaaggaggatattgaggctgcacccagcctgccgacgggcattcaagtacagaatggctccaagaaccgcaggaggaggcagcccaacgtacagaagaccacggcgactccaacaaggtcgcctgcaaggggtcagcgtcgaaagaacaacgatgccatggtcaaatcggagatgggcttgattgagcagagtaaacttgtgctgacggaacaagagccagagctgggagacgttccggtgaagagacccgttgggaggcccaggaaggcgaggtaggtaacctccgacattttccaatttttttttttatatatatataggaacagaacagggcatggtgacctttcatggtctacttgtaaactaggaacggacctagctcagatgacccgggcacccctgcttcgtaggcttgagctccgtttggcttggattccggcgccttttccagtttcctgtgacttctgtacagtgcaagccatcttaacgccgccaaggttaacttatcgaaacatttggagaacctggaagcaaacggcgaagtttttccgtgtgcgttaatgtttcagagaagggagtccgagggaaaaaaaggttgccactacgcagctcatgtactgtttttttttgtaggatgtattgacatcattgtaccaaatcagctccatataatcctgtttgatagatataataccattgtatcaaatctcgagttttgataggcaaagattactagtaatcttgaagagcccgcggtcgtcagagacggcggtaattttgcgccttgcagatggtgctgtatgatgtgg

SEQ ID NO: 219352 - DNA, 1802 bp, Zea Mays
atttgggttctgaacaacccaaaacataacaatgattccccagtctttcccctgagtaataatcagtcaaatcagggtaaaaaggagactgctctaaaagactacacggggtccctagcaattatctctgagattgaaccaaaggatgccataatgcaattgcttatgcaggaaacctattcaaggtccgagtgcagcaagtttataaagataattcaagagcgggttttagattcagattcaggtgatatagatgctggtgggtttgctctcactagtgctcggaaggctagcagactagccgtagatgggtactcttcatttagtccacatgaatcctcacctgcaacttctagtcttcaaatgcatggctgtgataatagtgctgctgtgggcacaattccaaaattaactcataccaaccaaagccctttcatcaacaatgctaagaacataaacccagttctcaaacgaaattactctgttagagaggatccatatggggagattcgaagagtgagaccaaagatcaatggaaattcatgggacatttcaaaattcaagcaagttgatattattcgaaatcatccagctgcaaattcacgtgaagagctcactgccaggaatccaaatgcttccagagatggaaagaaactattaaaggatattatgggagccagcaatttaacataccctaactttatttcaaaagctgaaaccgctgatgaaacatcagatgtccccgataaaccttcagctgtaaccccacaacaacatgattccagcttcccgcaagctggtaagaaacaaaaaggttttgctgctacaacacttaatcagtgttctaatgaggacctgaagaaaggctttgctttgaaggtggagcctttgaatgcatttattcctttcgagcagcagatgatggacctatctcacaggaagcaagagaatgctgcctgtgacgattcatgctctctctcaaaactaatgttgaaggaggatattgaggctgcacccagcctgccgacgggcattcaagtacagaatggctccaagaaccgcaggaggaggcagcccaacgtacagaagaccacggcgactccaacaaggtcgcctgcaaggggtcagcgtcgaaagaacaacgatgccatggtcaaatcggagatgggcttgattgagcagagtaaacttgtgctgacggaacaagagccagagctgggagacgttccggtgaagagacccgttgggaggcccaggaaggcgaggtaggtaacctccgacattttccaatttttttttttatatatatataggaacagaacagggcatggtgacctttcatggtctacttgtaaactaggaacggacctagctcagatgacccgggcacccctgcttcgtaggcttgagctccgtttggcttggattccggcgccttttccagtttcctgtgacttctgtacagtgcaagccatcttaacgccgccaaggttaacttatcgaaacatttggagaacctggaagcaaacggcgaagtttttccgtgtgcgttaatgtttcagagaagggagtccgagggaaaaaaaggttgccactacgcagctcatgtactgtttttttttgtaggatgtattgacatcattgtaccaaatcagctccatataatcctgtttgatagatataataccattgtatcaaatctcgagttttgataggcaaagattactagtaatcttgaagagcccgcggtcgtcagagacggcggtaattttgcgccttgcagatggtgctgtatgatgtgg

SEQ ID NO: 219353 - DNA, 1941 bp, Zea Mays
gcacgcgcctcctctcatggagtcatccgccgtgaggggcgacacccctcgccggccgtcggcgtttgccggggcctcgccgcctcctcccccgcccccgccgccgaggggttggctcgcgggtctcgtctccggcgccggccggatcctcgccgccgtgctcgggcccgagccctcctcttccggctccggctccattgcctcatctgcagcgtcggacggggactcgccgtcggcctcgtactcgccggcatggttcccgcctcctggcccgcacggcgagggttgcaatgacgccaccgataacaatgattccccagtctttcccctgagtaataatcagtcaaatcagggtaaaaaggagactgctctaaaagactacacggggtccctagcaattatctctgagattgaaccaaaggatgccataatgcaattgcttatgcaggaaacctattcaaggtccgagtgcagcaagtttataaagataattcaagagcgggttttagattcagattcaggtgatatagatgctggtgggtttgctctcactagtgctcggaaggctagcagactagccgtagatgggtactcttcatttagtccacatgaatcctcacctgcaacttctagtcttcaaatgcatggctgtgataatagtgctgctgtgggcacaattccaaaattaactcataccaaccaaagccctttcatcaacaatgctaagaacataaacccagttctcaaacgaaattactctgttagagaggatccatatggggagattcgaagagtgagaccaaagatcaatggaaattcatgggacatttcaaaattcaagcaagttgatattattcgaaatcatccagctgcaaattcacgtgaagagctcactgccaggaatccaaatgcttccagagatggaaagaaactattaaaggatattatgggagccagcaatttaacataccctaactttatttcaaaagctgaaaccgctgatgaaacatcagatgtccccgataaaccttcagctgtaaccccacaacaacatgattccagcttcccgcaagctggtaagaaacaaaaaggttttgctgctacaacacttaatcagtgttctaatgaggacctgaagaaaggctttgctttgaaggtggagcctttgaatgcatttattcctttcgagcagcagatgatggacctatctcacaggaagcaagagaatgctgcctgtgacgattcatgctctctctcaaaactaatgttgaaggaggatattgaggctgcacccagcctgccgacgggcattcaagtacagaatggctccaagaaccgcaggaggaggcagcccaacgtacagaagaccacggcgactccaacaaggtcgcctgcaaggggtcagcgtcgaaagaacaacgatgccatggtcaaatcggagatgggcttgattgagcagagtaaacttgtgctgacggaacaagagccagagctgggagacgttccggtgaagagacccgttgggaggcccaggaaggcgaggcttgagctccgtttggcttggattccggcgccttttccagtttcctgtgacttctgtacagtgcaagccatcttaacgccgccaaggttaacttatcgaaacatttggagaacctggaagcaaacggcgaagtttttccgtgtgcgttaatgtttcagagaagggagtccgagggaaaaaaaggttgccactacgcagctcatgtactgtttttttttgtaggatgtattgacatcattgtaccaaatcagctccatataatcctgtttgatagatataataccattgtatcaaatctcgagttttgataggcaaagattactagtaatcttgaagagcccgcggtcgtcagagacggcggtaattttgcgccttgcagatggtgctgtatgatgtgg

SEQ ID NO: 219354 - DNA, 1588 bp, Zea Mays
ctggcagctgcttttaaagaacagtgcagtaaccagcacacagcccagagcaggaggcagttgatggaatgcgtggagctgctggattctcccgatctcttcttcctggacggcggcgatgcgcatgcgaccgacttctcactggagaaccatctcgagtcaagtagctcggcaggtgccaaaaacaaagctgcgccgggtcatagtcatattcatagtcatagtcatagccggcgtgctcagcttcatcggagtaacgcgcctgttccaccgccgctgcctggaacctcttattatggcgcgcggaggaaggcgaaggccgcctgtcgccgtgtccccgaaggcgtcctggattcctgggacaggttgttcttggagggataccagtctgacctccgtgtctccacagacggcggcgctgagatttcgtcgcattcctgcgttctcgtgagtttcagctctggcgtcaaatcccctgtcctgagagctatgctggaggaagctagactgagagatgggtttcggtgtatccgtgtctctggcgcgccttcggaagcagtccgtgtcttcatcagatttctctactcttcacggtttgagcaggaacagatgaaggagcacgctctgcatttgcttgtgctctcccacgtcttctcggtgccgtctctgaagacggtctgcgtcgaccaactcgagaggggcttcctcgctactgacaacgtggtagacatgctgcagcttgccaggctgtgtgacgcgccccgcctcgcgctcgcctgtgcccggatggtcatcggggatttcaagaccatctctctgacggatgggtggaaagtgatgagacggaccaatccaagtatggaacaggagctgctcgagtctcttgtcgaagctgatacgagaaggcaggaaagagctaaaaggatggaagaaaagaaagtgtatctgcaactgtacgaagcaatggaggcgctggtccacatctgccgggacggatgcaggacgatcgggcctcgagatcaagcgctcaagggcagcctagcagccgcctgcaagtttcgcgcctgcaagggcattgagctgctcgtgcgccacttctcggcctgcggagtccgggtgcccggcggctgtgccaactgcaggcggatgtggcagctcctcgagctgcattcccgcatgtgcttcctcccggacacctgcaaggttcctctctgcaggcattttaaggagaagatgcggaatctggggaggaaggaagagaccaaatggaaccttttggtgtgcaaggtgctggagcgcggaggaaccatgggttttatgcccggaaggagaaaaaatttcatcaaccctaaggccagctgggtgttgccacgtggctcctcttgtatttgaaacactcaaacctcgcaggggtacttttatgttagacgagaaggggaccaggaggagcaggaacaaaaaagaaaaacgtcagaacagctgttgcgtgaatcgtgatgatactttaaaaaggaaaaagcatctaattttgaccatccatccatagctcgagcaaattttgttccaccaattactagtcatattggaa

SEQ ID NO: 219355 - DNA, 1814 bp, Zea Mays
cgccataggaaggggaggaggcctccaaaagtttctgtggagcgacgaggacgaggacgccgtgcccagagcaggaggcagttgatggaatgcgtggagctgctggattctcccgatctcttcttcctggacggcggcgatgcgcatgcgaccgacttctcactggagaaccatctcgagtcaagtagctcggcaggtgccaaaaacaaagctgcgccgggtcatagtcatattcatagtcatagtcatagccggcgtgctcagcttcatcggagtaacgcgcctgttccaccgccgctgcctggaacctcttattatggcgcgcggaggaaggcgaaggccgcctgtcgccgtgtccccgaaggcgtcctggattcctgggacaggttgttcttggagggataccagtctgacctccgtgtctccacagacggcggcgctgagatttcgtcgcattcctgcgttctcggcgtcaaatcccctgtcctgagagctatgctggaggaagctagactgagagatgggtttcggtgtatccgtgtctctggcgcgccttcggaagcagtccgtgtcttcatcagatttctctactcttcacggtatggatgctatctactcattcatatagatagttcactactcattcgtatagatagttcactgtcctctaattctctaaagatcagatttcagcccaaacagtttacagtgactgaagctgatgaagacagtgcagattcttcttcttcttctgacttttgatgcgtgcgtgcatctttcagtgagaaacagacgcgctgaattatttgtttggtgaaggtttgagcaggaacagatgaaggagcacgctctgcatttgcttgtgctctcccacgtcttctcggtgccgtctctgaagacggtctgcgtcgaccaactcgagaggggcttcctcgctactgacaacgtggtagacatgctgcagcttgccaggctgtgtgacgcgccccgcctcgcgctcgcctgtgcccggatggtcatcggggatttcaagaccatctctctgacggatgggtggaaagtgatgagacggaccaatccaagtatggaacaggagctgctcgagtctcttgtcgaagctgatacgagaaggcaggaaagagctaaaaggatggaagaaaagaaagtgtatctgcaactgtacgaagcaatggaggcgctggtccacatctgccgggacggatgcaggacgatcgggcctcgagatcaagcgctcaagggcagcctagcagccgcctgcaagtttcgcgcctgcaagggcattgagctgctcgtgcgccacttctcggcctgcggagtccgggtgcccggcggctgtgccaactgcaggcggatgtggcagctcctcgagctgcattcccgcatgtgcttcctcccggacacctgcaaggttcctctctgcaggcattttaaggagaagatgcggaatctggggaggaaggaagagaccaaatggaaccttttggtgtgcaaggtgctggagcgcggaggaaccatgggttttatgcccggaaggagaaaaaatttcatcaaccctaaggccagctgggtgttgccacgtggctcctcttgtatttgaaacactcaaacctcgcaggggtacttttatgttagacgagaaggggaccaggaggagcaggaacaaaaaagaaaaacgtcagaacagctgttgcgtgaatcgtgatgatactttaaaaaggaaaaagcatctaattttgaccatccatccatagctcgagcaaattttgttccaccaattactagtcatattggaa

SEQ ID NO: 219356 - DNA, 1594 bp, Zea Mays
cgccataggaaggggaggaggcctccaaaagtttctgtggagcgacgaggacgaggacgccgtgcccagagcaggaggcagttgatggaatgcgtggagctgctggattctcccgatctcttcttcctggacggcggcgatgcgcatgcgaccgacttctcactggagaaccatctcgagtcaagtagctcggcaggtgccaaaaacaaagctgcgccgggtcatagtcatattcatagtcatagtcatagccggcgtgctcagcttcatcggagtaacgcgcctgttccaccgccgctgcctggaacctcttattatggcgcgcggaggaaggcgaaggccgcctgtcgccgtgtccccgaaggcgtcctggattcctgggacaggttgttcttggagggataccagtctgacctccgtgtctccacagacggcggcgctgagatttcgtcgcattcctgcgttctcggcgtcaaatcccctgtcctgagagctatgctggaggaagctagactgagagatgggtttcggtgtatccgtgtctctggcgcgccttcggaagcagtccgtgtcttcatcagatttctctactcttcacggtttgagcaggaacagatgaaggagcacgctctgcatttgcttgtgctctcccacgtcttctcggtgccgtctctgaagacggtctgcgtcgaccaactcgagaggggcttcctcgctactgacaacgtggtagacatgctgcagcttgccaggctgtgtgacgcgccccgcctcgcgctcgcctgtgcccggatggtcatcggggatttcaagaccatctctctgacggatgggtggaaagtgatgagacggaccaatccaagtatggaacaggagctgctcgagtctcttgtcgaagctgatacgagaaggcaggaaagagctaaaaggatggaagaaaagaaagtgtatctgcaactgtacgaagcaatggaggcgctggtccacatctgccgggacggatgcaggacgatcgggcctcgagatcaagcgctcaagggcagcctagcagccgcctgcaagtttcgcgcctgcaagggcattgagctgctcgtgcgccacttctcggcctgcggagtccgggtgcccggcggctgtgccaactgcaggcggatgtggcagctcctcgagctgcattcccgcatgtgcttcctcccggacacctgcaaggttcctctctgcaggcattttaaggagaagatgcggaatctggggaggaaggaagagaccaaatggaaccttttggtgtgcaaggtgctggagcgcggaggaaccatgggttttatgcccggaaggagaaaaaatttcatcaaccctaaggccagctgggtgttgccacgtggctcctcttgtatttgaaacactcaaacctcgcaggggtacttttatgttagacgagaaggggaccaggaggagcaggaacaaaaaagaaaaacgtcagaacagctgttgcgtgaatcgtgatgatactttaaaaaggaaaaagcatctaattttgaccatccatccatagctcgagcaaattttgttccaccaattactagtcatattggaa

SEQ ID NO: 219357 - DNA, 1175 bp, Zea Mays
attgcatccacgcgtcctacacttacacatggcgccaagttcgggtacaccggctccgtcggtcccgaccactggggcgcactgagccccagcttcaggcagtgcgcgacagggacgaagcagtccccgatcgacatctccacggcccaggcggtctccaacccggcgctgcagccgctccacagggactacaccgtggccaacgccaccctcgtcgacaacgtcgtcaacgtcgcgctgcgcttcgacggcgacggcggcgccgggagcgtgagcgtcggcgggaagctgtacacgctgaagcaggtgcactggcactcgccttccgagcacaccgtcgacggccgccggttccccgtcgagctccacatggtccacgccagcgacgacggcaacgtcaccgtggtggccatgctctaccggtttggcaggccggatcctttgctctggcagatccaggacaagctggccgcgctgcacgcggagggctgcagagcggacaagggcgctccggtcgccgccggagacgtcagcctgtggtcgctcaggctctactcccacacgtactaccgctacgtcgggtcgttcaccacgccgccctgcaccgagaacgtcatctggagcgtcctggcccaggtgagggagatgacggtggaccaggccgccgccctgatggcgcccctggagcaagcttacaggcgcaacaacaggccgacgcagccgaggaacggccgcgtcgtccaggtctaccgcaacgggttcatcaacaagaagacggcgccgtagccgtgccatgcgctgccccgtatgcgtggcctggtccttggtggcgacgccaagtcctctgggttacttgtcagttgtttctcgtcgaagtctttgtgttcttctgcacttgttctgccgccggttttggtgctctcgggactgaatgttcgtcagtgggtctgtgggtttagctaggttaggagatttaagctgtttagtttctgcaaaatctatcctccttatctgttagtaatgattagcatgttgttggtcgacgcatgatcttcattgcagcgaataacgtaacagatagacgcaatcatctaagagcatcctctaaattattatttacagagtcatttgcataaaatcattttatatattttttcaatctccaacatcttttc

SEQ ID NO: 219358 - DNA, 438 bp, Zea Mays
cacatctcgacgttggaaggccatcgattcgctagctccgtcgtgccgagggatagattttgctgtgacgtcatccacccaattcaagcctgagatggccaacatcatgaaggatttcgatgagcgggggcaccgtaccttgcctcgaccggcctgttcctgggagccaccaagtacactgtcatccaaggcaagcttggtgctgttattcgtggcaagaagggatccggtctgtgaggccaatagtatcctttatttatatttttcatgtgagatcctaaatgaaaattcactactggatttgactttgctggtttcacaaacctatacgttttgagacagtcatgccaaggtttcattatcagttccgtacccggcataatacatatgtttactttgtttttttgctgtatgcagatgaaaattctacatattaag

SEQ ID NO: 219359 - DNA, 2523 bp, Zea Mays
ggccttctctatctgggtccctctctatttagccacccgttcgacacacgctgctacaagctcttcgtgatcagtcaaaaatagtgagatcgagttgtttggggggagcactgcatgagccctcctccgacggacaccctctccgttctctagcgatcgagatgtgcgaaattctgatgtgcgagatcgagggccaccacctcacgtcggcagccatcgtcgaccatgaaggcgccgcctgggctcagagcactgcattccccgaggtcaccgctaccttcatgcgaaccattcctctgccgtaaagtccgacggcagccacgtggtaccaggccacagctggcccacacgtcatccacccggctaccacaacgttcacggatgttacgggatagattttgctgtgacgtcatccacccaattcaagcctgagatggccaacatcatgaaggatttcgatgagcgggggcaccgtaccttgcctcgaccggcctgttcctgggagccaccaagtacactgtcatccaaggcaagcttggtgctgttattcgtggcaagaagggatccggtctgtgaggccaatagtatcctttatttatatttttcatgtgagatcctaaatgaaaattcactactggatttgactttgctggtttcacaaacctatacgttttgagacagtcatgccaaggtttcattatcagttccgtacccggcataatacatatgtttactttgtttttttgctgtatgcagatgaaaattctacatattaagggctagtttgaaaacctcatttttctaagggattctcattttttggaaaataaactaagttttctttgaaaaatagaaatctcttgaaaaaatgtggttgacaaattagtcctaattatactattgacgaaactaacattctatgcattgtatctctatggagagttccatgtcctgaagttggatatctcatctgcttggagggcgatagtggtactcgacatccacacattaacatccgttgggaccatggttgttgcattagatgtacattttggtaacaattaaatatcctcaagatggggtcacacaggtttctcttcaaaagtgagataaaagtttacactcacatcttgtatgtaaaactgttggaaaaattgaagttggattttacatgctctttatacaatgaggttattcttgaaaacatgttctacttttaaaattgcacagtataaaaaatggatacgactctagtcacatgaattatttatgttggttacatgttcttttagtcttttagatatgtggcagtgttgatagtttataatgccaaccttttattgaccaccattttaaagaaattaacttctgtggaaaatataatgcctttttattacttttatacgcttccttttgcatctaacatttctatttgtaagaataaccattacctggcattgtgtttatcctttggtttcttctcatctccacacaacatttatgcgttcacatgtgttatgtgtacatgaacatggattttttttgctactaaccattggtatctttttttcgttctcatttgttgttagtttcatcaatcctaacgaagatgggaagaattacaacgcacatgcatgattcacaggtatagatggccaataagcacgaggcccacgagcccggcacgaagcccgctgtttgagcccggcacgacccggttctatgcgggcccgggcccgggccggctcggcacgaataagcgggtcgggctcggataggaaactaagcaaggtgggctagcctggcacgacccgtttacctctaagcccgttaagcccgttttttgcactaaaccgtgcttaccggcccgcttagcccgttttcgatcggtccgcttttttcgtgtttaccgggctgacccaacccgtttaggcccgctgcgggtcgggctcggacagggaaacgagcccacgggcttagatggcccggcccggttttctaaccgtgcctggtgggccgggcccggaccaggccgggccgggcggcctgtttggccatctctattcacaagtaagctccattccatcagctaagtcatttccttgtatgtttctcatgatggtggcttgcaattttcctatataatacttaattttctgtgatgggttggcacattcttctccaaatcctcgagccgaccctgagtgagggagcacaagggaaaggcgtccatgagttcaagtggggatggccaagaaagatgacaaacaggagggtgcaggaaggctcccagggaagggaggagacaggcgcttgggtgccagaatgcggtaagcgtaaccgacccaggcaccctcctgctctgttttatgcgcaggaatagagaacccaagtggcgtcagaaaggtgggcccccacaaactacacaggaggatccaccgccttagaacaccaccacctcgggcgccgggtgggaggctgtaagtttttagggcaccgtaaccgacccaggcaccctcccgc

SEQ ID NO: 219360 - DNA, 773 bp, Zea Mays
cgagttgtttggggggagcactgcatgagccctcctccgacggacaccctctccgttctctagcgatcgagatgtgcgaaattctgatgtgcgagatcgagggccaccacctcacgtcggcagccatcgtcgaccatgaaggcgccgcctgggctcagagcactgcattccccgaggtcaccgctaccttcatgcgaaccattcctctgccgtaaagtccgacggcagccacgtggtaccaggccacagctggcccacacgtcatccacccggctaccacaacgttcacggatgttacgattttgctgtgacgtcatccacccaattcaagcctgagatggccaacatcatgaaggatttcgatgagcgggggcaccgtaccttgcctcgaccggcctgttcctgggagccaccaagtacactgtcatccaaggcaagcttggtgctgttattcgtggcaagaaggtatttaactgcccatcgaacgtcgcaacgcgactgctccatcctctttgatccgattcattcccaactgttgctgcctttgttgttcccagggatccggtctgtgaggccaatagtatcctttatttatatttttcatgtgagatcctaaatgaaaattcactactggatttgactttgctggtttcacaaacctatacgttttgagacagtcatgccaaggtttcattatcagttccgtacccggcataatacatatgtttactttgtttttttgctgtatgcagatgaaaattctacatattaag

SEQ ID NO: 219361 - DNA, 909 bp, Zea Mays
atggctcattcagaaggcttctcagttccggacgttgtcccttgtggcggtcgagggctctcgagccctcatcttcactggccgatggtcgatgtcgacgaagtcgttatccagcgaagtctttggtcacttgaagcgctgcaattagtcgaggggtcagtggcttctgtggtcgagtgtcttttggctctaaaggataatgtgactacaggattgcgtcaaaacattacgaacaatgctgctaaaacaccccttagaaggaaactggaacttgaagaatctgatgagcctgtaatttcggttatgacacccgggagaagatctggggaggaaagatggaaaggccactgggattctaagtctcaacaaagaagtattcttcattctggacaaaaggtccatgatgctttccaacttaagcgagcctcctacactgatcttcctcctgccaaagtttcagagatgatgcatccaagaagtatagatagttgttaatggcattctagatgagagcattgagaggaaaagaggagaaataccacatcgtgttgtttacttgctaaggaatgttgttcaagagattgagcaccgcattgctatccaagcggatcacataagaaatcaaaatagcatcatcaagacccgggaagacaagtaccgttcaaaaattaaagcactcgagaccttagtaaatggcacaaatgaagaaaatgagatgacagtaaatcgacttgagctagttgaggacggatgggttatagtttatccctcttttgaccgcagaaaattcacataagatctcacggtacctgatctgccttcggaactgtggcttctgggtaagtacaaagtactgtagcaacccatagttttgcaggggggtcgtttggctttggtgcacacaaacac

SEQ ID NO: 219362 - DNA, 1029 bp, Zea Mays
atcaccgcgggcccatgaccaaaatgggtatgtcttctgcattcgcggcctacgtccgtaggagcctttgcatctcctgctggccttcgccgggatggctcattcagaaggcttctcagttccggacgttgtcccttgtggcggtcgagggctctcgagccctcatcttcactggccgatggtcgatgtcgacgaagtcgttatccagcgaagtctttggtcacttgaagcgctgcaattagtcgaggggtcagtggcttctgtggtcgagtgtcttttggctctaaaggataatgtgactacaggattgcgtcaaaacattacgaacaatgctgctaaaacaccccttagaaggaaactggaacttgaagaatctgatgagcctgtaatttcggttatgacacccgggagaagatctggggaggaaagatggaaaggccactgggattctaagtctcaacaaagaagtattcttcattctggacaaaaggtccatgatgctttccaacttaagcgagcctcctacactgatcttcctcctgccaaagtttcagagatgatgcatccaagaagtatagataatgcccctactcaatcacttcttagagttgttaatggcattctagatgagagcattgagaggaaaagaggagaaataccacatcgtgttgtttacttgctaaggaatgttgttcaagagattgagcaccgcattgctatccaagcggatcacataagaaatcaaaatagcatcatcaagacccgggaagacaagtaccgttcaaaaattaaagcactcgagaccttagtaaatggcacaaatgaagaaaatgagatgacagtaaatcgacttgagctagttgaggacggatgggttatagtttatccctcttttgaccgcagaaaattcacataagatctcacggtacctgatctgccttcggaactgtggcttctgggtaagtacaaagtactgtagcaacccatagttttgcaggggggtcgtttggctttggtgcacacaaacac

SEQ ID NO: 219363 - DNA, 1021 bp, Zea Mays
atcaccgcgggcccatgaccaaaatgggtatgtcttctgcattcgcggcctacgtccgtaggagcctttgcatctcctgctggccttcgccgggatggctcattcagaaggcttctcagttccggacgttgtcccttgtggcggtcgagggctctcgagccctcatcttcactggccgatggtcgatgtcgacgaagtcgttatccagcgaagtctttggtcacttgaagcgctgcaattagtcgaggggtcagtggcttctgtggtcgagtgtcttttggctctaaaggataatgtgactacaggattgcgtcaaaacattacgaacaatgctgctaaaacaccccttagaaggaaactggaacttgaagaatctgatgagcctgtaatttcggttatgacacccgggagaagatctggggaggaaagatggaaaggccactgggattctaagtctcaacaaagaagtattcttcattctggacaaaaggtccatgatgctttccaacttaagcgagcctcctacactgatcttcctcctgccaaagtttcagagatgatgcatccaagaaaatgcccctactcaatcacttcttagagttgttaatggcattctagatgagagcattgagaggaaaagaggagaaataccacatcgtgttgtttacttgctaaggaatgttgttcaagagattgagcaccgcattgctatccaagcggatcacataagaaatcaaaatagcatcatcaagacccgggaagacaagtaccgttcaaaaattaaagcactcgagaccttagtaaatggcacaaatgaagaaaatgagatgacagtaaatcgacttgagctagttgaggacggatgggttatagtttatccctcttttgaccgcagaaaattcacataagatctcacggtacctgatctgccttcggaactgtggcttctgggtaagtacaaagtactgtagcaacccatagttttgcaggggggtcgtttggctttggtgcacacaaacac

SEQ ID NO: 219364 - DNA, 967 bp, Zea Mays
cttattcagtagcactgacaataatcaagtcattttattgtgcaaatatctggaccaatttgatgaagcttcgttctgattataaagatgaatttgtcacaaagcatggtgtcaaattgggtcttatgtcttgctttgtcaaggctgctgtttctgcacttcaaaaccagccaattgttaatgctgtcattgatggcgatgacatcatatacagagactacgtagacgtcagtgttgctgttggcacttccaagggccttgtggtgcctgttatccgagatgctgataccatgaactttgctgacattgagaaagggataaacaaccttgcaaagaaggcaaatgagggggcgctctcgattgatgacatggcaggaggaacattcactatctccaatggtggtgtctatggaagcctcctcagcacacctatcatcaaccccccacagtcgtcaattctggggatgcattccattgtgcaacgccctgtggttgtgaatggtgacattctcgcaaggccaatgatgttccttgcgctgacatatgaccacaggctgatcgatggcagagaggctgtattcttcctccgtcgcatcaaggatgtcgttgaggaccccaggaggttgctgcttgacatataaagttacttaccagtgctttcccgccgactgttttgtgctttctggaaataataccatgcaaatttttgactgatgaaaaagaattgcttcctcggaaagacgaattctgagctgaggatacagtgaggtttttctctataatcgtagaagagagcagcaaactcaactcaatgtgaggtcatgtttcattttcgggtataagatgctccatttcgggatgcagttcccagtaattttatttgccatgcaagagcaatagaagctgctgcatttttgtttgttggttcacaatttcgcctccagctggccagtctgcgactcaaaag

SEQ ID NO: 219365 - DNA, 1772 bp, Zea Mays
gttgcgtctggagaataatctgctactctagtgttggctaggggcatatgcaagcaggacgtgatgataatcgaaggctgtgcgctggtgcttcatgcacgcacttcgcctcctccgatttggagtattccgtgacttgatgataattattcgactctagggctactaaggagtcatacacatgtcagaaactacagcagtcaactttcagctttgattccagctacttctcaatgctcaaatctgacaagaagacgctattacttacctaatccatctctgtaccaagtttggagtaggtcatttgcctcagacagcggagacaagttcgaggctgttgtgcccttcatgggtgaatctgtaactgatggaactcttgctaacttcttaaagaagcctggagacagagtcgaggccgatgaacccatagcgcagattgaaactgataaggtcactatagatgtcgcaagtcctgaagctggtgttattgaaaagctcattgctagtgaaggcgacacagttactccaggcactaaagttgcaatcatatccaagtctgctcaacctgctgaaacacatgttgctccatctgaggaagcaacttcaaaagggtcttctccgccgaaagttgaagagaaatcaagggtagaggaaaaagccccgaaagtagaacctcccaagatgcaagcaccgaagccaactgcaccattaaaaacgtccccttcagaaccacaactccctccaaaagaacgggagcggcgggtgccgatgccaaggctcaggaagcgtattgcaaaccgtcttaaggattctcagaacacctttgcaatgctatctacatttaatgaagttgacatgaccaatttgatgaagcttcgttctgattataaagatgaatttgtcacaaagcatggtgtcaaattgggtcttatgtcttgctttgtcaaggctgctgtttctgcacttcaaaaccagccaattgttaatgctgtcattgatggcgatgacatcatatacagagactacgtagacgtcagtgttgctgttggcacttccaagggccttgtggtgcctgttatccgagatgctgataccatgaactttgctgacattgagaaagggataaacaaccttgcaaagaaggcaaatgagggggcgctctcgattgatgacatggcaggaggaacattcactatctccaatggtggtgtctatggaagcctcctcagcacacctatcatcaaccccccacagtcgtcaattctggggatgcattccattgtgcaacgccctgtggttgtgaatggtgacattctcgcaaggccaatgatgttccttgcgctgacatatgaccacaggctgatcgatggcagagaggctgtattcttcctccgtcgcatcaaggatgtcgttgaggaccccaggaggttgctgcttgacatataaagttacttaccagtgctttcccgccgactgttttgtgctttctggaaataataccatgcaaatttttgactgatgaaaaagaattgcttcctcggaaagacgaattctgagctgaggatacagtgaggtttttctctataatcgtagaagagagcagcaaactcaactcaatgtgaggtcatgtttcattttcgggtataagatgctccatttcgggatgcagttcccagtaattttatttgccatgcaagagcaatagaagctgctgcatttttgtttgttggttcacaatttcgcctccagctggccagtctgcgactcaaaag

SEQ ID NO: 219366 - DNA, 1841 bp, Zea Mays
aaaccggagaacgggaagcgaccagagggcggccgcggcacgcgggtcgtccccattccagtcttttcagaacgagattgcatcgaggaaactacagaaaagggaccaaatcgaatccgtggtgcactgcccctccccctccctcacaagccgccgccgccgtgaggactccggcgaatggcgtcccgcgtcgcctcgggcctcctccgccgccgcgccgtcgccactctagggctactaaggagtcatacacatgtcagaaactacagcagtcaactttcagctttgattccagctacttctcaatgctcaaatctgacaagacgctattacttacctaatccatctctgtaccaagtttggagtaggtcatttgcctcagacagcggagacaagttcgaggctgttgtgcccttcatgggtgaatctgtaactgatggaactcttgctaacttcttaaagaagcctggagacagagtcgaggccgatgaacccatagcgcagattgaaactgataaggtcactatagatgtcgcaagtcctgaagctggtgttattgaaaagctcattgctagtgaaggcgacacagttactccaggcactaaagttgcaatcatatccaagtctgctcaacctgctgaaacacatgttgctccatctgaggaagcaacttcaaaagggtcttctccgccgaaagttgaagagaaatcaagggtagaggaaaaagccccgaaagtagaacctcccaagatgcaagcaccgaagccaactgcaccattaaaaacgtccccttcagaaccacaactccctccaaaagaacgggagcggcgggtgccgatgccaaggctcaggaagcgtattgcaaaccgtcttaaggattctcagaacacctttgcaatgctatctacatttaatgaagttgacatgaccaatttgatgaagcttcgttctgattataaagatgaatttgtcacaaagcatggtgtcaaattgggtcttatgtcttgctttgtcaaggctgctgtttctgcacttcaaaaccagccaattgttaatgctgtcattgatggcgatgacatcatatacagagactacgtagacgtcagtgttgctgttggcacttccaagggccttgtggtgcctgttatccgagatgctgataccatgaactttgctgacattgagaaagggataaacaaccttgcaaagaaggcaaatgagggggcgctctcgattgatgacatggcaggaggaacattcactatctccaatggtggtgtctatggaagcctcctcagcacacctatcatcaaccccccacagtcgtcaattctggggatgcattccattgtgcaacgccctgtggttgtgaatggtgacattctcgcaaggccaatgatgttccttgcgctgacatatgaccacaggctgatcgatggcagagaggctgtattcttcctccgtcgcatcaaggatgtcgttgaggaccccaggaggttgctgcttgacatataaagttacttaccagtgctttcccgccgactgttttgtgctttctggaaataataccatgcaaatttttgactgatgaaaaagaattgcttcctcggaaagacgaattctgagctgaggatacagtgaggtttttctctataatcgtagaagagagcagcaaactcaactcaatgtgaggtcatgtttcattttcgggtataagatgctccatttcgggatgcagttcccagtaattttatttgccatgcaagagcaatagaagctgctgcatttttgtttgttggttcacaatttcgcctccagctggccagtctgcgactcaaaag

SEQ ID NO: 219367 - DNA, 1779 bp, Zea Mays
aaaccggagaacgggaagcgaccagagggcggccgcggcacgcgggtcgtccccattccagtcttttcagaacgagattgcatcgaggaaactacagaaaagggaccaaatcgaatccgtggtgcactgcccctccccctccctcacaagccgccgccgccactctagggctactaaggagtcatacacatgtcagaaactacagcagtcaactttcagctttgattccagctacttctcaatgctcaaatctgacaagaagacgctattacttacctaatccatctctgtaccaagtttggagtaggtcatttgcctcagacagcggagacaagttcgaggctgttgtgcccttcatgggtgaatctgtaactgatggaactcttgctaacttcttaaagaagcctggagacagagtcgaggccgatgaacccatagcgcagattgaaactgataaggtcactatagatgtcgcaagtcctgaagctggtgttattgaaaagctcattgctagtgaaggcgacacagttactccaggcactaaagttgcaatcatatccaagtctgctcaacctgctgaaacacatgttgctccatctgaggaagcaacttcaaaagggtcttctccgccgaaagttgaagagaaatcaagggtagaggaaaaagccccgaaagtagaacctcccaagatgcaagcaccgaagccaactgcaccattaaaaacgtccccttcagaaccacaactccctccaaaagaacgggagcggcgggtgccgatgccaaggctcaggaagcgtattgcaaaccgtcttaaggattctcagaacacctttgcaatgctatctacatttaatgaagttgacatgaccaatttgatgaagcttcgttctgattataaagatgaatttgtcacaaagcatggtgtcaaattgggtcttatgtcttgctttgtcaggctgctgtttctgcacttcaaaaccagccaattgttaatgctgtcattgatggcgatgacatcatatacagagactacgtagacgtcagtgttgctgttggcacttccaagggccttgtggtgcctgttatccgagatgctgataccatgaactttgctgacattgagaaagggataaacaaccttgcaaagaaggcaaatgagggggcgctctcgattgatgacatggcaggaggaacattcactatctccaatggtggtgtctatggaagcctcctcagcacacctatcatcaaccccccacagtcgtcaattctggggatgcattccattgtgcaacgccctgtggttgtgaatggtgacattctcgcaaggccaatgatgttccttgcgctgacatatgaccacaggctgatcgatggcagagaggctgtattcttcctccgtcgcatcaaggatgtcgttgaggaccccaggaggttgctgcttgacatataaagttacttaccagtgctttcccgccgactgttttgtgctttctggaaataataccatgcaaatttttgactgatgaaaaagaattgcttcctcggaaagacgaattctgagctgaggatacagtgaggtttttctctataatcgtagaagagagcagcaaactcaactcaatgtgaggtcatgtttcattttcgggtataagatgctccatttcgggatgcagttcccagtaattttatttgccatgcaagagcaatagaagctgctgcatttttgtttgttggttcacaatttcgcctccagctggccagtctgcgactcaaaag

SEQ ID NO: 219368 - DNA, 966 bp, Zea Mays
gcgccactgcggattgaagtaatttgccagggccattagcgtaattgctcctccgttaatacaaacccacagttgccctaataaggtttcgagtcttacgacgatccggcgacgctacctttccgtcgctcctcccccacccacgaaccctgccggaagggcaaaaaggggttcgaaattggtcctgatccaggagccaatcctacagacttcacctcccaaattcttttcccgatccgatctgcaagttctccttggatcctgcatcctccagccgattcctgggaagatctgaatcctcctctcgaccatggatccacgcgccaggtatccttcgggcatgggcaacggccgcggtgggaacctcaactactacggccgcggcccaccgccgcaacagccgcatcagcaccacaaccaccagcagacgtcgggggcgcaccaccaccagcagacgtcgggggcgcaccaccaccagcagtacgcgcagaggcagcaccagcaccagcaccacggccacaatcgccatcagcaacagcagcagcaccacatttaccagcagcaacagcagcagtggctgcggcggagccagattgcccgcgagacctcgggcgcagccgtgaccagcgagccgaagtccctggcgccatccacggccgccgatggcgtcgattcgagttatacaggaactgtgcttatccatatgtgcagttcacaagattggaaggcccaattgaagctgccgcctccagatacacgctacaggacagaggatgttacagctaccaagggaaatgagtttgaagactattttctcaagcgtgaactcctaatgggtatatacgagaagggatttgaaagaccgtctcctatccaagaggaaagcattcctattgctttaactggtagtgacattcttgcaagagcgaagaacggaactggcaagactgctgcattttgtattcc

SEQ ID NO: 219369 - DNA, 2417 bp, Zea Mays
aacgtcttcggcgagtccagttcaccgtccctccctgtccttgccatggccatccccaccgcccccgccctcctcttcccctccgttctccctaactcattcccccgccggacaccctggcgacacctcgtccggcggcaaccgcgtcacctccgcgcgggccgcccgcgcctgcaggcgccggcgccggctcctcccccggtggcggaggtcgcggcggagcgggacgacacgcctccgctcaggctgctcgagccgccgcaggaggacgaccccttcccgcccgagatggagcccgcggaccctgatttctaccggataggatatgcgcggatgatgcgcgcctatgggatcgagttcctcgaaggccccgacgggatgggcgtctacgcttcccgggacgtggagccacttcgcagagctagactggacgtccatcaccacaccagttagtgtttggatgcagcacctgtgaatctgtgattgggtgggaaactcacatgagaataactggtcaaggacgttgttcgtgtgtagtaactgttagattatatttacactatatttagtaggtagtatacattaccactggaagtcaatggcttatgttaattgcctaattgttatttgctacatacttgctgtcaccaaaaaatatggcatctatagttataacacatgtttgctcgcagtcgcattaagctcacgaaatgccagacccatgtgttgaattcttcatcttgatgcatgctatagacctgtagtacgatggtcttgttcaaaagaattatatgatattcttggcatgctgaaactgtttgtataacatatttggttcttttcgttcgcaatgatgagcaatgttattgaaagatgtgctgatgttgctttcttttccaggtgattatggagattccgttggagctgatgctgactataactcaaaagaaaccttggatgtttttccctgacattattccactaggccatcctatatttgatgttatcgagtcaacagatccagagacagattgggatctaagattagcatgtcttcttctatatgcatttgatatagaagacaacttttggcagttatattctgattttttgccaagtgttgatgaatgcactagtttgctgctggcaccaaaggaagatctaatggaactagaagatgaagatcttgcttcacaaatgttaaaacaccaggaacgagcaattgacttttggcaaaagcattgggacaaaccaattcctctaaagctgaaacgccttgcacgtgaccatgagagatttctctgggcactgagtatagtacagtctcgttctgtcaacttgaagttgagaatgggagccttcatccaagatgcaaatgtgctagctccttatgctgatatgttgaaccactcacccaatgctaattgcttcctgcattggcgttttaaagaccgtatgcttgaagttatgattaaggctggacaagctatcaagaaaggagacgagatgacgatagattatatgagtggcgtcaacagcaaatttatggaaagatatgggttctcatcaccaacgaatccttgggagctcataaatttctcgagtcctgcaacaattcacatggattccttcttatcggtcttcaatatcgctggcttgcatgatgagctgtaccacaattctgcattgacctcagtagtagaaaccgactttgtggacggagcagtcgtagcagcagccagagcattgccgacatggtcagatggtgatgttcctgcaattcctagtgtggagagaaaatctgctcaggcactgcaagaggagtgccgccaaatgttggattcattcccaactaccatcgaacaagaccagcagatcctagattccgatgcgcatatcagcaaaacccgagaaattgcgatcaagtatcgtctgcaccggaagatgctcctacagaaaatcatggacgcactggacatatatcaggatagaattctgttctagctgtagaggcggcgctacctgtgctcatttagagcacagaacgagtgcccagttctactgctagtaaacctggggccattgtagaaaggggattttgtagggcagcctttcagttcatagcgtctgtaggttaacagcagaggatcccagaaggaaatcaacattaggataggctggttgccaggaaatatagctgctgtaagttcaagtcagcaagctgccatgtaacttgtttgcacagggcggcaatctgtcatagccacctgcatatctctcaggctcagcttcacaacaacttgcactgctgaaagaaatggcctgtgggctgtgtcctgtcacctgtgtgtgtgaaatactatccatatgattggttggccgcatcgctttgtcctgaaccactgtatgcattgatt

SEQ ID NO: 219370 - DNA, 1542 bp, Zea Mays
agcaattggaatacaggatctattaaatttcacatattttatcattatagtttcatcacatgtacacatgttttataatcttcctgtccgctgttgtaatcattttctgtctttcaatctgaaatatcgacgattttctaaaatgaaatccaagctgtacacaagcaatgtcagcacatagacttggttgttgtgattatctaatcaatgatgtgttcatttaggtacggctgattgaatgacatctactatcatatgcatatttaatgttgtgttaagttaaatattgttatttgatgccattggccatcatattctttttcatactaattctacaatagtctgattgactgtgtctacctgtgcttttcctttagtaagtgcttgtgattgtttctttttctttgagtcatgtctatatggaaagcactattacttatctgtcattaactaatcttataatgttcattatttgggtaggaagagcaagacgttgctttaaaacaactaaggaagtcattggtgattagagcgaaacccatgccaagcttctatcaagaagggcccccaccaaaggctgaactgaagaaggtgcctcctacccgtgccaaatcgccaaagtttacaagttcaaggagaaggagctgcagtgatacactattgacacctgacggggaaaataccaatgcaacatctacccaaccacatcgtcatagtatcaggagtcctaaagacgctaacagagtacaacaatgctcgccaaagagcggtgtggcaaccaaaacaagatctgtcaaggctgagctgaaggccctctaaagagcatggagcagccgagcgctgtgtttctctgtacaaaccgaattgcctaaccgttcccatttccatgcatttttgcttctattttatacccaacatctccagcaaaagaaggctgtagggccaatgacgttgttcagcgccgctggaccttatccattttcttacattcgccttgtactcatccgcgtcacacgccaggagaacgcgctctgcactgccgcctcttttgaccgtgatgccgccaacgcgttccagctctacgtcgctgagttcctcggctttggcgtcaagcgggcgggtttcctctacggccgcgtcgacgtagagaccaaggatgtcttcgtcgactttatcgatgagccaccgcagcagggctccgaggacgtggtccacctcttgagggaccccgacgaggaggcccgcgtcgataccatcgctgaggggctcgggatgcgccgggtcggcttcgtgctcacgcaggccgttgggagaaaggccagcgagactggtgagtacaccatgtccaaccaggaggtcatgcaaattctaggcaaaggagttgggttaacatgggaagaggccaagctccaggtgaaactaacacatccttgtcgtcgtgctgattccagatcaaggggtagtgatccggaaggtggctatggtttttgtaagtacgagactcaagatcttgttcaaggaaggtggctatggtacttttga

SEQ ID NO: 219371 - DNA, 2031 bp, Zea Mays
aacccacagttcggatcccggaggtgcaccgcggccggggcggcacacgagccggctagccgcgatggccgggcgagcgtaacgactgtctagtagtatgactgtacgagacacggcggtagtggcagctggcacgaagggagatgattaaaaataccgtggccacgctgatggtgcgcctccaccacctgcccctgccccgcgccgcgcccgctcccacctaccgttgcggccgccacctcgccctcgcgccccctctccctcggctgcgggcatcggccgccgtcatgtcaacggcggcggaacagacgatcgccgaccagaagcgcacgctgcgcgccgaggtgcgcagggcgctgaaggccctctctgccgaccagcgcgccagcgaagatctggctattcaaactacaatactggattcctcttggttcaaagcaagcaaacggttgtgcgcttatataagctgtcagcagttgcgagaagttgatacatcaaaaatactagcagagtgtctaccgtcgaatcctggacaagaggaactggcaaaggatctttatgttcctcgagtggaggataagaaccgtaacatgaggatgctcaaaatcaccaccatggatgatttagttaagaattcaatgaacattctggaaccatcgcctgtggatgctactgggaacaatcgtgaagatgtattgtcatcattgtctcctgttgatctttttttattgccgggacaagcttttgatagaactggtcgaagactggggcgtggtggagggtatgattacatagtaaaattacatttgcctgtccggaattgatatctttcagggacaattcagaaaatacaatacactataagaaatgtgatcacaaactgtatgaatcccaaattttgtttcggttcaataatattgaagttttaataccttgctctggtaccagaagagtcgtttgtgatcatagcgacacttaccacctaagacagtaatcatatctttcagatgcaaaactcgtggaaaggttgattcatactcacataaactctttgtgtggctaagaaatcaagcatttctcatgacatctggattctgaaccaacaaacttgcaactgagagcttgtaacctggtcctgtggattggatccaggattcgatgtatgaacatgaattctgtatagttacatcttagaactttgaaagagtaaatccatgctggtgcggcataagacaataagcctatcactgtctggtttctttcttgattctgtatattgtgtaaaacgcctgagtacatgaaccccaaagatatattgttctactctaatggatggttaagtttatgctaaagtacacagctatgatttttgatttcttgaaaggtttttatgctgctatatgattgtttctttttccaaaattaaaaggtactatgacacattcttgctgaagtaccaagaacttgcaaaagagaaagggtggaaccagcctctcttagttgctctttcgtactcggtgcaaattatggacgagggcatcatcccagtcaattcaactgatgttcctattgatgctctggtctcatcgtccggtgttattccaataagtgctgcggcgttgcagaggatgcaatgaagttgattggcctctgtagccatgctttcacaacaagcaccttcttctgatccctggttgcactagcaaatacaccagcagatcaaggaaactgtctcttttttccccctcgtggctcctctcttgtatcatcttttacgttttaacagggtgaactggacgtctacatcttattccagccacttcagatttatttttgttgaggcatctgtagacaaatcttatttaggctttgttcggttaatcctgttaccccggttaatcctgttacccatggattagacgagattagaaaaaattaagaagaagtttaacttatttgagatttaaacccacccaatcctactcaattcatatggattgagagttaaccgaacaagtttttacttgtaac

SEQ ID NO: 219372 - DNA, 1375 bp, Zea Mays
cccacagttcggatcccggaggtgcaccgcggccggggcggcacacgagccggctagccgcgatggccgggcgagcgtaacgactgtctagtagtatgactgtacgagacacggcggtagtggcagctggcacgaagggagatgattaaaaataccgtggccacgctgatggtgcgcctccaccacctgcccctgccccgcgccgcgcccgctcccacctaccgttgcggccgccacctcgccctcgcgccccctctccctcggctgcgggcatcggccgccgtcatgtcaacggcggcggaacagacgatcgccgaccagaagcgcacgctgcgcgccgaggtgcgcagggcgctgaaggccctctctgccgaccagcgcgccagcgaagatctggctattcaaactacaatactggattcctcttggttcaaagcaagcaaacggttgtgcgcttatataagctgtcagcagttgcgagaagttgatacatcaaaaatactagcagagtgtctaccgtcgaatcctgaggaactggcaaaggatctttatgttcctcgagtggaggataagaaccgtaacatgaggatgctcaaaatcaccaccatggatgatttagttaagaattcaatgaacattctggaaccatcgcctgtggatgctactgggaacaatcgtgaagatgtattgtcatcattgtctcctgttgatctttttttattgccgggacaagcttttgatagaactggtcgaagactggggcgtggtggagggtactatgacacattcttgctgaagtaccaagaacttgcaaaagagaaagggtggaaccagcctctcttagttgctctttcgtactcggtgcaaattatggacgagggcatcatcccagtcaattcaactgatgttcctattgatgctctggtctcatcgtccggtgttattccaataagtgctgcggcgttgcagaggatgcaatgaagttgattggcctctgtagccatgctttcacaacaagcaccttcttctgatccctggttgcactagcaaatacaccagcagatcaaggaaactgtctcttttttccccctcgtggctcctctcttgtatcatcttttacgttttaacagggtgaactggacgtctacatcttattccagccacttcagatttatttttgttgaggcatctgtagacaaatcttatttaggctttgttcggttaatcctgttaccccggttaatcctgttacccatggattagacgagattagaaaaaattaagaagaagtttaacttatttgagatttaaacccacccaatcctactcaattcatatggattgagagttaaccgaacaagtttttacttgtaac

SEQ ID NO: 219373 - DNA, 1224 bp, Zea Mays
atgattaaaaataccgtggccacgctgatggtgcgcctccaccacctgcccctgccccgcgccgcgcccgctcccacctaccgttgcggccgccacctcgccctcgcgccccctctccctcggctgcgggcatcggccgccgtcatgtcaacggcggcggaacagacgatcgccgaccagaagcgcacgctgcgcgccgaggtgcgcagggcgctgaaggccctctctgccgaccagcgcgccagcgaagatctggctattcaaactacaatactggattcctcttggttcaaagcaagcaaacggttgtgcgcttatataagctgtcagcagttgcgagaagttgatacatcaaaaatactagcagagtgtctaccgtcgaatcctggacaagaggaactggcaaaggatctttatgttcctcgagtggaggataagaaccgtaacatgaggatgctcaaaatcaccaccatggatgatttagttaagaattcaatgaacattctggaaccatcgcctgtggatgctactgggaacaatcgtgaagatgtattgtcatcattgtctcctgttgatctttttttattgccggaactggtcgaagactggggcgtggtggagggtactatgacacattcttgctgaagtaccaagaacttgcaaaagagaaagggtggaaccagcctctcttagttgctctttcgtactcggtgcaaattatggacgagggcatcatcccagtcaattcaactgatgttcctattgatgctctggtctcatcgtccggtgttattccaataagtgctgcggcgttgcagaggatgcaatgaagttgattggcctctgtagccatgctttcacaacaagcaccttcttctgatccctggttgcactagcaaatacaccagcagatcaaggaaactgtctcttttttccccctcgtggctcctctcttgtatcatcttttacgttttaacagggtgaactggacgtctacatcttattccagccacttcagatttatttttgttgaggcatctgtagacaaatcttatttaggctttgttcggttaatcctgttaccccggttaatcctgttacccatggattagacgagattagaaaaaattaagaagaagtttaacttatttgagatttaaacccacccaatcctactcaattcatatggattgagagttaaccgaacaagtttttacttgtaac

SEQ ID NO: 219374 - DNA, 1882 bp, Zea Mays
atgattaaaaataccgtggccacgctgatggtgcgcctccaccacctgcccctgccccgcgccgcgcccgctcccacctaccgttgcggccgccacctcgccctcgcgccccctctccctcggctgcgggcatcggccgccgtcatgtcaacggcggcggaacagacgatcgccgaccagaagcgcacgctgcgcgccgaggtgcgcagggcgctgaaggccctctctgccgaccagcgcgccagcgaagatctggctattcaaactacaatactggattcctcttggttcaaagcaagcaaacggttgtgcgcttatataagctgtcagcagttgcgagaagttgatacatcaaaaatactagcagagtgtctaccgtcgaatcctgaggaactggcaaaggatctttatgttcctcgagtggaggataagaaccgtaacatgaggatgctcaaaatcaccaccatggatgatttagttaagaattcaatgaacattctggaaccatcgcctgtggatgctactgggaacaatcgtgaagatgtattgtcatcattgtctcctgttgatctttttttattgccgggacaagcttttgatagaactggtcgaagactggggcgtggtggagggtatgattacatagtaaaattacatttgcctgtccggaattgatatctttcagggacaattcagaaaatacaatacactataagaaatgtgatcacaaactgtatgaatcccaaattttgtttcggttcaataatattgaagttttaataccttgctctggtaccagaagagtcgtttgtgatcatagcgacacttaccacctaagacagtaatcatatctttcagatgcaaaactcgtggaaaggttgattcatactcacataaactctttgtgtggctaagaaatcaagcatttctcatgacatctggattctgaaccaacaaacttgcaactgagagcttgtaacctggtcctgtggattggatccaggattcgatgtatgaacatgaattctgtatagttacatcttagaactttgaaagagtaaatccatgctggtgcggcataagacaataagcctatcactgtctggtttctttcttgattctgtatattgtgtaaaacgcctgagtacatgaaccccaaagatatattgttctactctaatggatggttaagtttatgctaaagtacacagctatgatttttgatttcttgaaaggtttttatgctgctatatgattgtttctttttccaaaattaaaaggtactatgacacattcttgctgaagtaccaagaacttgcaaaagagaaagggtggaaccagcctctcttagttgctctttcgtactcggtgcaaattatggacgagggcatcatcccagtcaattcaactgatgttcctattgatgctctggtctcatcgtccggtgttattccaataagtgctgcggcgttgcagaggatgcaatgaagttgattggcctctgtagccatgctttcacaacaagcaccttcttctgatccctggttgcactagcaaatacaccagcagatcaaggaaactgtctcttttttccccctcgtggctcctctcttgtatcatcttttacgttttaacagggtgaactggacgtctacatcttattccagccacttcagatttatttttgttgaggcatctgtagacaaatcttatttaggctttgttcggttaatcctgttaccccggttaatcctgttacccatggattagacgagattagaaaaaattaagaagaagtttaacttatttgagatttaaacccacccaatcctactcaattcatatggattgagagttaaccgaacaagtttttacttgtaac

SEQ ID NO: 219375 - DNA, 1187 bp, Zea Mays
catcagaatccagaatccacataccggcccatttacagcaaggaaccgcgaagcccaagctcgtcttctttcttggaagaggggccgcttcactcgactgaaagcgcaatcaactctagtctctagccacaactcgaagtacgagtaactccggagtccggatggctgcagcgatggacgtcgacgaagccggcggcgaggagaggcgaccgtcagagaaggagctcttccgcgccgctgagtccggcgacgccgccgcgttcgcctccctcgcccccgccgacctctccctgcgcaacgaggacggccgctccctcctccacgtcgccgccgctgccgggcatccccaggtggtgctcgcgcttgcccagtgcggtggtgacgccgcggctagcgtgctgaatgcgcaggacgaggaggggtgggcgccgatccactccgccgcgagctccggcaactctcaaatcgtcgacatcctgcttgagcgagggaggcttaacatagctgaaaaactaatagcccatggtgctaatgtcaacaagaaagacaagtttggctgcacacctttgcatagagctgcaagcactggaaacgcggagctgtgtgaattcctcattgaggaaggtgctgaagttgatgctgttgacaagacaggacaaacacctcttacgcatgctgttatatgtgagaacaaaggggctgctcttctgctaattagacatggtgctgatgttgatgtcgaggacaaggaaggctacactgcccttggccgagcatcgaacagcttcagacctgtactcatcgatgcagccagggcaatgctcgaaggatgatctggtgctctgctcaaagacgatggaaagtgtgatacgagaaactgtgctgagtcgaggtgttaaagcttgttctggtgtgtaaacaaaggggctctctacagaatcagatttgaccctgctagaattttgcccttgttgggtttatttaaccattgtgactaacatctcataagctaagctttggttctcccttctctctttcttttatgtctgttcatgatggcgtatcaggctatcagctaacagatcggtgactgtcacacccggctttaaggaacaaagccaggtgcatctcatacatctcatctttttgaattcaaacttgaatttggatttggttatgagttcctc

SEQ ID NO: 219376 - DNA, 2600 bp, Zea Mays
gcggatcctacggtcccatcccaatcgtaaatcgcgcgccgtcccgatcatcctgactcttctgtctctgcctcgtgcgctgtccgtgcccggtttttattgcgcttctattctggtctccaagccggtgacggtgaaccgatcaccacacaccaagccaaccccgcttctattccgcgtggacatatcgacaagacagccagcggcgagaagtcgacgccggcagtctggtgcaacacagcgatccagtaggtaggtcaaaccgaggcggcgacgaagtacgaacagagggcaggacgcagtcagcgcggcgcgcccaggccccgaggccgagcgatctggtgacggcacggcagcatggccgaggcgacgggccacggcggccgcgtcgtcgacctctcgggggccgagatccgcggggacctcgaggatcgcaacccgcccatcttcctccctcgccagcccgccgcgtccccgctcctcgccctcgacatcggagggactctgatcaagctggtgtacacggcgagccgcggcggaggggccgacgggacggacctgcgcttcgccaagttcgagaggcgacgcctacaggagtgcttcaacttcatccgggcggaggggctcctcgccagcaatgctggcggagaaggcgtgaccctgaaggctacaggtggtggagcatataaatttgctgacgatttcctggagaaactaggtgtttgtcttgacaagcttgatgaaatggatagtgtcgtttctggagcaaactttttgttgcagagtattcctggcgcagccttcacacacatgaatggactgaggaatccagtagatgtttccccaaataatttgtttccttaccttcttgtcaatattggctcaggagttagtatactgaaggttgcacttcttcactggggtactttttgaaagttcattacaatgtaactcatgtgaccgtatgttgttaagtataatgtaggttactggaaacagaaagtttgaaagggtaactgggacgcacattggtggtggtaccatgtttggtttagcaaaacttttaacaggctgtaagagctatgatgaattcttgcaattaagccagaaaggggacaactttgttcttgatttaattgtcaaggatatatgtggagagcttgtctgccagaagcaagggctttcaacatcaactcttgcttctagctttgggaaagttattacttctaagaagaagctgacagactacaagcctgaagaccttgcatccacattgttgagcgcctttacctataacattgcacaaagccaaatgcaagcagtatttttgcgacatgaagggtatttgggagcacttggtgccctgatgagttatggggatccaagtggtgaaaatcttaccctcgaggagaaggagcctcatcacgaatcagcaccagttgatgggacatcagcggatgaagagagtgatagcaacatatttccttaccttcttgtaaatattggatcaggtgtcagcatgatagaggtaattggtaagggaaagtttgaaagaattataggatcccatctaggcggcggtactatccttggtcttgctaggcttttgactggttgttcaagttacgaagaattcctggagttgagccagaggggcaataatctgtctgtcgatttgactgtgggggacatatatggggaagaaggttatccgaagattggccttccagcatccactactgcggctagctttggaaaagtgaactcaagcaaactttctgagtataaagtagaggatcttgctgcagccttactgaattctttcacatacaacattggacagatagcctactttgtggctaatctttcaggcctgaagagaattttcttccgaggtgcttatgtctgtggtcatgagaagactatggacaagatttctcgttccctaaaatattggtccaaaggtgaagttcagacgacatttctatgccatgaagggttcttgggaacactaggtgcattttggagttatgagaacatggggatcgacagtttggcggcacatgaagtcatcagggaagtcttgcttggtgcaccatacacagggcaattcccatctttacctgtcactcaacaacaggagaatggagaacatggtactctcgaaggggaagtagaaagcttacgacatgacaatgccttgctgaaggctgaggttgagcgattacaaaaggagaatgcgttgctaagagctaagttggtaagatcaggcgagacttcaacattgtgatttgtaacacaataaaaagggcgagccgcagcttgttgtaaattttatctgtttagaaaatggctcaaaatgtaactcatataggaaaactgaattctggaaaagaaatgccaattagcattgttcatctagtgagccttgttgtataattatttatatattctttatacaagagcctatgtatttgctccgttcatgtaatcttgttcctgtaaatgttgtataaatagttaccaaaatccagtaagtatccggctttgtaattttgtcgaaatagtagtgtatgtttccaagttccctttggaaaaaa

SEQ ID NO: 219377 - DNA, 1131 bp, Zea Mays
tattttttggccgtccaacggtagcgaaaacttaaaccttggtaacaaatcagttccatcagcatcgccatgacccatgattgaagcacactataaccaatgagttccacatctccacagccacgagccataacggatcaattccccatcagcgtagccacgattgaagcgcgccatgatctcggttgatgaatagtggaatccatcatactgcagttttgcaatcttctcttgggagtcgcgtcgtagctccatgtttttgttgtagatctccgtgctcgatgcaaaaatccggcgtgcgcagcggaccaacaggcgcggaaacaacggatacaggaacacggaacaagatgagggaggagaccccggggccaaaaacatcaacccccgtgcgatctcctcccccggcacacaataatcatctttttattaatacctggcctgccatgcgagcgcacccatcatggcaaaggcctcctctaggatgtcacatctttttttctcttttttgctgtcgacgcacgcagacttttacatgctgcagcttacctcgcctcttccaggcggcatatctcatagatctactaataattatcgaaattgatccaataattatcagcgcagagacatcatccatcgaggtgaagcaggactgcagaccaagagatcccgccgcctccagccatcgtcgcctcagatccgctccgaaccgaacgacgacgacgacgacgacttagaaatttctccagatctggaaccagaagcagaacatgcgatgctcgaccaccaaaacaaaacaacatgaaccttgaaggcaaggactaaccgatacaggatccaacgcgggtttgttgttttctcccagtcctagctctattcaagcccgtaagatgccgaatccagcaatcagatctgagcctgcataacatgaagcaaacggatttcctgataaatcaaaacaaagtagctcaccgagagcactcgcgaggcaaggtatcaaggaggacggccatccaggatctggaggacgagatgaggttgcgtgcaggaggggaacgcgtccaacaatggtttgttcttggttatcgacgaataattggcggaaacaaatgtatttatggtaccctctcc

SEQ ID NO: 219378 - DNA, 3092 bp, Zea Mays
ccacgccgctgcgcttccgatgcaaccctaaccacctcatcgccggcacgatcttccccgcccccactccccggctattgcctctgattggcggctctccgggattcacgttggtccggggtacggctcctgcgattttcacgcaatggagcaagatcagagcgtggttgtcggcagcgcggactctggtgctgcggcttttggttttgcgactggcaacccccctagcttggctgtgaccggcggaagcgccgtggcccccgacggtggagctcaggcagctgatgcctctgcgtaccaggccgagcacacggcgttgaatgggactgtcggcgatatgggtaattacccatctacaggagctgcagagaacggcgaagccgtccccaacgagacgggcgagccggttcctgagctatcgtacgaagaagaagaggctaggttatggagtgttgttaccgcgaattccttagattttaatgcctggaccgcacttattgaggaaacagagaaaaatgctgagaacaatattttgaagatacggaaagtgtatgattcgtttcttgcggaattccctctttgctttgggtattggaagaaatatgctgaccatgaagcgagacttgatggtgtgagtaaagttatagaggtgtatgaacgagcagttctcgcagttacttattcagtggacatttggtataactattgtcagtttgcaatttcaacatatgatgattcagatatcatacgaagactgtttgaacgtggcttggcatatgttggaacagattatcattccaatattttgtgggatgagtatattaagtatgaagagtcactggaggcttggagtcatctagctgatatatatacaagagtattggagcatcccatccagcagcttgatcggtattttaattgcctcaaggaattggcttcgaagcacagtttatcagaaatacttactgcagaagaagcctcgttgtatgttgtcacatctgagaccactgctcaagcgcctgatggtgaggcacatcctgatgatgttgataagcttggtcaaccagaaatttcgtcttcaacagacgcagaaagccttgcaaagtatgtctccatgagggaagagatgtacaggaaggctaaagagtatgaatctaagatcattggttttgagctagctattagaaggccatattttcatgtcaagcctcttgacaatccagagcttgaaaattggcataactaccttgactacatcgagaaggaagaagacattaataagtatttggacgaagcttcctttgtaatgggatattgaactgaggatagagcgtggacataatgtttggtttcgatgaggtatttgcttaatgctcaccttcttaaccatctatctatcgagcaggatggtccctcctttcttatggaggggcctccgtaatcagctaatggagttataaaattgtatgaaaggtgtgtgattgcatgtgctagttattcagaattctggatccgctatgtgcaatgtatggaggataaaaggagtctagacctagcaaacaatgccctggctcgtgctactcatgtgtttgtcaagaagcagccggagatccatctgtttagtgcgcgctttaaggagcttaatggcgatatttttggagcacgtgcagaatatcagcatctgtattcagatttatgccctggctttctagaggccattgtgaagcattctaatatggaacaccgactgggagataaagaattgtcctgttcagtttatgaaaaggtcatcgctgctgagaagggaaaggaacagagccagctcttaccaacattgcttattcagtactcccgtttcttatttttggccatcagagacttggagaaggcaagggagatattaactgtgctgcatgagcagttaaatttaacaaaaccagtgcttgaggctgtcatccatctagagtcgatttttccatgcgaaaagcgtattgaatttttagactcacttgtggagaagtttgttacacctgaatcatctcagggagagttggcaagtctagttgacaaagaagaaatatcttccatatttttagagtttttggatctctttggtgatgcaaagtcaatcaggaaggcttcaactcggcatacaactcttttttcatgtaagagaagcattctgccatcaaagaaacggaaggctgatgatgctgttgtgtcagacagggacaagtttgctaaaactgggtctgttcagtcagccacaggaactgatccaaatgcttccaatcctcctgtttggcctgcgacttctgaaacatctggacatcaatggggagcttcttatgctcagcaggctgcatatcctgcatatggaacttatgactacagccatcaaatgccacagcctgctcctcaaacagctgcctatggcgcttatcctccaacatactctgttcaggcctatacacaacaaagctacacacaacctgcagcaattccggcagcaccagtgccagcagtggtaccagcacctacaccggcgtcagcttaccctcagcaacctgcggcagctcctcaaccttattatggaacaacctactactgacaagtagagtaatcttcgatggcgatctgacgagcctgttaatcagcaggtttgtcgatacgaggtcaaaggcatcacaaaaccctctgtactgccattgtttagccccccttcagacagatgccgtcgacgagatgatcacttgagaacaaatttgagattggtatagtctgcatttttgtcgttagcatgtgtcgctagggattgctattgtttttcttgtaatagcataatctttactgtagaagaggcagcgggtgctaaccaatcctatgaacatataattaacattattcactgtttcatgccacctttcggagtgctttttttttcaaccactgatgatagcgggattcctgtcaagcacgctcactggtgaagtcctcggaacaaaattgtcaagatctgcgactacacagttcactgatttctactgtcactgtaggtcaaactatcttgatttgactaatttggaagggag

SEQ ID NO: 219379 - DNA, 3265 bp, Zea Mays
cctcgggctctctttacccatctccagtcctccaaccccaatcctctcctttccatccacgccgctgcgcttccgatgcaaccctaaccacctcatcgccggcacgatcttccccgcccccactccccggctattgcctctgattggcggctctccgggattcacgttggtccggggtacggctcctgcgattttcacgcaatggagcaagatcagagcgtggttgtcggcagcgcggactctggtgctgcggcttttggttttgcgactggcaacccccctagcttggctgtgaccggcggaagcgccgtggcccccgacggtggagctcaggcagctgatgcctctgcgtaccaggccgagcacacggcgttgaatgggactgtcggcgatatgggtaattacccatctacaggagctgcagagaacggcgaagccgtccccaacgagacgggcgagccggttcctgagctatcgtacgaagaagccgtgctttcagcagaagaggctaggttatggagtgttgttaccgcgaattccttagattttaatgcctggaccgcacttattgaggaaacagagaaaaatgctgagaacaatattttgaagatacggaaagtgtatgattcgtttcttgcggaattccctctttgctttgggtattggaagaaatatgctgaccatgaagcgagacttgatggtgtgagtaaagttatagaggtgtatgaacgagcagttctcgcagttacttattcagtggacatttggtataactattgtcagtttgcaatttcaacatatgatgattcagatatcatacgaagactgtttgaacgtggcttggcatatgttggaacagattatcattccaatattttgtgggatgagtatattaagtatgaagagtcactggaggcttggagtcatctagctgatatatatacaagagtattggagcatcccatccagcagcttgatcggtattttaattgcctcaaggaattggcttcgaagcacagtttatcagaaatacttactgcagaagaagcctcgttgtatgttgtcacatctgagaccactgctcaagcgcctgatggtgaggcacatcctgatgatgttgataagcttggtcaaccagaaatttcgtcttcaacagacgcagaaagccttgcaaagtatgtctccatgagggaagagatgtacaggaaggctaaagagtatgaatctaagatcattggttttgagctagctattagaaggccatattttcatgtcaagcctcttgacaatccagagcttgaaaattggcataactaccttgactacatcgagaaggaagaagacattaataagtatttggacgaagcttcctttgtaatgggatattgaactgaggatagagcgtggacataatgtttggtttcgatgaggctaagtatttgcttaatgctcaccttcttaaccatctatctatcgagcaggatggtccctcctttcttatggaggggcctccgtaatcagctaatggagttataaaattgtatgaaaggtgtgtgattgcatgtgctagttattcagaattctggatccgctatgtgcaatgtatggaggataaaaggagtctagacctagcaaacaatgccctggctcgtgctactcatgtgtttgtcaagaagcagccggagatccatctgtttagtgcgcgctttaaggagcttaatggcgatatttttggagcacgtgcagaatatcagcatctgtattcagatttatgccctggctttctagaggccattgtgaagcattctaatatggaacaccgactgggagataaagaattgtcctgttcagtttatgaaaaggtcatcgctgctgagaagggaaaggaacagagccagctcttaccaacattgcttattcagtactcccgtttcttatttttggccatcagagacttggagaaggcaagggagatattaactgtgctgcatgagcagttaaatttaacaaaaccagtgcttgaggctgtcatccatctagagtcgatttttccatgcgaaaagcgtattgaatttttagactcacttgtggagaagtttgttacacctgaatcatctcagggagagttggcaagtctagttgacaaagaagaaatatcttccatatttttagaggtaacacaatagaagttgtatatagatgtggaactctccttaaagtcaaagttacaattaatcctgatgatctatgtatgcacaactatcaaatatgtttttggatctctttggtgatgcaaagtcaatcaggaaggcttcaactcggcatacaactcttttttcatgtaagagaagcattctgccatcaaagaaacggaaggctgatgatgctgttgtgtcagacagggacaagtttgctaaaactgggtctgttcagtcagccacaggaactgatccaaatgcttccaatcctcctgtttggcctgcgacttctgaaacatctggacatcaatggggagcttcttatgctcagcaggctgcatatcctgcatatggaacttatgactacagccatcaaatgccacagcctgctcctcaaacagctgcctatggcgcttatcctccaacatactctgttcaggcctatacacaacaaagctacacacaacctgcagcaattccggcagcaccagtgccagcagtggtaccagcacctacaccggcgtcagcttaccctcagcaacctgcggcagctcctcaaccttattatggaacaacctactactgacaagtagagtaatcttcgatggcgatctgacgagcctgttaatcagcaggtttgtcgatacgaggtcaaaggcatcacaaaaccctctgtactgccattgtttagccccccttcagacagatgccgtcgacgagatgatcacttgagaacaaatttgagattggtatagtctgcatttttgtcgttagcatgtgtcgctagggattgctattgtttttcttgtaatagcataatctttactgtagaagaggcagcgggtgctaaccaatcctatgaacatataattaacattattcactgtttcatgccacctttcggagtgctttttttttcaaccactgatgatagcgggattcctgtcaagcacgctcactggtgaagtcctcggaacaaaattgtcaagatctgcgactacacagttcactgatttctactgtcactgtaggtcaaactatcttgatttgactaatttggaagggag

SEQ ID NO: 219380 - DNA, 3074 bp, Zea Mays
cctcgggctctctttacccatctccagtcctccaaccccaatcctctcctttccatccacgccgctgcgcttccgatgcaaccctaaccacctcatcgccggcacgatcttccccgcccccactccccggctattgcctctgattggcggctctccgggattcacgttggtccggggtacggctcctgcgattttcacgcaatggagcaagatcagagcgtggttgtcggcagcgcggactctggtgctgcggcttttggttttgcgactggcaacccccctagcttggctgtgaccggcggaagcgccgtggcccccgacggtggagctcaggcagctgatgcctctgcgtaccaggccgagcacacggcgttgaatgggactgtcggcgatatgggtaattacccatctacaggagctgcagagaacggcgaagccgtccccaacgagacgggcgagccggttcctgagctatcgtacgaagaagccgtgctttcagcagaagaggctaggttatggagtgttgttaccgcgaattccttagattttaatgcctggaccgcacttattgaggaaacagagaaaaatgctgagaacaatattttgaagatacggaaagtgtatgattcgtttcttgcggaattccctctttgctttgggtattggaagaaatatgctgaccatgaagcgagacttgatggtgtgagtaaagttatagaggtgtatgaacgagcagttctcgcagttacttattcagtggacatttggtataactattgtcagtttgcaatttcaacatatgatgattcagatatcatacgaagactgtttgaacgtggcttggcatatgttggaacagattatcattccaatattttgtgggatgagtatattaagtatgaagagtcactggaggcttggagtcatctagctgatatatatacaagagtattggagcatcccatccagcagcttgatcggtattttaattgcctcaaggaattggcttcgaagcacagtttatcagaaatacttactgcagaagaagcctcgttgtatgttgtcacatctgagaccactgctcaagcgcctgatggtgaggcacatcctgatgatgttgataagcttggtcaaccagaaatttcgtcttcaacagacgcagaaagccttgcaaagtatgtctccatgagggaagagatgtacaggaaggctaaagagtatgaatctaagatcattggttttgagctagctattagaaggccatattttcatgtcaagcctcttgacaatccagagcttgaaaattggcataactaccttgactacatcgagaaggaagaagacattaataagtatttggacgaagcttcctttgtaatgggatattgaactgaggatagagcgtggacataatgtttggtttcgatgaggctaagttataaaattgtatgaaaggtgtgtgattgcatgtgctagttattcagaattctggatccgctatgtgcaatgtatggaggataaaaggagtctagacctagcaaacaatgccctggctcgtgctactcatgtgtttgtcaagaagcagccggagatccatctgtttagtgcgcgctttaaggagcttaatggcgatatttttggagcacgtgcagaatatcagcatctgtattcagatttatgccctggctttctagaggccattgtgaagcattctaatatggaacaccgactgggagataaagaattgtcctgttcagtttatgaaaaggtcatcgctgctgagaagggaaaggaacagagccagctcttaccaacattgcttattcagtactcccgtttcttatttttggccatcagagacttggagaaggcaagggagatattaactgtgctgcatgagcagttaaatttaacaaaaccagtgcttgaggctgtcatccatctagagtcgatttttccatgcgaaaagcgtattgaatttttagactcacttgtggagaagtttgttacacctgaatcatctcagggagagttggcaagtctagttgacaaagaagaaatatcttccatatttttagagtttttggatctctttggtgatgcaaagtcaatcaggaaggcttcaactcggcatacaactcttttttcatgtaagagaagcattctgccatcaaagaaacggaaggctgatgatgctgttgtgtcagacagggacaagtttgctaaaactgggtctgttcagtcagccacaggaactgatccaaatgcttccaatcctcctgtttggcctgcgacttctgaaacatctggacatcaatggggagcttcttatgctcagcaggctgcatatcctgcatatggaacttatgactacagccatcaaatgccacagcctgctcctcaaacagctgcctatggcgcttatcctccaacatactctgttcaggcctatacacaacaaagctacacacaacctgcagcaattccggcagcaccagtgccagcagtggtaccagcacctacaccggcgtcagcttaccctcagcaacctgcggcagctcctcaaccttattatggaacaacctactactgacaagtagagtaatcttcgatggcgatctgacgagcctgttaatcagcaggtttgtcgatacgaggtcaaaggcatcacaaaaccctctgtactgccattgtttagccccccttcagacagatgccgtcgacgagatgatcacttgagaacaaatttgagattggtatagtctgcatttttgtcgttagcatgtgtcgctagggattgctattgtttttcttgtaatagcataatctttactgtagaagaggcagcgggtgctaaccaatcctatgaacatataattaacattattcactgtttcatgccacctttcggagtgctttttttttcaaccactgatgatagcgggattcctgtcaagcacgctcactggtgaagtcctcggaacaaaattgtcaagatctgcgactacacagttcactgatttctactgtcactgtaggtcaaactatcttgatttgactaatttggaagggag

SEQ ID NO: 219381 - DNA, 3106 bp, Zea Mays
gcttgccagccgcaggccctcgggctctctttacccatctccagtcctccaaccccaatcctctcctttccatccacgccgctgcgcttccgatgcaaccctaaccacctcatcgccggcacgatcttccccgcccccactccccggctattgcctctgattggcggctctccgggattcacgttggtccggggtacggctcctgcgattttcacgcaatggagcaagatcagagcgtggttgtcggcagcgcggactctggtgctgcggcttttggttttgcgactggcaacccccctagcttggctgtgaccggcggaagcgccgtggcccccgacggtggagctcaggcagctgatgcctctgcgtaccaggccgagcacacggcgttgaatgggactgtcggcgatatgggtaattacccatctacaggagctgcagagaacggcgaagccgtccccaacgagacgggcgagccggttcctgagctatcgtacgaagaagccgtgctttcagcagaagaggctaggttatggagtgttgttaccgcgaattccttagattttaatgcctggaccgcacttattgaggaaacagagaaaaatgctgagaacaatattttgaagatacggaaagtgtatgattcgtttcttgcggaattccctctttgctttgggtattggaagaaatatgctgaccatgaagcgagacttgatggtgtgagtaaagttatagaggtgtatgaacgagcagttctcgcagttacttattcagtggacatttggtataactattgtcagtttgcaatttcaacatatgatgattcagatatcatacgaagactgtttgaacgtggcttggcatatgttggaacagattatcattccaatattttgtgggatgagtatattaagtatgaagagtcactggaggcttggagtcatctagctgatatatatacaagagtattggagcatcccatccagcagcttgatcggtattttaattgcctcaaggaattggcttcgaagcacagtttatcagaaatacttactgcagaagaagcctcgttgtatgttgtcacatctgagaccactgctcaagcgcctgatggtgaggcacatcctgatgatgttgataagcttggtcaaccagaaatttcgtcttcaacagacgcagaaagccttgcaaagtatgtctccatgagggaagagatgtacaggaaggctaaagagtatgaatctaagatcattggttttgagctagctattagaaggccatattttcatgtcaagcctcttgacaatccagagcttgaaaattggcataactaccttgactacatcgagaaggaagaagacattaataaggttataaaattgtatgaaaggtgtgtgattgcatgtgctagttattcagaattctggatccgctatgtgcaatgtatggaggataaaaggagtctagacctagcaaacaatgccctggctcgtgctactcatgtgtttgtcaagaagcagccggagatccatctgtttagtgcgcgctttaaggagcttaatggcgatatttttggagcacgtgcagaatatcagcatctgtattcagatttatgccctggctttctagaggccattgtgaagcattctaatatggaacaccgactgggagataaagaattgtcctgttcagtttatgaaaaggtcatcgctgctgagaagggaaaggaacagagccagctcttaccaacattgcttattcagtactcccgtttcttatttttggccatcagagacttggagaaggcaagggagatattaactgtgctgcatgagcagttaaatttaacaaaaccagtgcttgaggctgtcatccatctagagtcgatttttccatgcgaaaagcgtattgaatttttagactcacttgtggagaagtttgttacacctgaatcatctcagggagagttggcaagtctagttgacaaagaagaaatatcttccatatttttagaggtaacacaatagaagttgtatatagatgtggaactctccttaaagtcaaagttacaattaatcctgatgatctatgtatgcacaactatcaaatatgtttttggatctctttggtgatgcaaagtcaatcaggaaggcttcaactcggcatacaactcttttttcatgtaagagaagcattctgccatcaaagaaacggaaggctgatgatgctgttgtgtcagacagggacaagtttgctaaaactgggtctgttcagtcagccacaggaactgatccaaatgcttccaatcctcctgtttggcctgcgacttctgaaacatctggacatcaatggggagcttcttatgctcagcaggctgcatatcctgcatatggaacttatgactacagccatcaaatgccacagcctgctcctcaaacagctgcctatggcgcttatcctccaacatactctgttcaggcctatacacaacaaagctacacacaacctgcagcaattccggcagcaccagtgccagcagtggtaccagcacctacaccggcgtcagcttaccctcagcaacctgcggcagctcctcaaccttattatggaacaacctactactgacaagtagagtaatcttcgatggcgatctgacgagcctgttaatcagcaggtttgtcgatacgaggtcaaaggcatcacaaaaccctctgtactgccattgtttagccccccttcagacagatgccgtcgacgagatgatcacttgagaacaaatttgagattggtatagtctgcatttttgtcgttagcatgtgtcgctagggattgctattgtttttcttgtaatagcataatctttactgtagaagaggcagcgggtgctaaccaatcctatgaacatataattaacattattcactgtttcatgccacctttcggagtgctttttttttcaaccactgatgatagcgggattcctgtcaagcacgctcactggtgaagtcctcggaacaaaattgtcaagatctgcgactacacagttcactgatttctactgtcactgtaggtcaaactatcttgatttgactaatttggaagggag

SEQ ID NO: 219382 - DNA, 3148 bp, Zea Mays
acgcccacagcccatgggctagctaacccttcgcgtgcgacgtcggcttgccagccgcaggccctcgggctctctttacccatctccagtcctccaaccccaatcctctcctttccatccacgccgctgcgcttccgatgcaaccctaaccacctcatcgccggcacgatcttccccgcccccactccccggctattgcctctgattggcggctctccgggattcacgttggtccggggtacggctcctgcgattttcacgcaatggagcaagatcagagcgtggttgtcggcagcgcggactctggtgctgcggcttttggttttgcgactggcaacccccctagcttggctgtgaccggcggaagcgccgtggcccccgacggtggagctcaggcagctgatgcctctgcgtaccaggccgagcacacggcgttgaatgggactgtcggcgatatgggtaattacccatctacaggagctgcagagaacggcgaagccgtccccaacgagacgggcgagccggttcctgagctatcgtacgaagaagccgtgctttcagcagaagaggctaggttatggagtgttgttaccgcgaattccttagattttaatgcctggaccgcacttattgaggaaacagagaaaaatgctgagaacaatattttgaagatacggaaagtgtatgattcgtttcttgcggaattccctctttgctttgggtattggaagaaatatgctgaccatgaagcgagacttgatggtgtgagtaaagttatagaggtgtatgaacgagcagttctcgcagttacttattcagtggacatttggtataactattgtcagtttgcaatttcaacatatgatgattcagatatcatacgaagactgtttgaacgtggcttggcatatgttggaacagattatcattccaatattttgtgggatgagtatattaagtatgaagagtcactggaggcttggagtcatctagctgatatatatacaagagtattggagcatcccatccagcagcttgatcggtattttaattgcctcaaggaattggcttcgaagcacagtttatcagaaatacttactgcagaagaagcctcgttgtatgttgtcacatctgagaccactgctcaagcgcctgatggtgaggcacatcctgatgatgttgataagcttggtcaaccagaaatttcgtcttcaacagacgcagaaagccttgcaaagtatgtctccatgagggaagagatgtacaggaaggctaaagagtatgaatctaagatcattggttttgagctagctattagaaggccatattttcatgtcaagcctcttgacaatccagagcttgaaaattggcataactaccttgactacatcgagaaggaagaagacattaataaggtatttgcttaatgctcaccttcttaaccatctatctatcgagcaggatggtccctcctttcttatggaggggcctccgtaatcagctaatggagttataaaattgtatgaaaggtgtgtgattgcatgtgctagttattcagaattctggatccgctatgtgcaatgtatggaggataaaaggagtctagacctagcaaacaatgccctggctcgtgctactcatgtgtttgtcaagaagcagccggagatccatctgtttagtgcgcgctttaaggagcttaatggcgatatttttggagcacgtgcagaatatcagcatctgtattcagatttatgccctggctttctagaggccattgtgaagcattctaatatggaacaccgactgggagataaagaattgtcctgttcagtttatgaaaaggtcatcgctgctgagaagggaaaggaacagagccagctcttaccaacattgcttattcagtactcccgtttcttatttttggccatcagagacttggagaaggcaagggagatattaactgtgctgcatgagcagttaaatttaacaaaaccagtgcttgaggctgtcatccatctagagtcgatttttccatgcgaaaagcgtattgaatttttagactcacttgtggagaagtttgttacacctgaatcatctcagggagagttggcaagtctagttgacaaagaagaaatatcttccatatttttagagtttttggatctctttggtgatgcaaagtcaatcaggaaggcttcaactcggcatacaactcttttttcatgtaagagaagcattctgccatcaaagaaacggaaggctgatgatgctgttgtgtcagacagggacaagtttgctaaaactgggtctgttcagtcagccacaggaactgatccaaatgcttccaatcctcctgtttggcctgcgacttctgaaacatctggacatcaatggggagcttcttatgctcagcaggctgcatatcctgcatatggaacttatgactacagccatcaaatgccacagcctgctcctcaaacagctgcctatggcgcttatcctccaacatactctgttcaggcctatacacaacaaagctacacacaacctgcagcaattccggcagcaccagtgccagcagtggtaccagcacctacaccggcgtcagcttaccctcagcaacctgcggcagctcctcaaccttattatggaacaacctactactgacaagtagagtaatcttcgatggcgatctgacgagcctgttaatcagcaggtttgtcgatacgaggtcaaaggcatcacaaaaccctctgtactgccattgtttagccccccttcagacagatgccgtcgacgagatgatcacttgagaacaaatttgagattggtatagtctgcatttttgtcgttagcatgtgtcgctagggattgctattgtttttcttgtaatagcataatctttactgtagaagaggcagcgggtgctaaccaatcctatgaacatataattaacattattcactgtttcatgccacctttcggagtgctttttttttcaaccactgatgatagcgggattcctgtcaagcacgctcactggtgaagtcctcggaacaaaattgtcaagatctgcgactacacagttcactgatttctactgtcactgtaggtcaaactatcttgatttgactaatttggaagggag

SEQ ID NO: 219383 - DNA, 3090 bp, Zea Mays
cttggacctaggcggcgtaacttggtccaacgcccacagcccatgggctagctaacccttcgcgtgcgacgtcggcttgccagccgcaggccctcgggctctctttacccatctccagtcctccaaccccaatcctctcctttccatccacgccgctgcgcttccgatgcaaccctaaccacctcatcgccggcacgatcttccccgcccccactccccggctattgcctctgattggcggctctccgggattcacgttggtccggggtacggctcctgcgattttcacgcaatggagcaagatcagagcgtggttgtcggcagcgcggactctggtgctgcggcttttggttttgcgactggcaacccccctagcttggctgtgaccggcggaagcgccgtggcccccgacggtggagctcaggcagctgatgcctctgcgtaccaggccgagcacacggcgttgaatgggactgtcggcgatatgggtaattacccatctacaggagctgcagagaacggcgaagccgtccccaacgagacgggcgagccggttcctgagctatcgtacgaagaagccgtgctttcagcagaagaggctaggttatggagtgttgttaccgcgaattccttagattttaatgcctggaccgcacttattgaggaaacagagaaaaatgctgagaacaatattttgaagatacggaaagtgtatgattcgtttcttgcggaattccctctttgctttgggtattggaagaaatatgctgaccatgaagcgagacttgatggtgtgagtaaagttatagaggtgtatgaacgagcagttctcgcagttacttattcagtggacatttggtataactattgtcagtttgcaatttcaacatatgatgattcagatatcatacgaagactgtttgaacgtggcttggcatatgttggaacagattatcattccaatattttgtgggatgagtatattaagtatgaagagtcactggaggcttggagtcatctagctgatatatatacaagagtattggagcatcccatccagcagcttgatcggtattttaattgcctcaaggaattggcttcgaagcacagtttatcagaaatacttactgcagaagaagcctcgttgtatgttgtcacatctgagaccactgctcaagcgcctgatggtgaggcacatcctgatgatgttgataagcttggtcaaccagaaatttcgtcttcaacagacgcagaaagccttgcaaagtatgtctccatgagggaagagatgtacaggaaggctaaagaagcttgaaaattggcataactaccttgactacatcgagaaggaagaagacattaataagtatttggacgaagcttcctttgtaatgggatattgaactgaggatagagcgtggacataatgtttggtttcgatgaggctaagtatttgcttaatgctcaccttcttaaccatctatctatcgagcaggatggtccctcctttcttatggaggggcctccgtaatcagctaatggagttataaaattgtatgaaaggtgtgtgattgcatgtgctagttattcagaattctggatccgctatgtgcaatgtatggaggataaaaggagtctagacctagcaaacaatgccctggctcgtgctactcatgtgtttgtcaagaagcagccggagatccatctgtttagtgcgcgctttaaggagcttaatggcgatatttttggagcacgtgcagaatatcagcatctgtattcagatttatgccctggctttctagaggccattgtgaagcattctaatatggaacaccgactgggagataaagaattgtcctgttcagtttatgaaaaggtcatcgctgctgagaagggaaaggaacagagccagctcttaccaacattgcttattcagtactcccgtttcttatttttggccatcagagacttggagaaggcaagggagatattaactgtgctgcatgagcagttaaatttaacaaaaccagtgcttgaggctgtcatccatctagagtcgatttttccatgcgaaaagcgtattgaatttttagactcacttgtggagaagtttgttacacctgaatcatctcagggagagttggcaagtctagttgacaaagaagaaatatcttccatatttttagagtttttggatctctttggtgatgcaaagtcaatcaggaaggcttcaactcggcatacaactcttttttcattcagccacaggaactgatccaaatgcttccaatcctcctgtttggcctgcgacttctgaaacatctggacatcaatggggagcttcttatgctcagcaggctgcatatcctgcatatggaacttatgactacagccatcaaatgccacagcctgctcctcaaacagctgcctatggcgcttatcctccaacatactctgttcaggcctatacacaacaaagctacacacaacctgcagcaattccggcagcaccagtgccagcagtggtaccagcacctacaccggcgtcagcttaccctcagcaacctgcggcagctcctcaaccttattatggaacaacctactactgacaagtagagtaatcttcgatggcgatctgacgagcctgttaatcagcaggtttgtcgatacgaggtcaaaggcatcacaaaaccctctgtactgccattgtttagccccccttcagacagatgccgtcgacgagatgatcacttgagaacaaatttgagattggtatagtctgcatttttgtcgttagcatgtgtcgctagggattgctattgtttttcttgtaatagcataatctttactgtagaagaggcagcgggtgctaaccaatcctatgaacatataattaacattattcactgtttcatgccacctttcggagtgctttttttttcaaccactgatgatagcgggattcctgtcaagcacgctcactggtgaagtcctcggaacaaaattgtcaagatctgcgactacacagttcactgatttctactgtcactgtaggtcaaactatcttgatttgactaatttggaagggag

SEQ ID NO: 219384 - DNA, 1611 bp, Zea Mays
ccgctcacgagcactgaaaaactgccaaaaccgagcgaaccacacaccccttgtcaacgctgtggcggcacggcaggcgatccaaggaaagcgatgacggcgtacgaccccaaagacgacgtcgaccgcctcttcgcctgcttcaaatgcggcgtctcccctcccaagtcggccttcagggagaggccgctcccgcaggccaagaagtcgcggggctcgcccgtgtcggagactgccggtagcggtggccggagctcctccgatgtttccaccacgccggatgccgcagcggacaaggtacaacgatatggattccaaaattcgccatcattatgaggttatccaggaggcttcgccttgccacatttactttgatcttgagtttgatacaagattgaacaagaagagagacacagatgaaatggtggatatattgattgctgttgtattcagtgctttgcgtgataaatattctattgaaggacatgaagagtggatcacagagctagactcatccactgaagaaaagttttcacgccatctaatcattcgtatacccaagattgcatttaaagacaactcccatgttggtgcgtttgtctgtgaggtctgttcacaaattgcagctcagcgtacaaccaatcatgaccttgataaactttatattacaaaagaaatcagctcagattcaaggaaggagctacaggcaccgcattgctacatatcaaaatgatttttctcatgcatatacttgtggaaaatctccttttccacctttggatggttttatagaatccatcgcttcttttggaaatgtttcagggaaaattcgatcttggttctggttttcacaggagagtttgataatctacaacatgttacgaagcagatactgtgagaatattggaagagagcataagggcaatcatgtgttttacattgttgatttccagagagcagcatactaccaaaagtgtcatgaccctgattgtcgaggttaccgttctcccctgcgtcctgtaccttgggatgtgattcctgagctagtggagtcagaccagatagaataccagggccatgccatggaaaccaacattgaaaacagcagcatgagcggtaaatcaatcacgggggctggtgctgaggatcctgaatggtgggaacaagtggtggaatttgcggacagcatcgagaacatggatcattctttggctaccttggaagtgaaatctgacgccagcatcgagaacatggatcatgctcccagcttgtgtgcctcggaagaaaacggttgttttgaagctgaccctgagtgggtgatgcacgcggaaagagccatggagcagtacgaggaacaaagcggaggatcgcagtcacacgcaacttcccaagtctttgatctcgaggatgtttaacagtagatgctgttctaaacaatttgaacagtgacttgtaaatatacgttttatgatatattttaatctaaaaatatgtagataaataataaaaatggatattatgaatgaagcagtgagaacataatctgtatacgtgttcatgttttaacatcgtgttaacataaacaatataaaacaagaagttttaggaagt

SEQ ID NO: 219385 - DNA, 2078 bp, Zea Mays
ccgctcacgagcactgaaaaactgccaaaaccgagcgaaccacacaccccttgtcaacgctgtggcggcacggcaggcgatccaaggaaagcgatgacggcgtacgaccccaaagacgacgtcgaccgcctcttcgcctgcttcaaatgcggcgtctcccctcccaagtcggccttcagggagaggccgctcccgcaggccaagaagtcgcggggctcgcccgtgtcggagactgccggtagcggtggccggagctcctccgatgtttccaccacgccggatgccgcagcggacaagcgcgcggcgccgtcgtcggccaaatctacaggccgcaagcacatgtccccattcgtgttctacggctccccgcggggcgtccaagtcaaaaggccgcagagcttcctgaggctgctgcacgtgatccgcattgatctcaagaagcaaaccgacttcaaccccagggatgttgtctgggctacatttcctaggcaagacgaggcgatcaggttctctaaggcatacgcacataccaatgtcttttgctatcaagagcatatgtccggtacgcgaaggttccttgtgtctacatacgacgagttctggaaaaggtacaacgatatggattccaaaattcgccatcattatgaggttatccaggagaaaagttttcacgccatctaatcattcgtatacccaagattgcatttaaagacaactcccatgttggtgcgtttgtctgtgaggtctgttcacaaattgcagctcagcgtacaaccaatcatgaccttgataaactttatattacaaaagaaatcagctcaggtcctgttgatcggctctttatggatactgcagtttactctcgtaatcgttgtttccgtttagttttctcatcaaagtctgggaagaaatcatttcttgtgccgaccaaacgtttcaaatgccaggaactgaatgataaagatgtctttatggagtcacttatttgtagactggatgataactgtgaaaaactgttgatatgcaaactagacttggaatgcaagaaaacattgcattttgactctgaaatcagcatgtctcaaattcaaggaaggagctacaggcaccgcattgctacatatcaaaatgatttttctcatgcatatacttgtggaaaatctccttttccacctttggatggttttatagaatccatcgcttcttttggaaatgtttcagggaaaattcgatcttggttctggttttcacaggagagtttgataatctacaacatgttacgaagcagatactgtgagaatattggaagagagcataagggcaatcatgtgttttacattgttgatttccagagagcagcatactaccaaaagtgtcatgaccctgattgtcgaggtaagcgagggccatctttgcagcgcaggcagattatccttagtcatgacatgaatgttttggagtaggttaccgttctcccctgcgtcctgtaccttgggatgtgattcctgagctagtggagtcagaccagatagaataccagggccatgccatggaaaccaacattgaaaacagcagcatgagcggtaaatcaatcacgggggctggtgctgaggatcctgaatggtgggaacaagtggtggaatttgcggacagcatcgagaacatggatcattctttggctaccttggaagtgaaatctgacgccagcatcgagaacatggatcatgctcccagcttgtgtgcctcggaagaaaacggttgttttgaagctgaccctgagtgggtgatgcacgcggaaagagccatggagcagtacgaggaacaaagcggaggatcgcagtcacacgcaacttcccaagtctttgatctcgaggatgtttaacagtagatgctgttctaaacaatttgaacagtgacttgtaaatatacgttttatgatatattttaatctaaaaatatgtagataaataataaaaatggatattatgaatgaagcagtgagaacataatctgtatacgtgttcatgttttaacatcgtgttaacataaacaatataaaacaagaagttttaggaagt

SEQ ID NO: 219386 - DNA, 1557 bp, Zea Mays
gccggctagactggtgcggtgcacgcaacgcaactgctaccagctgcaaccgcttctatatatatgccgagcctccaaggcacgcaaccgagcagtgcaagccaagcattctcctcacacacgtacttccgccagcgcagctagctatagctgttcgcctgttctcttctcgcgcgccatcatctctcgtctgtgatcaacgtcggcgcgcggccagcatggagatgatcgacgcggagctgcgtcttggcccgcccgggagcaacaacagcgacgtcgtcgtcaccgtcgtgccgcctgcagcggcgaggaaaccggcggcgccggcgccggcgtcggcggcgaaacggccgtcctcgtcggtggtgaagagcgacgacgcgtccgggacgggcgaccatgacgacgacgccgcaccggcctccaaggtgcgggcggtggggtggccgccggtgagagcgtaccggaagaacgcgttccacgcggcggcggaggcggcgaggaggaccaataataagggcgaggagctgcagggaggaggcggccgcctgtacgtgaaggtgagcatggacggggcgccctacctccgcaaggtcgacctgcggacctacggcggctaccgggagctgagggacgcgctggacgcgctcttcggctgcttctcctcctcctccgcctcctcctcctcggccgacggcggctgccagttcgccgtcgcctacgaggacaaggacggcgacctcatgctcgccggcgacgtgccctgggaaagctgaggatcatgagggggtccgaagcaagataaccaacgcaacaacgaggatgcaaaggacatgttggatgcatggcatgcatggaggtccagctagctatggtccgtccaactcatgcatgggacagagggagagagagagacagaaaaaaaaagggaggtctttatatctgtcattcactggaattggaggcgcggcgtagggtatatacctgcacaggggtcggaggccccatgcatgcatgcgcgcgtcgtcgtgttctacggccagcccagccggctcataccatacacaccatggacatgcacatgatcagatggagtggagcatggaggtgatggttcaaggatcacggcggcgtagtacacgtcacgccgtgtctcccgccaccagtcaggcggacgtgctgtggacggctgactggacgtgcatgcatgtcagatcggagattattcagccaagtagcatcggtgaaaagctactatctagaattttttttgtactgtgcacgctagctcatatgctgtagcttatgcttgctagcctatctgtaactttgagctcctcttttgtaagtgacctgggcccatgtatattagttcattctaggggtgcagccgcacccacgtaaaaaaataagaaacaatgtgggattagaaccaaatataattgccaccgctttattatatacttgtacgataagaaaaatcacacccacaagacaacgtctctcctcgatcgatctggttttcgctctaactccacccctggactggactggact

SEQ ID NO: 219387 - DNA, 1172 bp, Zea Mays
cttttactagttgagctaaataatctcggtatccgcacggcggcaagccaagcctatctcctatctccagcagctcctccagacctccacctctctatggcgcgcctgctcctcttcccatcccaagcgtgcgtcgatcctggccgccacctcctcctccacccgccggtctccaggccccgtgctgtccggtctgggcctcctcccgccgcgccacgccgcaccggggtcgtctctcttcccggccgttgcccaccgcccctttgctggaaccaccatccatttcttccttgaaggcagatcatcaaagagaggatgggtcgtttttgcttcagaaaacgtacaagaaatttcttctcaccttcctcgcaaggatgaaaggagaagtgggaatttgcttctgcgattcagtgcactcccatattgcactatggcttggttgagcactgctcaattagcacaatctagtgttggggaaaagctaaatatggtttatgaggtcggggagctgtttgagctgggaattcagctgtcttatctgctcatacttattggactgcttggagctggtacattttttgttatccgtcaggttcttgttcgtagggagcttgatctttctgccaaagagttgcaagaacaagtgagaagcggtgatgcaagtgctactgagtattttgagcttggagcagtcatgctacggagaaaattttatccagctgctatcaaatatctgcagcaagcaattgacaaatgggacagagacgagcaagatcttgcgcaggtctacaatgccctgggggtcagctacaagcgagagaacaaacttgacaaggcgattcagcagtttcagaaggccgtggagctccagccaggctatgtgacagcttggaacaacctgggtgacgcatatgagcagcagaaggacctgaaatcggctctcaaggccttcgaggaggtcctcctctttgatcccaacaacaaggttgcaaggccacgcgtcgatgacctcaggccgcgcgtgagcatgtacaagggtgtgcctgtaaaatccgaaaagcgatagctattcttttttggtggtaaatcatgcatctgtctagtccccagaatagcggttgtttatttttgaacggtagcatttgtaaacatgatgagatgtgtagtagcat

SEQ ID NO: 219388 - DNA, 1092 bp, Zea Mays
gccaagcctatctcctatctccagcagctcctccagacctccacctctctatggcgcgcctgctcctcttcccatcccaagcgtgcgtcgatcctggccgccacctcctcctccacccgccggtctccaggccccgtgctgtccggtctgggcctcctcccgccgcgccacgccgcaccggggtcgtctctcttcccggccgttgcccaccgcccctttgctggaaccaccatccatttcttccttatcatcaaagagaggatgggtcgtttttgcttcagaaaacgtacaaggatgaaaggagaagtgggaatttgcttctgcgattcagtgcactcccatattgcactatggcttggttgagcactgctcaattagcacaatctagtgttggggaaaagctaaatatggtttatgaggtcggggagctgtttgagctgggaattcagctgtcttatctgctcatacttattggactgcttggagctggtacattttttgttatccgtcaggttcttgttcgtagggagcttgatctttctgccaaagagttgcaagaacaagtgagaagcggtgatgcaagtgctactgagtattttgagcttggagcagtcatgctacggagaaaattttatccagctgctatcaaatatctgcagcaagcaattgacaaatgggacagagacgagcaagatcttgcgcaggtctacaatgccctgggggtcagctacaagcgagagaacaaacttgacaaggcgattcagcagtttcagaaggccgtggagctccagccaggctatgtgacagcttggaacaacctgggtgacgcatatgagcagcagaaggacctgaaatcggctctcaaggccttcgaggaggtcctcctctttgatcccaacaacaaggttgcaaggccacgcgtcgatgacctcaggccgcgcgtgagcatgtacaagggtgtgcctgtaaaatccgaaaagcgatagctattcttttttggtggtaaatcatgcatctgtctagtccccagaatagcggttgtttatttttgaacggtagcatttgtaaacatgatgagatgtgtagtagcat

SEQ ID NO: 219389 - DNA, 568 bp, Zea Mays
cgaggttgaacggttgaacccaggtgctcacaggaacaagtgagaagcggtgatgcaagtgctactgagtattttgagcttggagcagtcatgctacggagaaaattttatccagctgctatcaaatatctgcagcaagcaattgacaaatgggacagagacgagcaagatcttgcgcaggtctacaatgccctgggggtcagctacaagcgagagaacaaacttgacaaggcgattcagcagtttcagaaggccgtggagctccagccaggctatgtgacagcttggaacaacctgggtgacgcatatgagcagcagaaggacctgaaatcggctctcaaggccttcgaggaggtcctcctctttgatcccaacaacaaggttgcaaggccacgcgtcgatgacctcaggccgcgcgtgagcatgtacaagggtgtgcctgtaaaatccgaaaagcgatagctattcttttttggtggtaaatcatgcatctgtctagtccccagaatagcggttgtttatttttgaacggtagcatttgtaaacatgatgagatgtgtagtagcat

SEQ ID NO: 219390 - DNA, 597 bp, Zea Mays
ctctaatctctttctggattggtcacgggaatgggggatcggcgccattgccgtctctaccgaaaatccagacaaagcacgagctacgcacgcccccgctgcctcctttctgccgtcccaacgccgccggagtctgtcgccaccgtcgctgctctcccgccttcaccgcgcccaactctcgtccttgcctcccctgcgcgcttcagccgcttcactccccatcgttttcgcctggccaggatctactgggaccatggatcaagaaaaaaaactagaagtatctaataccagccatacttacaagcatcattgtagcgttggagttgacgtccacgagatctttgttaagaggagcagattgcgggttgttctgtcatacattggcattattttccttcttgtgaatgcctgccaaccattgctgacaaaggagagcctatctcttgggtctgtttggaatattacctttgctgttctggtcgccaaatgtttgcaatacaaacctgtgaagagagaatcagtagtgataatgccagcttttggaattcagctagaaatacatttttggaggagcatcttggagacgttgctggcgcc

SEQ ID NO: 219391 - DNA, 2061 bp, Zea Mays
cctgtgcccccctccggccaccctcggccccacgcctccatggtcaccgccacgacaaccccgccgcaatgctggcgagggctccccgccttggcccgggcacctccacccctctcctctcctcttcggccgcgtgccgtagcggctgcggctcccatctatcctctcaggcgccgcatcgctattactacaaccagaggaaggcgaggcacactggactgttcccccaggtgtacgctggaaaccgccggccctggcttctaccctctggggctctacgaggaggggtctaattctctgtcgcggtctcccctgtctaccttctttggtatcatggcgccggtatttgggagctccagcggcggtggtgcaagtagggagaaggcgtccgggcgaggagcagcagctgcaattgaggatagctccattgacattggtgacttcttcaagggccctctacctgggaagttcctgaagctccttggttttttggccttgtctcggcttggtgtgtatatacctttgggtggggtcaaccgagaagcttttgctgggaaccttgaccagaacagcctgctgggcactttagattctttctctggtggaggcattggccggcttggaatttgctcccttggcattgtaccatttatcaatgcacagattgtgtttcaactccttgcgcaactctacccaaaattgcaagaccttcagcggaaagaaggggaagcaggaagaaagaaggttcttcagtatacaagatatgcttctgttggatttgcaattgttcaggccattggacaagttctttatctccgtccctatgtgaatgatttcagcacagaatgggttctaacatctgtgacattattgacacttggatcggtctttactactttcattggtgaaagaatatctgatctgaaacttggaaatggaacatcacttcttatatttacaagtataatatcatatttgcctgcatcatttgggaggacagttgcgcaggcatttcaagatgggaattatgttggacttctcacaatcatattgtcattcttactattagtccttgggattgtctatgttcaagaagctgagcgcaaaatacccctcaattatgcttctcgttacagcagtcgaactggggaacttcagcgatctgcatatttaccatttaaggtcaacagttctggagtcatgcctatcatattttctacatcttcactggctttgcctggtactttggcacggttttctggcttagactttcttaagaaggctgccatagcccttaatccaggagttagatcctgatgatcttagtgaacaattgaagcggcaaggtgcttcgataccacttgttagaccaggaaaaagtacagctgcttatattaaaacagttcttagtcgcatatctgtcttgggatctgcatttctggctgtgctagctgctggaccatctttagttgaacagacaagtcacttgacagcattccgtggatttgctgggacttcagtgcttatccttgttggatgtgcaacagacacagctcgaaaagttcaagcagaaataatttcccagaaatataagaatattgagttctatgatgtcaaccgttttggccaatagttgatctcactggtcattcttttcaacctgtacttagatttttatttgtgtaattgaatatcggatccgtaaggccgtaactaagtatttccttgttgttcacttggatcttaatttttttctactgtgtatagtactgaaatctgtactcaaggtacacaaatcattcatctgtacgctaacatgtcagagcactcaaatcttaaacctatgaatgcttattgttattcacagttcttgttgctgatgatgtaacatgtattgttacattatgattcccttccatatttattgtgttcaactttattagatcaactgaagaattggcttagtcgtcatgatttctattagacaaggtgagatgtactgattaaatatggctggagagttaaactcagctgtttcattttgtacaccactgtgaacat

SEQ ID NO: 219392 - DNA, 1520 bp, Zea Mays
ttttgacttttgaccgcactatgaccaccaacagacgacacagttggcagcacgacaggaatgggtctttgtgcttagcttgatcggtctcgttcctcttgctgagcgacttagctttctgactgagcaggttgcgttttacatagggcctactgtgggtggactgttgaatgcaacatttggaaacgtaacagaggtcatcattgcgatctttgcactctatcaaggcaaggtagtggtggtgaaatgctccctgctaggctcagtcttgtccaacctgttgcttgtccttggaacctcccttttctttggtggcctggctaaccttggaactgagcagctatacgacaaaatgcaagtagatgtcagcacaggacttctgattcttggtgtgctatgccactctctgccactgatgctgagatatgctgtgagctccggggagcacgcagaatcctcttgggattcaggactggagctgtcccgagcatgcagcattgtcatgctccttgcctatgtagcctaccttttcttccaactgaaaacccaccgccaactatttgaaccccaaccccaagaggttgaagatgatggtgatgattcggtctctcaagacgaggcagtactgggattttccagtgcaatgatttggctgggagtcatgaccctgatgacagcactcctatcagagtttgttgtgagcacaattgagaatcttgttaacacttaacaggcagcatcggaatcttgggagctatctgtcagtttcattagcgtcatcttgattccaatagttggtaatgcagcagagcatgctggtgcagtgatatttgcgtttaaaaacaatctggacatcaccctcggagtatctttggggtccgctacgcagatttccatgtttgtggtgccattgagtgtccttgtagcatggatcatgggagtcccgatggatcttgatttcaacttgcttgagactggttgtttgtttcttgcaatattagtaacggccttcacgctccaggatggatcatcacattatctgaagggactgctgcttgtgttttgctacattgtcatctccttatgctttttcgttttgagacagcatggaaatggaagcaacgatgatcagctgggtgtagcaagcaagccatggaggatttagggcgcctgagctggcagtagtttctcaacaagtagcgtggactttggtttgcacgattttgcatggaacactggaggggagacccgtgaagtttgactaaagtatgtagactgcgggaagatgctgttcagctgatgtgtgaatgtaagtacatacaaagactatagatgaaaactgatgttgcgtgagagactatttgtgtgtgtttttcttgttctttccaccaagcaatggctagaattcggttgagctgttgaaattgtctcctgtataaatcagtgacatgtcatactattttccaactggacttaacagagcctttatccttctaattggttacccgcatggtcataat

SEQ ID NO: 219393 - DNA, 1027 bp, Zea Mays
cgccagtcctccctgcccgtaatcctcatcggcaaccccgcgtgctatcaacccccctgtgatcggcgatcccatcccttccaaagcaagcgcccactcaccttgccttgccggacaagcgtgccgcccgcgtcaaagatgcagtcgctgagcccttttctcccactcccctcccttcctctcttcgcctgactcgcacgcgcccccgatgtctgactcccccgcgtgggcacgagccccgccatacgcgcgctgccaaggggggcaaggcgcggcagctgctccacctcgacgcttgggcactcgtcgacgtcatccaggccaacgtgaccccatcgacggcctcaccctaggacccgctcctttcccctagaagcatccgaaggcatggcacccgtagccgccgacgtcgttcgcctcctactcacatggcgaggtgaacgggcactggactgtaagaaatggatgagcagtgacgtgaggagggcccctgcggccgagctatggaggctgatagacggcccgacacaaaggcgatggtcgtggaggctgcggcgacgcacaaggccatcactgggttgtggcggggcaggagagatgagtgggggagactgtgagagtgatgagtgtattctgtaattgagacggactccacccagatttgggtctagagtttgtttcgctataggtatgaaattgctgatcataggttgtttcgctacagaactaagtggaaatggagtttttcatagagtacggagaggcaagccagtaccagatctaagaagtcattggtaaagggaactacagagtagttgctacatcttaagacaccctataagattgtcaactcaattgtgatgaatatgttgttattgaagatggttgccacatccaagattcttctgaatgtaataatgttcaaccgcaagaactgttatgagagattgccaggttaaacgagctggctcgagctgcgtaacgagtcaaatcgatatagctcgttacattaccaagccaaaacaag

SEQ ID NO: 219394 - DNA, 818 bp, Zea Mays
ccgcgtgctatcaacccccctgtgatcggcgatcccatcccttccaaagcaagcgcccactcaccttgccttgccggacaagcgtgccgcccgcgtcaaagatgcagtcgctgagcccttttctcccactcccctcccttcctctcttcgcctgactcgcacgcgcccccgatgtctgactcccccgcgtgggcacgagccccgccatacgcgcgctgccaaggggggcaaggcgcggcagctgctccacctcgacgcttgggcactcgtcgacgtcatccaggccaacgtgaccccatcgacggcctcaccctaggacccgctcctttcccctagaagcatccgaaggcatggcacccgtagccgccgacgtcgttcgcctcctactcacatggcgaggtgaacgggcactggactgtaagaaatggatgagcagtgacgtgaggagggcccctgcggccgagctatggaggctgatagacggcccgacacaaaggcgatggtcgtggaggctgcggcgacgcacaaggccatcactgggttgtggcggggcaggagagatgagtgggggagactgtgagagtgatgagtgtattctgtaattgagacggactccacccagatttgggtctagagtttgtttcgctataggtatgaaattgctgatcataggttgtttcgctacagaactaagtggaaatggagtttttcatagagtacggagaggcaagccagtaccagatctaagaagtcattggtaaagggaactacagagtagttgctacatcttaagacaccctataaggcatcatttccac

SEQ ID NO: 219395 - DNA, 2565 bp, Zea Mays
gaatcttaacaagctggatgttaaaaacaagaatacaaatttgtattatatattctatattctatttattcataatcaaagaaaaaactgattaccgaataaataccgtttccgaccgttttcatccctatccaccgtccccagccgtgaagaaaaaaaaaagctccaacagcacaccctcacggcactaacagcacgaagatgaatggcaaccaggagccatcctcgcctctcctttttcacgagcctcgcctgaagcctttttctagacagctttcgtcgtgaacttccaggccagtggtcagaattcagaatctccaaccatacaggcaccatctgtgagactgtgatctgtcttgaacctcctgggagttgtcaatttttcgagctcaccctagaaaacctctttaataatttgaatgccgagaaccgatgcaccgctgactgtgctacagctttcctgattgctctgctctgatgtcctgcgcaggatgtcgaagagtgaaacgcctgaactgaacttggccttcgtgggttgggaggagttggcttggtcctgcaggatggaaataaaaaaatagccaagcacattctgggagacaagaaatgaatgccatgatagagcagattcaaactcatggataaagcagagtagagcttcaaaacaagcttaccgtatctgaattactctctgcagtagagttgcagctcctactgctgctgttgctgtcatcactaccaaatacgtaggatctatagacttatctgtgagaagatgccagtgaaccactggcagtttgtccaagaaacgatgactgcaaggaatacacatgatgccattgtggatagaaccatccaaaatctctccgtttcatctgtactctcagtagggcttgaagaaagggcagttgagtttgatctaccgaatagttatggttatcacttggctgggtgttgtcatgattctcttgcaaccgatcagaaatttcctcatctgaagctttggtgccgcaactatggagatccttcttgcaactcaaaccatcctgcaagccagaggactctagaaatatgtgatcactgtcttcaacagaggtatgtgatctgaaatccagagtacacaaaaagcaaatgtcgttggatcgaatcgtggaaacctcaacgaaacaactcagcacttacttcttcagaacctccatcttacaaaggcggatctacaattaacaaaaatgagaacaaagataaaaaatctcagcatctaaattctactcccatgtgcagttgacgtgtgtatatgtacacctcgcagcagcctctgtgactcagcatggatcgaatgaagctgcgccctcctctcctaacacacgaacccagactcccagagcaccagacatcatcaaaaaccggctagcaattcaactaaccaacggccagacccagaacgcaagagacagcggctggttaccttctcagagagcttcttctcccggaccaactccatgggcggcgcctcctcctccatcttcgtgttcctcctcttccccccttggcctgcgctcccgcccccgcccccgaagccacctccacgtcaacttcgtccagatcgagctgcttcctcaccgtccccttcggccggcgcgcctagcgggtcctgccccacagcgggtcgatcttgtcctccacgtcgctgccgtcgcccgtcgtcgggggtgtcgatcggcggcaacggtgacgacgcatctggtggcgtgatcgggcgcgtggaagggccgcggagatggaacggactcggcgctaggctttctcacccggcgtcgcctaatactagcggtggcggaggcaaggcggggagcaagagggcaagtggtagctgtgacttaggaagaggatctcctgaaaatggaagcgctgaatcacacaggaaggagataattggatttttgccactcacaatgttgtcttctttttataattaccactgtgtctatgaattgtgggtccagctgggtctatgaaatgtgggtctgatggcaattttacaaacatgtttcatgctgatagcaaatatcagaatctctcggaaggaagaggatctcctgaaaatggaagcgctgaatcacacagccgaaatgaatatcggtgtcaaaataaatattaatcactagtcaagattgttaagttattatgagtagatattctctattcaaactctttaaacagtacagtgaacaataatgcaagtcgcgaccaaactttcaactgacaaaggacctaatttaaatttaacagatttcaaactcttacagtacagtaaacaacaattcgagaaacaatcaacttttaactgacaaaggacctaaattaaatttatcagatttggcaggggccgcgcgaacgcgtaccccctctaccacaaattatgacgtccactctcctacttggggagatggtaagccagcgcacccgccatgtgcaatgcgggccactgacctaggccacagggcttcttgatccccagtcgaccccgtccaggtaagtatggagcaacgaagcacggagcgctca

SEQ ID NO: 219396 - DNA, 3221 bp, Zea Mays
aaaaaatgtaggatgaatttgaggtttaccttttatgaatcttaacaagctggatgttaaaaacaagaatacaaatttgtattatatattctatattctatttattcataatcaaagaaaaaactgattaccgaataaataccgtttccgaccgttttcatccctatccaccgtccccagccgtgaagaaaaaaaaaagctccaacagcacaccctcacggcactaacagcacgaagatgaatggcaaccaggagccatcctcgcctctcctttttcacgagcctcgcctgaagcctttttctagacagctttcgtcgtgaacttccaggccagtggtcagaattcagaatctccaaccatacaggcaccatctgtgagactgtgatctgtcttgaacctcctgggagttgtcaatttttcgagctcaccctagaaaacctctttaataatttgaatgccgagaaccgatgcaccgctgactgtgctacagctttcctgattgctctgctctgatgtcctgcgcaggatgtcgaagagtgaaacgcctgaactgaacttggccttcgtgggttgggaggagttggcttggtcctgcaggatggaaataaaaaaatagccaagcacattctgggagacaagaaatgaatgccatgatagagcagattcaaactcatggataaagcagagtagagcttcaaaacaagcttaccgtatctgaattactctctgcagtagagttgcagctcctactgctgctgttgctgtcatcactaccaaatacgtaggatctatagacttatctgtgagaagatgccagtgaaccactggcagtttgtccaagaaacgatgactgcaaggaatacacatgatgccattgtggatagaaccatccaaaatctctgatgacaatagatgcaatgaatgaaggtcataaaattatcaggagtgaatggaatggaagcattgtgggcagaagtacagtatatagtcaatagagaaccaaaagttgcagtcacaaagaaccaaaaggtgtgcttatcataaggtgttacagcagtctcatccgttctccagtttgtggttgtaagatttcaaagtcgctatacgaattagctccgattaactgtaaatgtttcaccatagtgatccaaacccaacaccagatggttggtaggtggttgtttataacccatacaacaatgcaaaagtgaacgcacaagtatgaatggtatggtacaacctggagaacatgagggcttgtattaattcatgcttctgtaggtttggtgtcctctgatcgttttaacggtgaacaatagatgcacgtcagtaatgaatgaaggtcagaaaaattcaactactaaacaattcgtactattaaagccgggagcaaatctgccctcccatacgtccatgtcagtaaaaaaatactccctctgttccacaatactgtttattttacttgtttatttttgtgtccatattcaaatggatgacaatgaatctagacacatatataaaacacatacatcaaatattgtatgaatccattaacaacctaaaacgaatactattttggtacggagggagtaatacataactatcctctggataagtgtgcaagtttgccaaaaaatcaaaacaaagtaagaagtcactgcatgttttatgtacagagctaacagggctctagaactggtttgtgtaggcaaagttgataatattaacataatgttttcatttagccactcaaattcaatgcccctaacagggataccgaccatgtttcagatcaatgaagggcagggcaggggacttttcatcctaaaaaggtcaaatgactaggggggaattatggtgctggaaccaaggcatataggcaacaactacaatggttgttgtggaaaattgagatgggtgatagaagagtatacacacctccgtttcatctgtactctcagtagggcttgaagaaagggcagttgagtttgatctaccgaatagttatggttatcacttggctgggtgttgtcatgattctcttgcaaccgatcagaaatttcctcatctgaagctttggtgccgcaactatggagatccttcttgcaactcaaaccatccttctcagagagcttcttctcccggaccaactccatgggcggcgcctcctcctccatcttcgtgttcctcctcttccccccttggcctgcgctcccgcccccgcccccgaagccacctccacgtcaacttcgtccagatcgagctgcttcctcaccgtccccttcggccggcgcgcctagcgggtcctgccccacagcgggtcgatcttgtcctccacgtcgctgccgtcgcccgtcgtcgggggtgtcgatcggcggcaacggtgacgacgcatctggtggcgtgatcgggcgcgtggaagggccgcggagatggaacggactcggcgctaggctttctcacccggcgtcgcctaatactagcggtggcggaggcaaggcggggagcaagagggcaagtggtagctgtgacttaggaagaggatctcctgaaaatggaagcgctgaatcacacaggaaggagataattggatttttgccactcacaatgttgtcttctttttataattaccactgtgtctatgaattgtgggtccagctgggtctatgaaatgtgggtctgatggcaattttacaaacatgtttcatgctgatagcaaatatcagaatctctcggaaggaagaggatctcctgaaaatggaagcgctgaatcacacagccgaaatgaatatcggtgtcaaaataaatattaatcactagtcaagattgttaagttattatgagtagatattctctattcaaactctttaaacagtacagtgaacaataatgcaagtcgcgaccaaactttcaactgacaaaggacctaatttaaatttaacagatttcaaactcttacagtacagtaaacaacaattcgagaaacaatcaacttttaactgacaaaggacctaaattaaatttatcagatttggcaggggccgcgcgaacgcgtaccccctctaccacaaattatgacgtccactctcctacttggggagatggtaagccagcgcacccgccatgtgcaatgcgggccactgacctaggccacagggcttcttgatccccagtcgaccccgtccaggtaagtatggagcaacgaagcacggagcgctca

SEQ ID NO: 219397 - DNA, 375 bp, Zea Mays
atggagggctttcattcaagatttttgaagatctatctagaacttccaccaatagtccaaccattacaaatggaagaggatctagagcaactgaaagttcttgaaaacagctatcggatgaaggtgatcaaagtggagcaaaatgcccgtggtgtggatgcacctgaggcgccgcgggtgaccgatccgagcagtgatcgccgatgtaccagtgttgcgcgtattcatgacaatgaactggaagcgggactcagagttcctggaccaatcgagcacatatatgacagaaccctattcatgacggggagcgaggcggtgaggcggatggttcatcaggttggcactggtggtcatcagagccccctcgcctcctga

SEQ ID NO: 219398 - DNA, 1013 bp, Zea Mays
ctcgattctacattctagatgagaaatttcaacaagaagataaaaaactatctaactccgaggcttttctgcgtagatcagagactcagcgaaaggctgagcaaaaggtccgcgaagaaagtgaaaggctgcgacagaaggaacgtgagcaaattgcagagaagcgtaagcgtgatatgacgcttcgcgctcgtgtagctgctaaggcggaagaaaagaggttggagctgttgtacattcagtggactgagcaccataaaaggctgtccaatttcttaaggacaaaagctgaaccacctatttactacatgccaactaaaccaattattgacgatccagccattgttgaacagaacaaggaaaaggtattcgaagaatggaaatctatgcgcagggatgagctgactcggttccaaaagcaagttgaggagcaatatctctcaaatgtggagaggcagctggagaggatccagaatgcccggaacgctcgaaaggcgaacgggcatgctaacatgcaagaaatggacaaggagctggacacacacagggcggagcatggtccgaagactcggcgagttcctgaggagggcggtaatgatgacgacgaagacgcagaggacatggctgcggaagacgaggtgatggatgaagttctgggcatcaacgatgggatcaacgaggacccatccaagccgtccgaagaagctactactgaaggtggtgagcctgcacccgaggaagcacaataggattctttgttcacacaagctaggcacatagccgtacgtaccattccgtatgcttagttgccgtattgttgggaactgtttgtgcgtgtatttctgttagacgttccccgctggtttaggctgtgttttatattgctgttttgtctttttgaatgttgagaccatacaactgtcgatcattatctcataattgttgtaaaaatactataattgataccttgatttggacgtcggtggcgttaaacgtttcgggttctgttcttc

SEQ ID NO: 219399 - DNA, 881 bp, Zea Mays
gccgtggtcggagtggcgcaccacgtccaggcaccaccagcacgcgcgcgtctgagctgagctctgaaggactggcaccgaagtggcatgcggcagtgacttcacttgcctgcggcgaccgtgttgttgacgaggaaccagtagatgtcggtgtcgctgatgggcaccatgccggctctgagaccctccgataggaactgccggagctcccgctttacgccgtgcccgccagggaagacggagagcccgcggacggcagaccggcccgagctcgccggttccgacaggcccagccaccgcgccaccaccgagtgcacgccgtcacacccgatcaagaccttggctcggatcaccgtgccgtcgtccaatccaaggacgacggtcaccgacgagtcgccggctgctcgctcggtgtcgatggagacgaccttggacgagaaacggacggtgcccggcggcagctcctccgcgagcgcctccagcagcgccttcctgtcaagcgccctcactctgacttcttcgccccttgttgttttttttaaaaaaaaaatgttcagttcagccaagaaaccaggcatttcaaaccaaaatcacacaaaatccgacgaatttcttgagctgcatggctcgttggtcgctgccgccaacgtggctccgtgacgagtcataggattggaattcgcaggaaccgatggactcacttgttcttgttgccggcaaagcgaaacacctgcgtcgccccggtctcgagattggtcaccctggatctgtgggcagccatgcgattcagcaggtcagtcgagagcaagcatgggcgacggcgacggcgacggggcgcacgcacgtttcgtaggcgtcgtagcgggaggcgagcttgtgcg

SEQ ID NO: 219400 - DNA, 1925 bp, Zea Mays
gggatcagcccgtgctcagtgctgacgtcgtcactcaaatgctgtttcgtccccgtccgcccatgtccatctagaattcgatccagtccaaactacctttcccggcttggtcaatcctgtcgccttcggtccatctcacacagactccggccggcggctccactccactgccccgccgctcggtgccgtacgtcgtcgtgctccaccgcctcgatcctcggtttattgctttcctgcatagcttccttagctagctaggtctcgtttcatcagtctcgatctgctgctcgttggccgccggcggctacgagcatggaaacgtacactacggacgacgcgctgacggccatggggtttggcaagttccaggcgcttgttcttgtgtacgcagggacgggctggctggcggactccatggagctcatgctgctctccttcgtcggaccgctggttcggcagcagtggaacgtctctgcccagcacgagagcctgctctccagcgtcgtcttcactggcatgctcctgggagcctgttcctggggctatatttccgacaaatacggaaggaggagttggtggcacgcatgtattttcgtcttggtttctggaatttgtccctaccaagaaccgtggtgcctggatgcttgtgttctctgctttctggaccatcggaaccatcttcgaggcttcgcttgcgtgggtcgtgttgtcaagactgagctggcggtggctgctggcgttcacctccctcccatgcttcgccttgctcgtgtttttcgtcgtcgcaccggagtcgccacggtacctctgcgcgcagaacagaatatccgacgcgacccttgttcttgagaggatgtccaggacgaacaaggccgctcttcctcccggagctctggcataccaccacacggaaacgcagctgggactgggagagagtacaacagacgacgcctccaaatccggttccggtggcatggctgccctgcgcaggctgttctcgcgcaaactgctgagatccacgcttctcatctggttcgtttggtttgcaaactcctttgcctattacggcctagtgttgctgacgtcgcagctgagtgacgcgaaccggaggtgcgcatcgtcgtctgctcacaaatctcaagcgcacgaaggaaacccgaatctctataaagatgtcttcataactagcttagcagagtttccggggctggttatttctgccattatcgttgattggcttggccggaaagctacaatgtggatcttgctgtttggatgctgtggcttcctcggacctctggctgttcatcagaaggagtcggtgacaaccgctcttctgttcggtgctcgcgcctgtggcatggggagctctacggtcttgtgcttatacgcaccagaggtgtacccaacatcagcgcgctccacaggtgttggcattgccaccgccatcggaaaaattggcggcatcgtttgccccctcatcgctgtcggcatgctgcggagctgccaccaaatgcaagccgtcctggtctttgagcttgtcctaggcctcgcgggagtagcctgcatcctcttccctgtggagaccaagggccgcgagatgaaatgacagacccttcacagcacccaaagcgaccactactttcagcggcgtacgttcgaacataaagtatttttgttgaagacgcgtactcagaaaattgctcaagctatatctttaatgaaatattctgagtatcctttttatcaattagttttttctaccctatgtctttttagttttcactattttgattagattttgttttctaattaaaatcttaatacaacctgcgtggagttagtttgctaacgcatgtgccatgatatggttacaggataatgaaaaacagttttgagctcttttaggctcaaaccacgagttc

SEQ ID NO: 219401 - DNA, 2315 bp, Zea Mays
cgggaagcctacggcactggccttcagggtaagtctcaaatggttcaggatgaattggcaaggctgggagaatctatggtacagagtcctgagggaacccgggcagttgctttggagctgtgccgagaatttgaggacaagtttcttgctcacataacatctgggatctggttggaaaattgttgcaagttttgaaggcaagtttccagacagaatcaaacagctaccgttggaccgacatttcgatctcaacaatgtcaaaaggattgtcttggaagccgatggttatcaaccatatttgatatctccagagaaagggttgaaatccttaataaagttagtactggaaatggcaaaggagccatcacgactatgtgttgaggaggttcatcgtgtattgttagacatagtcaatgcctccgcaaatgccacaccaggactcggaaggtatcctccattcaagcgtgaggttgttgcaatagcatcaaatgcattggataccttcaaaaatgatgccaaaaagatggtcgtcgcgcttgttgatatggaacgtgcctttgttcctccccaacatttcatccgcttggtgcaaagaagaatggaaaggcagcgtcgagaggatgagttaagaaaccgatcttctaagaaaacacaggaagctgaacagtcaacatctaagagggccttcagtccccaaacagatgctgagcaaggtggtggcagcttaaaatcaatgaaagacaaatctggccagcaagataaagacgcaaaagagggatcgaatttgcaggttgctggtcctgctggtgaaattactgcaggttacctcttaaagaaaagcgcaaaaactaatgggtggagtaaaaggtggtttgttcttaatgagaagagtggaaagcttgggtacacagagaaacaagaggagagacattttcgtggtgtcatcactcttgaggagtgcaaccttgaggaggtagaggaggaagaaccatctaaaagctcaaaagactcaaaaaaggcaaatggatcagaaaaacccccaagtcttgtatttaagattactaacagggttgcatacaaaacagtcttaaaagctcacagtgctgttctgttaaaggctgagagcatgcctgacaaggttgagtgggtgaataagatcaaagctgttattcagagcaaagggggttctttcaagggtccaagtactgagggtggttcaatgaagcaaagcaattcggatggcgctttagatgctatggcgcggagaccagctgatcctgaagaagaacttagatggatgtctcaagaagttcgtggttatgttgaggctgttttgaatagtctggcagcaaatgttccgaaggctattgtgctgtgccaagtggagaaagcaaaggaagacatgcttaaccagctatacagctcgataagcgggcaaagcaacgctaagattgaagagcttcttcaagaggatcataatgctaagcgcagaagggagaagtaccaaaaacaatcatctctcctgtcaaaacttactcgtcaactcagtatccatgacaacagggcatctgtttcctcgtattctaatgacagcactgaagttgagagccctcgaacaccaagccgctcaggtgaggactggaggtctgcctttgattcatcttcaaatgggcctgttgctacaagcacaaacagtgaatcaaggtcgagaagtgctgatggtcgcagccggcgctatgagaacggggatgtgagctcaggtgccaactctggcagccggcgcacaccgaaccggttgccaccagcaccgccaaaatactaatcgtgctgattggtattcatgaacattatgtattcttgcctggcacacgccccttgcttgtcatatgggttattggagcgtatttcagatcggccgctagagattgtgttgtagtggagtctggtgattgcgtgaacattgtgttcgcaggtcgctgcgactcagatgagttgtttatagaaatatataggtaaccatggtctctatctttactgtttattatctccgcacatttcctggccctggtgccgtccctgccataggattttgttcgggcgatcgatcttgctttcgcacttggtcgttctgggacggcggctgtcagactaaaagatttatgttgcccctcccgcgcatattgttcggtaaccctgatgatccttactagtggatggggcgcgctcgatgttgaaatgtggttgtagattatagaatcttctatgacctttggagaggaatttgtaagatatatcccatcgggccacactctttc

SEQ ID NO: 219402 - DNA, 443 bp, Zea Mays
gtattgttagacatagtcaatgcctccgcaaatgccacaccaggactcggaaggtatcctccattcaagcgtgaggttgttgcaatagcatcaaatgcattggataccttcaaaaatgatgccaaaaagatggtcgtcgcgcttgttgatatggaacgtgcctttgttcctccccaacatttcatccgcttggtgcaaagaagaatggaaaggcagcgtcgagaggatgagttaagaaaccgatcttctaagaaaacacaggaagctgaacagtcaacatctaagaggtccccaaacagatgctgagcaaggtggtggcagcttaaaatcaatgaaagacaaatctggccagcaagataaagacgcaaaagagggatcgaatttgcaggttgctggtcctgctggtgaaattactgcaggctttgttgttgtgagaagtaaac

SEQ ID NO: 219403 - DNA, 322 bp, Zea Mays
tattgttagacatagtcaatgcctccgcaaatgccacaccaggactcggaaggtatcctccattcaagcgtgaggttgttgcaatagcatcaaatgcattggataccttcaaaaatgatgccaaaaagatggtcgtcgcgcttgttgatatggaacgtgcctttgttcctccccaacatttcatccgcttggtgcaaagaagaatggaaaggcagcgtcgagaggatgagttaagaaaccgatcttctaagaaaacacaggaagctgaacagtcaacatctaagaggttacagtatatattggctctggtggttgattaaac

SEQ ID NO: 219404 - DNA, 867 bp, Zea Mays
gccatgtcaagcatctccttcccttccttgccccccatccttccccatcgccctcctccccctacaatctgaccaccttcctccaatctcctcgccatcgaagacctccacggggacctctacaggtctatctccgcgctctaccttgccggctgctgcagggtctcctggagttctttgcctcgacagattggtaccacccggggctcgacatcaagcgccgctgcggcgagcacctcgacccacaattaatgaaccccttcgtcagagtgcccttccgtggcgtcaagccggagttctgagatgggatctggtctcgcgtcgcacccgaagagctcgatatcaagcgctgtagcggcaagcacctccacctgcagctatggaaccctttcgtcaatgtgaccaggtccttccctggcgtcaagcgagagttctaagatgcgatgtggtcccacctcgctacccttccccaatggccacattacatgttggctcctggctgacctccgtaccatgcagctcccttgcgtggtcgcgcgtgaacattgtcgcttcgctcccggatccttatctggggattgcagctacttcagatacatgactactaggctatacaatctgaatctgtattgaacatgactaggtcgctcacactgctcagttctaccgaactgatgatactatacacctcttacaaatcttacaaaaacagccttagtagctgccttctagttatttcaatgtcgacatctcaagtaaaggatgacggtgccttagctagcagaaaagaaagaaaaaagcatatttatggcatacacacaatgataccagtgtcagtgtgtgtctcttgccggagatagtaggaca

SEQ ID NO: 219405 - DNA, 2344 bp, Zea Mays
gttcattccacacattggaggtggattttcctcaattggagatattgacaaattggaaaaaaatgtgacttgacctgtgctgcaacaaccttaagggcttctttggattacaggaattttgaaggaataatgctggaataggaaagtttcctatcctatagtttggctggcatgatgcaccaattatattccataggattttatctctttatgtgttgattccataggatttctaacatccactcagagctcttggaaaaattcctacacgcgaagcacgagaagtggaatgctaatgctagcaactaatggcccattatggcttgtcctacccaaatttaaatagagaaaaacacatataaagcacccatttgatattgtttttatccaagcttgacattcatgcaaaatgaacccttcgttttttccttgccccaaccaaacaaccttccactcaatattactacgttttacaatcctctgatttgcacatacaatcctacgtttttcctattcctatgtttttcaattcctacatttcaaaggagccctaaactaggaggggcttctaattcttcatctctaccaacagtcctctcctgttactttttaaaccaataactttttcaagtttgtgcagatgcacacatccttgagccaaaatagaaaaaaaatcatagaagagttctttggttgtcacgtgattcaagagtattaatgatatacaaaagtttgctttatggcaagtcaggtaaccacaaattttgggcaatgacagggatgtgcagtggtggtctcttaaaagaattttgtgttccagcgtagctatttccactgcaaactatcaaatcattacaaactgctgggaacatgctccatcttattatcgaagcctgtatctcgagaaagttgatcgatacatctgcttatttatggcctggttatgttgtaccatctgggactttaaaagatacagctttgccccaagaatccccttggttaaactttatgaaagggtctcgacattcaggaccccttattgatgctctggtcgcatctcctgcttcaaggtgtttcaagctctgcaagatgaggtctgttcagtttggccaaaaaggcatcccctacctgaacacctacgacggctgcaccatcctctaccccgacccgctcatcaaggccaacgacaccatcaagatcgatctagagaccaacaagatcatggacttcttcaagtttgacgtcagcaacgtggtcatggtgaccggcgggaggaacaccgggcgtgtaggagtgatcaagaactgggagaagcacaagggcagcttcgagcagctggctggccccgacgcagcgcagcacgcaagagctagcggcgccggcgcggccggtgaaactgaaatccagacgcaccgctcacgcagctttgccaggcaaggcccagcagcgcagccagcagaaccaccagaggaccttcagggcgaagaagagcctgtcgtcgcccgggaacaagggtacgcaactgaggaggcacattgacgccactctcggcagcggcaacctgcgagaggctgtccgtctacccgtcggggaggacctcaacgagtggctggctgtcaacactgttgacttcttcaaccacataaacgttctgtacagcacgctggcggagttctgcactccacatacctgcccggtcatggcagccggaccaaagtacgagtacaggtgggccgacggagagccaaggtcaaggtgcccatcaaggtgtccgcgcccaagtacgtggactacctcatggactggatagagatccagctggacgacgaggccattttccctcaacagcttggggctcctttccctaccaacttccgcgacgtcgtcgtcaagacgatcttcaggcgcctcttcagggtgtacgcgcacatataccactcccacttccagatgatcgtcaagctcaaggaggaggcgcatctcaacacttgcttcaagcactttgcgctcttcacgctggaattcaagctggtcgagagcgcagagctggctcctctcagggatctgatcgagcccctgataagtcagtgctaaaccagagagagacttcgattaggaggccaattaagtgcggagaccatctttcttcttctattagttttggcctctcccggcgttcagtttagtgtcggtttggttccggatggaacatcttacgcatttcgtatcagccgttggtaactcggatggtctctgtatcagtcgttgatcactacttgttctgttattttatcccttctcatttttgaaacgcacacacaaaaaaaagtgttggatccaaagt

SEQ ID NO: 219406 - DNA, 2287 bp, Zea Mays
tggaaatccatgtagcaaataaatgattttggaactgggggcagacattggaggtggattttcctcaattggagatattgacaaattggaaaaaaatgtgacttgacctgtgctgcaacaaccttaagggcttctttggattacaggaattttgaaggaataatgctggaataggaaagtttcctatcctatagtttggctggcatgatgcaccaattatattccataggattttatctctttatgtgttgattccataggatttctaacatccactcagagctcttggaaaaattcctacacgcgaagcacgagaagtggaatgctaatgctagcaactaatggcccattatggcttgtcctacccaaatttaaatagagaaaaacacatataaagcacccatttgatattgtttttatccaagcttgacattcatgcaaaatgaacccttcgttttttccttgccccaaccaaacaaccttccactcaatattactacgttttacaatcctctgatttgcacatacaatcctacgtttttcctattcctatgtttttcaattcctacatttcaaaggagccctaaactaggaggggcttctaattcttcatctctaccaacagtcctctcctgttactttttaaaccaataactttttcaagtttgtgcagatgcacacatccttgagccaaaatagaaaaaaaatcatagaagagttctttgggatgtgcagtggtggtctcttaaaagaattttgtgttccagcgtagctatttccactgcaaactatcaaatcattacaaactgctgggaacatgctccatcttattatcgaagcctgtatctcgagaaagttgatcgatacatctgcttatttatggcctggttatgttgtaccatctgggactttaaaagatacagctttgccccaagaatccccttggttaaactttatgaaagggtctcgacattcaggaccccttattgatgctctggtcgcatctcctgcttcaagttcaagctctgcaagatgaggtctgttcagtttggccaaaaaggcatcccctacctgaacacctacgacggctgcaccatcctctaccccgacccgctcatcaaggccaacgacaccatcaagatcgatctagagaccaacaagatcatggacttcttcaagtttgacgtcagcaacgtggtcatggtgaccggcgggaggaacaccgggcgtgtaggagtgatcaagaactgggagaagcacaagggcagcttcgagcagctggctggccccgacgcagcgcagcacgcaagagctagcggcgccggcgcggccggtgaaactgaaatccagacgcaccgctcacgcagctttgccaggcaaggcccagcagcgcagccagcagaaccaccagaggaccttcagggcgaagaagagcctgtcgtcgcccgggaacaagggtacgcaactgaggaggcacattgacgccactctcggcagcggcaacctgcgagaggctgtccgtctacccgtcggggaggacctcaacgagtggctggctgtcaacactgttgacttcttcaaccacataaacgttctgtacagcacgctggcggagttctgcactccacatacctgcccggtcatggcagccggaccaaagtacgagtacaggtgggccgacggagagccaaggtcaaggtgcccatcaaggtgtccgcgcccaagtacgtggactacctcatggactggatagagatccagctggacgacgaggccattttccctcaacagcttggggctcctttccctaccaacttccgcgacgtcgtcgtcaagacgatcttcaggcgcctcttcagggtgtacgcgcacatataccactcccacttccagatgatcgtcaagctcaaggaggaggcgcatctcaacacttgcttcaagcactttgcgctcttcacgctggaattcaagctggtcgagagcgcagagctggctcctctcagggatctgatcgagcccctgataagtcagtgctaaaccagagagagacttcgattaggaggccaattaagtgcggagaccatctttcttcttctattagttttggcctctcccggcgttcagtttagtgtcggtttggttccggatggaacatcttacgcatttcgtatcagccgttggtaactcggatggtctctgtatcagtcgttgatcactacttgttctgttattttatcccttctcatttttgaaacgcacacacaaaaaaaagtgttggatccaaagt

SEQ ID NO: 219407 - DNA, 2128 bp, Zea Mays
gtcccgcaacaattacagagagaagcagggttgcctagggttttagagcaaaggcggggtctccgcggcggcgacggcgagccatggagaacacgaagctctcgtcggcgctattcgccgggacccacttcgaccgcaagcgcttcgccgccgacttcgcccggtttcgtaaaggcccggctctcccatccgccgccaccccctccgcaccgtccccggagaagaagcggaagcgcaagagcggcaaggcaaaggcgaagaagaataagaagagagcccaggatgcggcggccgccgcctcgtcggattttgtggaggggttcagcgtgttcaagggattggctgataataatgcggagctgcgttctgagaaggtggatatgaggaaagatgatgattcggtggctgtgaggagacggaaagagattgagagggaattcgagagagctgcagttcttcgtaagaggtttgatatccacattgccgggcaaaatgctccagcaccacttgagagctttgaagaattgatttcaaggtatggttgtgattcttatttggttggaaacttgtcaaaacttggttttcaagaacctacaccaattcaaaggcaggccatgcccattcttctttcgggtagggaatgctttgcgtgtgcacctactggttctggcaagacattggctttcttgtttccacttcttatgaaaattaagccaggatcaaaaggtggtgttaaagccgtgattctttgcccaacaagggaattggctgcacaaactgtgagagaatgcaagaagttggttaaggggaggaagtactatattaaattgatgaccaaagagctgtccaaatcagggaatttcaaagatatgcactgtgatatccttgtttccacccctcttcgtttggaccatgctgtgaagaaaagagaccttgatttaatgtggaataccttgtcttggatgaatctgataaactttttgagcttggatttgttgaagtggttgattcagttgtagaagcctgttccaatccttcaataattcggtctctgttcagtgccactttgcccgattcaattgagactcttgcacgcactataatgcatgatgccattcgagtcattgtcggcagaaagaattcggcctcttcactgattaagcaaaagttgatttttgctggaactgagaggggaaagttgctaactcttcgccaaaactttcaagagtctctcaatcctccagtattgatttttgtccaaagcaaagagagggccaaagagctttacaaagaactggcatttgatgacatagagttgatgtaattcatgcagatctcagtgagcagcagcgtcaagatgctgttgacaattgagagctggaaagacctgggtactgatagcaacggaagtcattgcccggggaatggacttcaaaggtgtcgcctctgtgataaactacgattttccggagtcggctgctgcctatattcacaggatagggcgatccggaagagccggtaggtccggggaggctatcacgttcttcacagaggaggacaagccattcttgaggaatatcgccaacgtgttggtatcttcaggctgtgaagtgccttcctggataatggcactgccaaagctcaagcgaaagaagcacagagtggatagggacccaatctcctacctacctgacgaagtttgagagcggcttggtaagatgctctatttatttatttttgtggggagggggggatatataacacaggctgtccagagtggtactttaaccatgcacttccgagaggtggcacgttggcttcagttttccctgtttgagcagtgcaccgatcagtttgtttagccacaacccaagacgagggatcagtatatctttgttaattggagtacgttacagtttgtgtggacgattggtggtgaatccacagagtagagcagctcgtttctgtttggcctagcgtagtcagattgcaattagggtccgtttggttgggctgtggctgtgaaaaaagttgttgtgggctgtgagctgtggaaaaagctgctgtaggctgtgagctgttaaaaagctaaaaccgtttggtggaaagcactaatagtcgttaaaag

SEQ ID NO: 219408 - DNA, 2109 bp, Zea Mays
ttcaacaggtaggggcgtagggtatccggctaccgctcgtcctcgtgcacgcggctgttaaacacagtgaccccctcgttagctctccgtccatcccctcttccatcaggatcagcggtggggtatcgatctgctctagttggacggcggcatccctgattctaccctgatcgatcccatggatgcccaagacggcgatgagagaccgctgatcatccatcgcctgccactactccaggatgaaagtacttccgaattcactagcgacgggacggttgatcttcgcaatcagcctgctcggaagcagagaactgggaagtggaaagcatgcttcttcatcttaggtgccgagtttgctgaatgtgtggccttcttcgcgatctcgaagaacctggtgacgtacctcacgggcgttctgcacgagagcaacgtggacgccgcgacgactgtgtccacctggatcgggacctcgttcttcacgccgctcgtcggcgcgttcttggccgacacattctgggggcgatactggacgatactggccttcctctccgtgtacgtcacggggatgacggtcctgactgcttcagctcttctcccgctgctcatgggcgcgtcctacagccgtagcgcccaccgcctcttcgcgtacctgggcctctacctcgccgctctcggcaccggcggaatcaagccgtgcgtctgcgcgctcggtgccgaccagttcgacgcgtctgaccccgtggagcggcgggccaagggctccttcttcaactggtactacttctccatcaacatcggctccctgctgtccgcgacggtggtcgtctgggtgcaggacaacgttgggtggggagtcgggttcgcgatcccgaccctgctcatgctgtcgggactcgtgctgttcgtcgccggtaggaaggtttacaggtaccagagagtgggagggagccctctgacaagagcctcgcaggtggtggttgctgctgtcaggaactaccgtttggtgctgcctgagcctgacgacagctcggccctgctgcatcaggcgcctcccggaacgacggaaggaaatgattccacgatgcagcatacgagtcaattcagcgccatcctccggcgagaaaggagcgacggcaagcccatggcggctctgcacggtctcccaggtcgaggagctgaagacggtgctgcggatgttccccgtgtgggtgtcgatggtgctcttcttcgcggccaccgcgcagatgtcgtccaccttcatcgagcaaggcgagaccatggacaaccgcgtggggccgttcaccgtgccgccggcgtccctctccaccttcgacgtcatcagcgtcatggtctgcatacccatctacgacaaagcgctggtgccgctggcccggcgcgccacgggcaaggagcggggcctgtcgcagctgcagcggctgggcgtcggcctcgcgctgtccgtggccggcatggtgtacgcggcgctgctcgaggccaggcggctgtcgctcgcccgcgcagcggcggacgggcggccgccgatgtccatcatgtggcaggcgccggcgttcgcggtgctcggcgccggggaggtgttcgcgaccatcggcatcctcgagttcttctacgaccagtcgcccgacggcatgaagagcctcggcacggcccttgcgcagctcgccgtcgcggcaggcaactacttcaactctgccgtgctcgccgccgtcgccgccgtcaccacgcgcaacggggaggcaggatggatccccgacgacctggacaagggccacctcgactatttcttctggttcatggctgttctcggcgtggtcaacctgctgcacttcctgcattgctccgtcaggtacagaggcagcagcaacaacagcacatactcttcttgagtcttcacacgatctgtgccaagtatatggcaaaatgtcaacaaagagagatgtcaatcgaacttgttaacgagacacaacaggatgcccgcattctccatttggcgtctccacaataataatgtgtccctgcgtcggtccattgttttgtgacaaacacacgaatacctttgcgttgttattgagccttttgctcgtggtcaca

SEQ ID NO: 219409 - DNA, 2486 bp, Zea Mays
ctccgaccgacagacgacgagcgagcgcagcccaagcccaagcaagcagggcacggccatgcccgtggcccaatcctaggcgtccatttcgtattccacggccggcgaagcagcagcagcagcagcagccatggtggccggcagggtcaaggcggccatgggcttccagcggagcccggccacgcccaagcccggggcctcctcctcctcctcctcctcgcgcaaggcgccgccgccgctgcagctgcccgggtcggccgcgctgccggagacgccgcgccggaggtcctcgggctctccggcgccgccaggctccgggtccaagggcggcggcggcccattctcgcgctacttcccgcggtcgtccgcgcaggtgcagccggcgcgcgcgtcgggccagcccgagccgccgccgccgccgccgccgccgccgtcgtgcccgggccccgccgccgccgctgacctcgcccgcctcgtcgaggagctccgggagcgcgagtcccgcctccgcaccgagctgctggagcacaagatcctcaaggagaccgtcgccatcgtgccgttcctcgagaccgagctcgccgccaagagcagcgacctcggccgctgccgcgacgcgctgtcgcgcctcgaggccgagaacgcaagcctccgcgccgagctccacgccgccaggggcagccagcagagggtggttcagctggagaaggagctggcggaggtgaagaggcaccgtcgccgggactccggccccgatgccgaccgtcacgatgatgactgctcgtcgtcggtgtcgtcgcacaactccgactccgatcgctccaatgcgccgaccaacgcggtcgtgcccgggctgttgatcgtccctcctcctgctcctcctcctcctcccccgccgccgccgccgccttcttacaagtccaggtcctacttctctgcctcgtcgcgcgcatcgccggccaactcctcctcgtccagctccacctcgtccgcgccatcgacgccaacctactcttcagacaccgcggcgtcgcgaaaccgcgtgccggagctctcccagctcccgccgatacccgccccacccccgccgccgcccccacccccgccaccggcaatgccggcgcgcggacgccgcagcgcgtgctcgtcaccttcgacctcgagcggcagcagcggcggcggctgcggcagaggctcggggcctcctgcgccgccgccgccgcctccgcctgcggcgaggaggagctccagagcttcgtcccctgcggcttcgggaacggccccggcgcccgccccctgcgtcaggcgagtccccgaggtggtggaattctaccactcgctaatgcggagggactccaggtctagggacgccgccgctgccgccgaagctggcgccagtgggggtgccgccgccgcgagggatatgatcggcgagatcgagaaccgctcttctcatcttctcgcgatcaaatcagacgtggagaggcagggcgacttcatccggttcctgatcaaggaggtgcagggcgcggcgttcgtcgacatcgaggacgtggtcacctttgtcaagtggctggacgtcgagctctcacgtctggtggacgagagggcggtgctgaagcacttcgactggccggaggggaaggcggacgcgctgcgtgaggccgcgttcgggtaccgcgacctgaagaaggtcgagtcggaggcgtcgtccttctgcgatgacccccggcagccctgctcttctgctctcaagaagatgcaggccgtcttcgagaagttagagcatggagtgtacagccttgtgcgtgtgcgagacggcgcaatgagccggtaccgtgggtatcagatcccatgggagtggatgcaggacactggaattgttagtcagatcaaactgcaatcagtgaagctggcaatgaagtacctgaggagggtttcctcagagattcaggccatacaggtcggccctgacgaagaggagctggtgcttcaaggagtccgatttgccttcagagtgcaccagtttgcaggcggtttcgacgtcgatacgatgcgcgcctttcaggagttgaaggagacggcgtcagcctttcagcagtggggaggccaaaaccaacacctgcatcagcaaaggctcgctggcagaagttgagacgcatgtatttatagcaatccgttactacaggatagtggaagcatctatttacctggccaaatgctccactccttttctttttttttaaccttcccgtcaagaagctatatttcgacagattctttattatttttaatatgcataagagcatgcagaaagacgcttagcgtgtcaataccttgcgtgtgggctatcatttacacgctcctatgagtgattaactcgcatccatcgatggacatttctctcttcttacgttctcgcctcaagacaaggattttacaggtgcgaaaacacccgtgtctgcttgtcgtgattgatttttttt

SEQ ID NO: 219410 - DNA, 7607 bp, Zea Mays
ctctcctccgggagagggatagagtgcgtccgtcttcgttccttgccccccttccttcagaagagcgaggccgcggtcgcggaggaggctttacgaacaaacgagccattagtccccaaaagccaacacacaaacccaggcgatagcgagcgcgcccgcgaaggctacgacgcgagagcgcgcgaggtgtggagcccccaatcccggaagcttccttggccgcgcgcagggcgcgggagtgggagctcgccgccggttaccgagccctctccgccgcggatctcccgatctgagacgccactcgtcaattccccgcagggttttgcggtgccagcgacggacatgagcgtggagagcccaggggagctagggttctgaagcgcaccgtggggcacagcgtggcgaacgacggcccccgacatcctgctaggttttccatgggagatgggggagtcgcgtgcgccgtccgctcagtcgagagcttccgtgccggcgccctcgtgaggagaggaggagcgggagaagcgatgccggacaagggggagagggcccatggccaccgccaccagcaccagcactggaagaaccagcagtcggcgacagctgctgacctggaggagggggagctgcttaatggggaggccgggaccaatgggttgcccgagaggagcatgccacctaagaagtggaggaaggtgctggcagcctccgcagctgctgtggaggtggagcctggggagattgtgagtacaaagcaagcagtgccattgaagaaggaaagaagaaacggggacgttgagaaggtagagctgctgccagagaggcagaggaaggaaaagtcttctgggaagagcaccaggaagtctatcaaggatgatgtggagccaggggagattgcactgccaggaaaaaggcgggatgccaagtcccaactggcccatgataacagcaggaggccaagttcgtctgcccagaaaggctccttgcgggattctgatgaagaacctggtgaaattaagccagagagcggcatcagtggcagtgtaaggaagaaccggccaacagagcctcatagcagtaaccacaagcaccacactgacacctctgaccagtcaggatcaaaacatcgcaggaagggagaaggaaagagttcatctgctgccagacatttgtctgggagaattcgtgaggtctcgccaccaacacgggatcggcgtgataagcacgagaggagcccaggcatcttgggccgttttcctcatgaccgttttcgtcatgacaggtatgacaggagcccgagccgcttggagcgttccccacatcgcactcgccactatgatagcagagaccgcagtccatatatttcacctcgacatagagctcgtccgccccaattcagggataacacaccaagtcgtgttgataattcccctcgtgggagggtccagcatgaagatatcagagaccgtagcccatttcgtcatgacaggtcgccttctgaacgttgtcgtcctactgacacgcatgaagcaagcaagaagagcagaagtagcaacaactcagagaagtcacatcacaaaagcaaatcagcgaagcaatcttcaaaaatcaagagtggtagcaatgggaagaatgaggagaaaatctccaaagaaaagcacactgaaagcagtcagtacactgaactgccaccaccacctcctcttcctctaccaccgccaccaccaccgccgccgccaccgccacccctgccgcctgctgtaccacctccattgcctccatcaccagaacctgagccacctggagttctagccgaggatatgatagaagacatggatatctgtgacaccccacctcacactagtgcagtacctgaacccacagaaccaatttgtgatatagggaggtggttttaccttgatcacttcggtatcgagcaaggaccttccaaacttgctgagctgaagaagctggtgcaagatggatatcttctttctgaccatctgataaaacatgctgatagcaaccgatgggtgactgtagagaatgcagcttcaccactggtgccatctgatttcccctctttatattcggacacttcaacacagttggtcaacccaccagaagccccaggaaatttgctcgatgaagctctagaggaggcttctaacttggcatcaggagctgaggataaacaaatggaggaaacgtctgcagaagatagtgaagaattctgcattgatgatagggttgaagcactgatggatggatcaattttggtgcatggccaggagctcgagatcattggagagcttttaggtgcagattttcagcctgctgattggcaaagatggagtcgtcgtgaagattttactaggctcaatgtgcacactgaagtaaacaatgaaatcaatggaggcacagaaaatagagcaacagatgcttatggtcttgtttctgtggagaagaactttcatcataacgctgagtctagcgaatggttttctggtagatggtcttgcaaaggtggtgactggaggagaaatgacgaactaagccaagatactccattcaggaaaaaacttgttctcaatgaagggtatcctctgtgtcaaatgccaaaaggtagctgtgaggatccacgccggccctgcaaggatgagttgtactaccctgtacgtgctaaaaagtatgaactgccattgtgggcattctcattgacagaagaagatattgatagtgttaatgacaccactaaaagcggtgttgtgcctgggaggccaggtcagaccagacagccttctaggggagtgaagggcatgatgctttcagtggttaggataaattctcgtgttgttaaagatcaatcatctgttgaaccccatacaaaacccagaggaactgatcgaccactgtcgaggtcttcacgctcccattcaattggagctgagagaagttctgtccatgaaggttcgtctcatttcaggaagcaccatgaccatgattcacaaagttcgcacaagtccaagcctgttccaaacattccaaaggaccgtgtatgcactgttgatgagctgtcagtttatcggggtgactggtattaccttgatggcactgggcatgagcatggtccattttcttattctgaattgcaagaattagttaaaaatggcactatcattgaacaaagtagtgtgttccgtaagattgataacacatggtttccagttcttaaggatttaaaacctggaagctctgttcccagtgcagcacgaagctcaagttttactgctgctcttatgctcccagaccaatataattttggtgtgaaccaaggatcaggtagcttcaatcagttgcacccccagtttgtgggttatacacgtggtaaattacatgaactagtcatgaaatatttcaagagcagggaacttactttagctataaatgaggtcttggatccctggatctcagcaaagcagccaaaaaaagagtttgaagcatacttctcccacaattcagcatctagaaatttgctgccagatggtgggtctgcaaaaaaggcaaagttgctacctgatcagagtgatgaagatattcatttgtcacaagacattcttgccagtcggaaggaggacatctgttttgacgagctatgtgatgcagaaccttctgttgataatgattctctgaatcccggagcaggaaatgaaacctggggtctactaaacggccatgtgttagcaagaatcttccattttatgagggcagatgtgaaagcacttatttcttctgcagctacctgtaggagctggaatgctgctgtgaagtattacagaaacatgtgtagattcattgatctgtcttctgttggccctctttgcactgattctgtgttttgtgatattatggctggttatgagaagcaaaatattaggacccttattttagctggttgttcgaatcttagttcgcatgcccttggcagagtacttgagcagcttccacaaatatcttatgttgacatccatggttgcggtcatctaggggatctgaaaaataaatttcagcatgtaaaatggatcaggagctcattgaatccagaggagtcatatcggaaaattaaaaccttgaagcagataggtgatgggaacaactacgcatccaaagttgcaaggaacttcaccaatcatctggatggttctgatgagcttgatgggtattttgctgatatttcaaatagagagaatgctaacctttcatttggacaaggtttctataaacgatcaaaattgcttgatgctagaaagtcctctgcggttttgtcgagggatgcagaaatgaggcggttgatgcagagacaggcagagaccagttacagaaagatggaagagttcatcataaacagactgagagaaattatgaggagcaacagatttgattttttcattccaaaggtttccaagattgaaggtaggctaaaaaacgggtattatgctcgccatggctttcgtaccatcaagcatgacatccgtaccatgtgccaagatgcattgagatataaagatggcaatgattcgggagatataaagcaaattgttgtctccttcatacagctagcaaagagactagggaacccaaggtacatttctgatagatatggagcaggagcccaggacagcctggacattaatcaatattcatttgatactaaactcaaaaagaagcaaaataaaataagaggagcaaattcattggctgctggagcagataattcatctcgtgcatttgaccttgaaatcaaaagaagcctatctaaattaaagaaaaaggatgtctactctggtagcgaaacatctgatgatgatgatggctactctgaagttgatgaaactgagagcgaaactactgtttctgatactgagagtgaccttgatgtaaattctggagcctgggatttaaaaggaaacagtctaaagttaattgaacctggggaatctgtgaccgatgatcgtatattgggtgcccgcatgacaaaggccagccttgttcctccagttactaggaagtatgaagttatcgaggagtaccttattgtagcagatttggaggaagtacagcgaaaaatgagagttgctttacctgatgactattctgagaagttgctgtcacagaagaatggcaccgaaaacttggaacttccagaggttaaggattatcaaccccgaaaagtagcaggagatgaaattcttgagcaagaagtatatggcatagatccatacacacacaatctactgagtgacattatgcctgctgatcttgagttgtcacctactgacaagcatatctttattgaggagttgcttctgaatacattgaataagcaagttaggcatttcactggttcgggaaatacccctatgacttacaaccttaggcctgtcattgaagagatccaaaggtctgcagaggataatggtgatagacgaacttcaaagatgtgcttggggatgctaaagaccatgagaaatcgctctgaacagaacttcgttgcttatagaaagggtctcggtgttgtttgcaacaaaaaaggtggatttggtgtagatgactttgttgtagagttctttggggaggtttacccttcttggagatggtatgaaaagcaagatggtattaaacatatacaaaacaacagtgaagatcaagctcctgagttttacaacattatgttagaaaggccaaagggagacggagatggatatgacttggtttttgttgatgcgatgcacaaggccaactacgctagtagaatctgccactcctgcaacccaaactgcgaagcaaaagtgacagcagtgaatggtaaataccagattggagtttacacacttcgaccaattgcagaaggcgaggaaatcacttttgattacaattctgtaactgagagcaaagaagagcatgaagcatcagtctgcctctgtggaagtcaagtatgccgtggcagctatttgaatttttctggtgaaggagcctttgagaaggtattaatggaattccatggtgtgctcgataggcatagcctgctgctacaggcttgtgaaacagactctgtctctcaacaagacttaattgacttgggtagagctggtcttggtacctgtttgcttgctggtttgcctggatggcttgttgcttacacagctcacctggtgcggtttatataccttgagagacagaaactccctgatgagatcttaaggcacaatgtggatgagaagcgccagttccttatagaaataaacatggattctgagaagaatgatgctgaggttcaggcagagggagtattaaattcaagattacaacaaatagtgcatacacttgacaaggtgagatatgttatgagatgcatatttggagacccaaagaatgctcctcctcctcttgtaaggttgtctgggaaaagtctggtatctgccatctggaaaggggacagttcaatagttgctgaactcattcagtcgatggaacctcatgttgaagaagaggtacttagtgatctgaaggccaaaatccgtgctcatgatccgtcagagtctgaagatattgagggaggcatccggaattctctcttgtggctgcgtgatgaattgcgaactctttcatgcacttacaagtgccgtcatgatgctgctgcagatttgattcatttgtatgcttatacaaagtgcttcttccgagtccgggattataagacagtaaaatctccaccagttcatatcagtccgcttgacttaggccccaaatatgctgataaactgggaccaggctttcaggagtactgcaagacatacccagaaaattattgcttagcccagcttatctattggtatagccagaattcagaacctgaatctagattaacaagagctagaaaaggttgcatgtcgttgccagatgtctcatccttctatgtgaagtctgcaaaaccatcacaagagcgagcttatggaaacagaactgtgagattcatgttatcgcgcatggaaaagcaggcacaaagaccatggccaaaggataggatatgggtgttcaagagtgatccgagattctttggtagtccaatgatggacaccgtgttgaataattccccgcttgacaaggagatggtgcactggctcaagactagaccaaatgttttcctaggctagtaaaaaaggtttgtaggcagataaggtggtatttggttctttctcctttttggagattttagtctacatgattctttttccgactcacaccttggctacctgatcatggggagtttagcttttagatagcagggtagtctcaccacccccatctgtacattcctctctccctactttccttgtagagatgtatctggttaataactgatagattcgtcattgatttgatgtagtgaattttccccataggaatgctccctcttttgtttcatgtaaatgcagaacaatttcaatcttgaattcagtaatgtgttacaggcatgttgcatttctgtggttcagttcgttgtttcaatcaataaaatgttttaggggcttataggtttcattcat

SEQ ID NO: 219411 - DNA, 7542 bp, Zea Mays
ctctcctccgggagagggatagagtgcgtccgtcttcgttccttgccccccttccttcagaagagcgaggccgcggtcgcggaggaggctttacgaacaaacgagccattagtccccaaaagccaacacacaaacccaggcgatagcgagcgcgcccgcgaaggctacgacgcgagagcgcgcgaggtgtggagcccccaatcccggaagcttccttggccgcgcgcagggcgcgggagtgggagctcgccgccggttaccgagccctctccgccgcggatctcccgatctgagacgccactcgtcaattccccgcagggttttgcggtgccagcgacggacatgagcgtggagagcccaggggagctagggttctgaagcgcaccgtggggcacagcgtggcgaacgacggcccccgacatcctgctaggttttccatgggagatgggggagtcgcgtgcgccgtccgctcagtcgagagcttccgtgccggcgccctcgtgaggagaggaggagcgggagaagcgatgccggacaagggggagagggcccatggccaccgccaccagcaccagcactggaagaaccagcagtcggcgacagctgctgacctggaggagggggagctgcttaatggggaggccgggaccaatgggttgcccgagaggagcatgccacctaagaagtggaggaaggtgctggcagcctccgcagctgctgtggaggtggagcctggggagattgtgagtacaaagcaagcagtgccattgaagaaggaaagaagaaacggggacgttgagaaggtagagctgctgccagagaggcagaggaaggaaaagtcttctgggaagagcaccaggaagtctatcaaggatgatgtggagccaggggagattgcactgccaggaaaaaggcgggatgccaagtcccaactggcccatgataacagcaggaggccaagttcgtctgcccagaaaggctccttgcgggattctgatgaagaacctggtgaaattaagccagagagcggcatcagtggcagtgtaaggaagaaccggccaacagagcctcatagcagtaaccacaagcaccacactgacacctctgaccagtcaggatcaaaacatcgcaggaagggagaaggaaagagttcatctgctgccagacatttgtctgggagaattcgtgaggtctcgccaccaacacgggatcggcgtgataagcacgagaggagcccaggcatcttgggccgttttcctcatgaccgttttcgtcatgacaggtatgacaggagcccgagccgcttggagcgttccccacatcgcactcgccactatgatagcagagaccgcagtccatatatttcacctcgacatagagctcgtccgccccaattcagggataacacaccaagtcgtgttgataattcccctcgtgggagggtccagcatgaagatatcagagaccgtagcccatttcgtcatgacaggtcgccttctgaacgttgtcgtcctactgacacgcatgaagcaagcaagaagagcagaagtagcaacaactcagagaagtcacatcacaaaagcaaatcagcgaagcaatcttcaaaaatcaagagtggtagcaatgggaagaatgaggagaaaatctccaaagaaaagcacactgaaagcagtcagtacactgaactgccaccaccacctcctcttcctctaccaccgccaccaccaccgccgccgccaccgccacccctgccgcctgctgtaccacctccattgcctccatcaccagaacctgagccacctggagttctagccgaggatatgatagaagacatggatatctgtgacaccccacctcacactagtgcagtacctgaacccacagaaccaatttgtgatatagggaggtggttttaccttgatcacttcggtatcgagcaaggaccttccaaacttgctgagctgaagaagctggtgcaagatggatatcttctttctgaccatctgataaaacatgctgatagcaaccgatgggtgactgtagagaatgcagcttcaccactggtgccatctgatttcccctctttatattcggacacttcaacacagttggtcaacccaccagaagccccaggaaatttgctcgatgaagctctagaggaggcttctaacttggcatcaggagctgaggataaacaaatggaggaaacgtctgcagaagatagtgaagaattctgcattgatgatagggttgaagcactgatggatggatcaattttggtgcatggccaggagctcgagatcattggagattttactaggctcaatgtgcacactgaagtaaacaatgaaatcaatggaggcacagaaaatagagcaacagatgcttatggtcttgtttctgtggagaagaactttcatcataacgctgagtctagcgaatggttttctggtagatggtcttgcaaaggtggtgactggaggagaaatgacgaactaagccaagatactccattcaggaaaaaacttgttctcaatgaagggtatcctctgtgtcaaatgccaaaaggtagctgtgaggatccacgccggccctgcaaggatgagttgtactaccctgtacgtgctaaaaagtatgaactgccattgtgggcattctcattgacagaagaagatattgatagtgttaatgacaccactaaaagcggtgttgtgcctgggaggccaggtcagaccagacagccttctaggggagtgaagggcatgatgctttcagtggttaggataaattctcgtgttgttaaagatcaatcatctgttgaaccccatacaaaacccagaggaactgatcgaccactgtcgaggtcttcacgctcccattcaattggagctgagagaagttctgtccatgaaggttcgtctcatttcaggaagcaccatgaccatgattcacaaagttcgcacaagtccaagcctgttccaaacattccaaaggaccgtgtatgcactgttgatgagctgtcagtttatcggggtgactggtattaccttgatggcactgggcatgagcatggtccattttcttattctgaattgcaagaattagttaaaaatggcactatcattgaacaaagtagtgtgttccgtaagattgataacacatggtttccagttcttaaggatttaaaacctggaagctctgttcccagtgcagcacgaagctcaagttttactgctgctcttatgctcccagaccaatataattttggtgtgaaccaaggatcaggtagcttcaatcagttgcacccccagtttgtgggttatacacgtggtaaattacatgaactagtcatgaaatatttcaagagcagggaacttactttagctataaatgaggtcttggatccctggatctcagcaaagcagccaaaaaaagagtttgaagcatacttctcccacaattcagcatctagaaatttgctgccagaagatggtgggtctgcaaaaaaggcaaagttgctacctgatcagagtgatgaagatattcatttgtcacaagacattcttgccagtcggaaggaggacatctgttttgacgagctatgtgatgcagaaccttctgttgataatgattctctgaatcccggagcaggaaatgaaacctggggtctactaaacggccatgtgttagcaagaatcttccattttatgagggcagatgtgaaagcacttatttcttctgcagctacctgtaggagctggaatgctgctgtgaagtattacagaaacatgtgtagattcattgatctgtcttctgttggccctctttgcactgattctgtgttttgtgatattatggctggttatgagaagcaaaatattaggacccttattttagctggttgttcgaatcttagttcgcatgcccttggcagagtacttgagcagcttccacaaatatcttatgttgacatccatggttgcggtcatctaggggatctgaaaaataaatttcagcatgtaaaatggatcaggagctcattgaatccagaggagtcatatcggaaaattaaaaccttgaagcagataggtgatgggaacaactacgcatccaaagttgcaaggaacttcaccaatcatctggatggttctgatgagcttgatgggtattttgctgatatttcaaatagagagaatgctaacctttcatttggacaaggtttctataaacgatcaaaattgcttgatgctagaaagtcctctgcggttttgtcgagggatgcagaaatgaggcggttgatgcagagacaggcagagaccagttacagaaagatggaagagttcatcataaacagactgagagaaattatgaggagcaacagatttgattttttcattccaaaggtttccaagattgaaggtaggctaaaaaacgggtattatgctcgccatggctttcgtaccatcaagcatgacatccgtaccatgtgccaagatgcattgagatataaagatggcaatgattcgggagatataaagcaaattgttgtctccttcatacagctagcaaagagactagggaacccaaggtacatttctgatagatatggagcaggagcccaggacagcctggacattaatcaatattcatttgatactaaactcaaaaagaagcaaaataaaataagaggagcaaattcattggctgctggagcagataattcatctcgtgcatttgaccttgaaatcaaaagaagcctatctaaattaaagaaaaaggatgtctactctggtagcgaaacatctgatgatgatgatggctactctgaagttgatgaaactgagagcgaaactactgtttctgatactgagagtgaccttgatgtaaattctggagcctgggatttaaaaggaaacagtctaaagttaattgaacctggggaatctgtgaccgatgatcgtatattgggtgcccgcatgacaaaggccagccttgttcctccagttactaggaagtatgaagttatcgaggagtaccttattgtagcagatttggaggaagtacagcgaaaaatgagagttgctttacctgatgactattctgagaagttgctgtcacagaagaatggcaccgaaaacttggaacttccagaggttaaggattatcaaccccgaaaagtagcaggagatgaaattcttgagcaagaagtatatggcatagatccatacacacacaatctactgagtgacattatgcctgctgatcttgagttgtcacctactgacaagcatatctttattgaggagttgcttctgaatacattgaataagcaagttaggcatttcactggttcgggaaatacccctatgacttacaaccttaggcctgtcattgaagagatccaaaggtctgcagaggataatggtgatagacgaacttcaaagatgtgcttggggatgctaaagaccatgagaaatcgctctgaacagaacttcgttgcttatagaaagggtctcggtgttgtttgcaacaaaaaaggtggatttggtgtagatgactttgttgtagagttctttggggaggtttacccttcttggagatggtatgaaaagcaagatggtattaaacatatacaaaacaacagtgaagatcaagctcctgagttttacaacattatgttagaaaggccaaagggagacggagatggatatgacttggtttttgttgatgcgatgcacaaggccaactacgctagtagaatctgccactcctgcaacccaaactgcgaagcaaaagtgacagcagtgaatggtaaataccagattggagtttacacacttcgaccaattgcagaaggcgaggaaatcacttttgattacaattctgtaactgagaagagcatgaagcatcagtctgcctctgtggaagtcaagtatgccgtggcagctatttgaatttttctggtgaaggagcctttgagaaggtattaatggaattccatggtgtgctcgataggcatagcctgctgctacaggcttgtgaaacagactctgtctctcaacaagacttaattgacttgggtagagctggtcttggtacctgtttgcttgctggtttgcctggatggcttgttgcttacacagctcacctggtgcggtttatataccttgagagacagaaactccctgatgagatcttaaggcacaatgtggatgagaagcgccagttccttatagaaataaacatggattctgagaagaatgatgctgaggttcagagggagtattaaattcaagattacaacaaatagtgcatacacttgacaaggtgagatatgttatgagatgcatatttggagacccaaagaatgctcctcctcctcttgtaaggttgtctgggaaaagtctggtatctgccatctggaaaggggacagttcaatagttgctgaactcattcagtcgatggaacctcatgttgaagaagaggtacttagtgatctgaaggccaaaatccgtgctcatgatccgtcagagtctgaagatattgagggaggcatccggaattctctcttgtggctgcgtgatgaattgcgaactctttcatgcacttacaagtgccgtcatgatgctgctgcagatttgattcatttgtatgcttatacaaagtgcttcttccgagtccgggattataagacagtaaaatctccaccagttcatatcagtccgcttgacttaggccccaaatatgctgataaactgggaccaggctttcaggagtactgcaagacatacccagaaaattattgcttagcccagcttatctattggtatagccagaattcagaacctgaatctagattaacaagagctagaaaaggttgcatgtcgttgccagatgtctcatccttctatgtgaagtctgcaaaaccatcacaagagcgagcttatggaaacagaactgtgagattcatgttatcgcgcatggaaaagcaggcacaaagaccatggccaaaggataggatatgggtgttcaagagtgatccgagattctttggtagtccaatgatggacaccgtgttgaataattccccgcttgacaaggagatggtgcactggctcaagactagaccaaatgttttcctaggctagtaaaaaaggtttgtaggcagataaggtggtatttggttctttctcctttttggagattttagtctacatgattctttttccgactcacaccttggctacctgatcatggggagtttagcttttagatagcagggtagtctcaccacccccatctgtacattcctctctccctactttccttgtagagatgtatctggttaataactgatagattcgtcattgatttgatgtagtgaattttccccataggaatgctccctcttttgtttcatgtaaatgcagaacaatttcaatcttgaattcagtaatgtgttacaggcatgttgcatttctgtggttcagttcgttgtttcaatcaataaaatgttttaggggcttataggtttcattcat

SEQ ID NO: 219412 - DNA, 7599 bp, Zea Mays
ctctcctccgggagagggatagagtgcgtccgtcttcgttccttgccccccttccttcagaagagcgaggccgcggtcgcggaggaggctttacgaacaaacgagccattagtccccaaaagccaacacacaaacccaggcgatagcgagcgcgcccgcgaaggctacgacgcgagagcgcgcgaggtgtggagcccccaatcccggaagcttccttggccgcgcgcagggcgcgggagtgggagctcgccgccggttaccgagccctctccgccgcggatctcccgatctgagacgccactcgtcaattccccgcagggttttgcggtgccagcgacggacatgagcgtggagagcccaggggagctagggttctgaagcgcaccgtggggcacagcgtggcgaacgacggcccccgacatcctgctaggttttccatgggagatgggggagtcgcgtgcgccgtccgctcagtcgagagcttccgtgccggcgccctcgtgaggagaggaggagcgggagaagcgatgccggacaagggggagagggcccatggccaccgccaccagcaccagcactggaagaaccagcagtcggcgacagctgctgacctggaggagggggagctgcttaatggggaggccgggaccaatgggttgcccgagaggagcatgccacctaagaagtggaggaaggtgctggcagcctccgcagctgctgtggaggtggagcctggggagattgtgagtacaaagcaagcagtgccattgaagaaggaaagaagaaacggggacgttgagaaggtagagctgctgccagagaggcagaggaaggaaaagtcttctgggaagagcaccaggaagtctatcaaggatgatgtggagccaggggagattgcactgccaggaaaaaggcgggatgccaagtcccaactggcccatgataacagcaggaggccaagttcgtctgcccagaaaggctccttgcgggattctgatgaagaacctggtgaaattaagccagagagcggcatcagtggcagtgtaaggaagaaccggccaacagagcctcatagcagtaaccacaagcaccacactgacacctctgaccagtcaggatcaaaacatcgcaggaagggagaaggaaagagttcatctgctgccagacatttgtctgggagaattcgtgaggtctcgccaccaacacgggatcggcgtgataagcacgagaggagcccaggcatcttgggccgttttcctcatgaccgttttcgtcatgacaggtatgacaggagcccgagccgcttggagcgttccccacatcgcactcgccactatgatagcagagaccgcagtccatatatttcacctcgacatagagctcgtccgccccaattcagggataacacaccaagtcgtgttgataattcccctcgtgggagggtccagcatgaagatatcagagaccgtagcccatttcgtcatgacaggtcgccttctgaacgttgtcgtcctactgacacgcatgaagcaagcaagaagagcagaagtagcaacaactcagagaagtcacatcacaaaagcaaatcagcgaagcaatcttcaaaaatcaagagtggtagcaatgggaagaatgaggagaaaatctccaaagaaaagcacactgaaagcagtcagtacactgaactgccaccaccacctcctcttcctctaccaccgccaccaccaccgccgccgccaccgccacccctgccgcctgctgtaccacctccattgcctccatcaccagaacctgagccacctggagttctagccgaggatatgatagaagacatggatatctgtgacaccccacctcacactagtgcagtacctgaacccacagaaccaatttgtgatatagggaggtggttttaccttgatcacttcggtatcgagcaaggaccttccaaacttgctgagctgaagaagctggtgcaagatggatatcttctttctgaccatctgataaaacatgctgatagcaaccgatgggtgactgtagagaatgcagcttcaccactggtgccatctgatttcccctctttatattcggacacttcaacacagttggtcaacccaccagaagccccaggaaatttgctcgatgaagctctagaggaggcttctaacttggcatcaggagctgaggataaacaaatggaggaaacgtctgcagaagatagtgaagaattctgcattgatgatagggttgaagcactgatggatggatcaattttggtgcatggccaggagctcgagatcattggagagcttttaggtgcagattttcagcctgctgattggcaaagatggagtcgtcgtgaagattttactaggctcaatgtgcacactgaagtaaacaatgaaatcaatggaggcacagaaaatagagcaacagatgcttatggtcttgtttctgtggagaagaactttcatcataacgctgagtctagcgaatggttttctggtagatggtcttgcaaaggtggtgactggaggagaaatgacgaactaagccaagatactccattcaggaaaaaacttgttctcaatgaagggtatcctctgtgtcaaatgccaaaaggtagctgtgaggatccacgccggccctgcaaggatgagttgtactaccctgtacgtgctaaaaagtatgaactgccattgtgggcattctcattgacagaagaagatattgatagtgttaatgacaccactaaaagcggtgttgtgcctgggaggccaggtcagaccagacagccttctaggggagtgaagggcatgatgctttcagtggttaggataaattctcgtgttgttaaagatcaatcatctgttgaaccccatacaaaacccagaggaactgatcgaccactgtcgaggtcttcacgctcccattcaattggagctgagagaagttctgtccatgaaggttcgtctcatttcaggaagcaccatgaccatgattcacaaagttcgcacaagtccaagcctgttccaaacattccaaaggaccgtgtatgcactgttgatgagctgtcagtttatcggggtgactggtattaccttgatggcactgggcatgagcatggtccattttcttattctgaattgcaagaattagttaaaaatggcactatcattgaacaaagtagtgtgttccgtaagattgataacacatggtttccagttcttaaggatttaaaacctggaagctctgttcccagtgcagcacgaagctcaagttttactgctgctcttatgctcccagaccaatataattttggtgtgaaccaaggatcaggtagcttcaatcagttgcacccccagtttgtgggttatacacgtggtaaattacatgaactagtcatgaaatatttcaagagcagggaacttactttagctataaatgaggtcttggatccctggatctcagcaaagcagccaaaaaaagagtttgaagcatacttctcccacaattcagcatctagaaatttgctgccagaagatggtgggtctgcaaaaaaggcaaagttgctacctgatcagagtgatgaagatattcatttgtcacaagacattcttgccagtcggaaggaggacatctgttttgacgagctatgtgatgcagaaccttctgttgataatgattctctgaatcccggagcaggaaatgaaacctggggtctactaaacggccatgtgttagcaagaatcttccattttatgagggcagatgtgaaagcacttatttcttctgcagctacctgtaggagctggaatgctgctgtgaagtattacagaaacatgtgtagattcattgatctgtcttctgttggccctctttgcactgattctgtgttttgtgatattatggctggttatgagaagcaaaatattaggacccttattttagctggttgttcgaatcttagttcgcatgcccttggcagagtacttgagcagcttccacaaatatcttatgttgacatccatggttgcggtcatctaggggatctgaaaaataaatttcagcatgtaaaatggatcaggagctcattgaatccagaggagtcatatcggaaaattaaaaccttgaagcagataggtgatgggaacaactacgcatccaaagttgcaaggaacttcaccaatcatctggatggttctgatgagcttgatgggtattttgctgatatttcaaatagagagaatgctaacctttcatttggacaaggtttctataaacgatcaaaattgcttgatgctagaaagtcctctgcggttttgtcgagggatgcagaaatgaggcggttgatgcagagacaggcagagaccagttacagaaagatggaagagttcatcataaacagactgagagaaattatgaggagcaacagatttgattttttcattccaaaggtttccaagattgaaggtaggctaaaaaacgggtattatgctcgccatggctttcgtaccatcaagcatgacatccgtaccatgtgccaagatgcattgagatataaagatggcaatgattcgggagatataaagcaaattgttgtctccttcatacagctagcaaagagactagggaacccaaggtacatttctgatagatatggagcaggagcccaggacagcctggacattaatcaatattcatttgatactaaactcaaaaagaagcaaaataaaataagaggagcaaattcattggctgctggagcagataattcatctcgtgcatttgaccttgaaatcaaaagaagcctatctaaattaaagaaaaaggatgtctactctggtagcgaaacatctgatgatgatgatggctactctgaagttgatgaaactgagagcgaaactactgtttctgatactgagagtgaccttgatgtaaattctggagcctgggatttaaaaggaaacagtctaaagttaattgaacctggggaatctgtgaccgatgatcgtatattgggtgcccgcatgacaaaggccagccttgttcctccagttactaggaagtatgaagttatcgaggagtaccttattgtagcagatttggaggaagtacagcgaaaaatgagagttgctttacctgatgactattctgagaagttgctgtcacagaagaatggcaccgaaaacttggaacttccagaggttaaggattatcaaccccgaaaagtagcaggagatgaaattcttgagcaagaagtatatggcatagatccatacacacacaatctactgagtgacattatgcctgctgatcttgagttgtcacctactgacaagcatatctttattgaggagttgcttctgaatacattgaataagcaagttaggcatttcactggttcgggaaatacccctatgacttacaaccttaggcctgtcattgaagagatccaaaggtctgcagaggataatggtgatagacgaacttcaaagatgtgcttggggatgctaaagaccatgagaaatcgctctgaacagaacttcgttgcttatagaaagggtctcggtgttgtttgcaacaaaaaaggtggatttggtgtagatgactttgttgtagagttctttggggaggtttacccttcttggagatggtatgaaaagcaagatggtattaaacatatacaaaacaacagtgaagatcaagctcctgagttttacaacattatgttagaaaggccaaagacggagatggatatgacttggtttttgttgatgcgatgcacaaggccaactacgctagtagaatctgccactcctgcaacccaaactgcgaagcaaaagtgacagcagtgaatggtaaataccagattggagtttacacacttcgaccaattgcagaaggcgaggaaatcacttttgattacaattctgtaactgagaagagcatgaagcatcagtctgcctctgtggaagtcaagtatgccgtggcagctatttgaatttttctggtgaaggagcctttgagaaggtattaatggaattccatggtgtgctcgataggcatagcctgctgctacaggcttgtgaaacagactctgtctctcaacaagacttaattgacttgggtagagctggtcttggtacctgtttgcttgctggtttgcctggatggcttgttgcttacacagctcacctggtgcggtttatataccttgagagacagaaactccctgatgagatcttaaggcacaatgtggatgagaagcgccagttccttatagaaataaacatggattctgagaagaatgatgctgaggttcaggcagagggagtattaaattcaagattacaacaaatagtgcatacacttgacaaggtgagatatgttatgagatgcatatttggagacccaaagaatgctcctcctcctcttgtaaggttgtctgggaaaagtctggtatctgccatctggaaaggggacagttcaatagttgctgaactcattcagtcgatggaacctcatgttgaagaagaggtacttagtgatctgaaggccaaaatccgtgctcatgatccgtcagagtctgaagatattgagggaggcatccggaattctctcttgtggctgcgtgatgaattgcgaactctttcatgcacttacaagtgccgtcatgatgctgctgcagatttgattcatttgtatgcttatacaaagtgcttcttccgagtccgggattataagacagtaaaatctccaccagttcatatcagtccgcttgacttaggccccaaatatgctgataaactgggaccaggctttcaggagtactgcaagacatacccagaaaattattgcttagcccagcttatctattggtatagccagaattcagaacctgaatctagattaacaagagctagaaaaggttgcatgtcgttgccagatgtctcatccttctatgtgaagtctgcaaaaccatcacaagagcgagcttatggaaacagaactgtgagattcatgttatcgcgcatggaaaagcaggcacaaagaccatggccaaaggataggatatgggtgttcaagagtgatccgagattctttggtagtccaatgatggacaccgtgttgaataattccccgcttgacaaggagatggtgcactggctcaagactagaccaaatgttttcctaggctagtaaaaaaggtttgtaggcagataaggtggtatttggttctttctcctttttggagattttagtctacatgattctttttccgactcacaccttggctacctgatcatggggagtttagcttttagatagcagggtagtctcaccacccccatctgtacattcctctctccctactttccttgtagagatgtatctggttaataactgatagattcgtcattgatttgatgtagtgaattttccccataggaatgctccctcttttgtttcatgtaaatgcagaacaatttcaatcttgaattcagtaatgtgttacaggcatgttgcatttctgtggttcagttcgttgtttcaatcaataaaatgttttaggggcttataggtttcattcat

SEQ ID NO: 219413 - DNA, 7575 bp, Zea Mays
ctctcctccgggagagggatagagtgcgtccgtcttcgttccttgccccccttccttcagaagagcgaggccgcggtcgcggaggaggctttacgaacaaacgagccattagtccccaaaagccaacacacaaacccaggcgatagcgagcgcgcccgcgaaggctacgacgcgagagcgcgcgaggtgtggagcccccaatcccggaagcttccttggccgcgcgcagggcgcgggagtgggagctcgccgccggttaccgagccctctccgccgcggatctcccgatctgagacgccactcgtcaattccccgcagggttttgcggtgccagcgacggacatgagcgtggagagcccaggggagctagggttctgaagcgcaccgtggggcacagcgtggcgaacgacggcccccgacatcctgctaggttttccatgggagatgggggagtcgcgtgcgccgtccgctcagtcgagagcttccgtgccggcgccctcgtgaggagaggaggagcgggagaagcgatgccggacaagggggagagggcccatggccaccgccaccagcaccagcactggaagaaccagcagtcggcgacagctgctgacctggaggagggggagctgcttaatggggaggccgggaccaatgggttgcccgagaggagcatgccacctaagaagtggaggaaggtgctggcagcctccgcagctgctgtggaggtggagcctggggagattgtgagtacaaagcaagcagtgccattgaagaaggaaagaagaaacggggacgttgagaaggtagagctgctgccagagaggcagaggaaggaaaagtcttctgggaagagcaccaggaagtctatcaaggatgatgtggagccaggggagattgcactgccaggaaaaaggcgggatgccaagtcccaactggcccatgataacagcaggaggccaagttcgtctgcccagaaaggctccttgcgggattctgatgaagaacctggtgaaattaagccagagagcggcatcagtggcagtgtaaggaagaaccggccaacagagcctcatagcagtaaccacaagcaccacactgacacctctgaccagtcaggatcaaaacatcgcaggaagggagaaggaaagagttcatctgctgccagacatttgtctgggagaattcgtgaggtctcgccaccaacacgggatcggcgtgataagcacgagaggagcccaggcatcttgggccgttttcctcatgaccgttttcgtcatgacaggtatgacaggagcccgagccgcttggagcgttccccacatcgcactcgccactatgatagcagagaccgcagtccatatatttcacctcgacatagagctcgtccgccccaattcagggataacacaccaagtcgtgttgataattcccctcgtgggagggtccagcatgaagatatcagagaccgtagcccatttcgtcatgacaggtcgccttctgaacgttgtcgtcctactgacacgcatgaagcaagcaagaagagcagaagtagcaacaactcagagaagtcacatcacaaaagcaaatcagcgaagcaatcttcaaaaatcaagagtggtagcaatgggaagaatgaggagaaaatctccaaagaaaagcacactgaaagcagtcagtacactgaactgccaccaccacctcctcttcctctaccaccgccaccaccaccgccgccgccaccgccacccctgccgcctgctgtaccacctccattgcctccatcaccagaacctgagccacctggagttctagccgaggatatgatagaagacatggatatctgtgacaccccacctcacactagtgcagtacctgaacccacagaaccaatttgtgatatagggaggtggttttaccttgatcacttcggtatcgagcaaggaccttccaaacttgctgagctgaagaagctggtgcaagatggatatcttctttctgaccatctgataaaacatgctgatagcaaccgatgggtgactgtagagaatgcagcttcaccactggtgccatctgatttcccctctttatattcggacacttcaacacagttggtcaacccaccagaagccccaggaaatttgctcgatgaagctctagaggaggcttctaacttggcatcaggagctgaggataaacaaatggaggaaacgtctgcagaagatagtgaagaattctgcattgatgatagggttgaagcactgatggatggatcaattttggtgcatggccaggagctcgagatcattggagagcttttaggtgcagattttcagcctgctgattggcaaagatggagtcgtcgtgaagattttactaggctcaatgtgcacactgaagtaaacaatgaaatcaatggaggcacagaaaatagagcaacagatgcttatggtcttgtttctgtggagaagaactttcatcataacgctgagtctagcgaatggttttctggtagatggtcttgcaaaggtggtgactggaggagaaatgacgaactaagccaagatactccattcaggaaaaaacttgttctcaatgaagggtatcctctgtgtcaaatgccaaaaggtagctgtgaggatccacgccggccctgcaaggatgagttgtactaccctgtacgtgctaaaaagtatgaactgccattgtgggcattctcattgacagaagaagatattgatagtgttaatgacaccactaaaagcggtgttgtgcctgggaggccaggtcagaccagacagccttctaggggagtgaagggcatgatgctttcagtggttaggataaattctcgtgttgttaaagatcaatcatctgttgaaccccatacaaaacccagaggaactgatcgaccactgtcgaggtcttcacgctcccattcaattggagctgagagaagttctgtccatgaaggttcgtctcatttcaggaagcaccatgaccatgattcacaaagttcgcacaagtccaagcctgttccaaacattccaaaggaccgtgtatgcactgttgatgagctgtcagtttatcggggtgactggtattaccttgatggcactgggcatgagcatggtccattttcttattctgaattgcaagaattagttaaaaatggcactatcattgaacaaagtagtgtgttccgtaagattgataacacatggtttccagttcttaaggatttaaaacctggaagctctgttcccagtgcagcacgaagctcaagttttactgctgctcttatgctcccagaccaatataattttggtgtgaaccaaggatcaggtagcttcaatcagttgcacccccagtttgtgggttatacacgtggtaaattacatgaactagtcatgaaatatttcaagagcagggaacttactttagctataaatgaggtcttggatccctggatctcagcaaagcagccaaaaaaagagtttgaagcatacttctcccacaattcagcatctagaaatttgctgccagaagatggtgggtctgcaaaaaaggcaaagttgctacctgatcagagtgatgaagatattcatttgtcacaagacattcttgccagtcggaaggaggacatctgttttgacgagctatgtgatgcagaaccttctgttgataatgattctctgaatcccggagcaggaaatgaaacctggggtctactaaacggccatgtgttagcaagaatcttccattttatgagggcagatgtgaaagcacttatttcttctgcagctacctgtaggagctggaatgctgctgtgaagtattacagaaacatgtgtagattcattgatctgtcttctgttggccctctttgcactgattctgtgttttgtgatattatggctggttatgagaagcaaaatattaggacccttattttagctggttgttcgaatcttagttcgcatgcccttggcagagtacttgagcagcttccacaaatatcttatgttgacatccatggttgcggtcatctaggggatctgaaaaataaatttcagcatgtaaaatggatcaggagctcattgaatccagaggagtcatatcggaaaattaaaaccttgaagcagataggtgatgggaacaactacgcatccaaagttgcaaggaacttcaccaatcatctggatggttctgatgagcttgatgggtattttgctgatatttcaaatagagagaatgctaacctttcatttggacaaggtttctataaacgatcaaaattgcttgatgctagaaagtcctctgcggttttgtcgagggatgcagaaatgaggcggttgatgcagagacaggcagagaccagttacagaaagatggaagagttcatcataaacagactgagagaaattatgaggagcaacagatttgattttttcattccaaaggtttccaagattgaaggtaggctaaaaaacgggtattatgctcgccatggctttcgtaccatcaagcatgacatccgtaccatgtgccaagatgcattgagatataaagatggcaatgattcgggagatataaagcaaattgttgtctccttcatacagctagcaaagagactagggaacccaaggtacatttctgatagatatggagcaggagcccaggacagcctggacattaatcaatattcatttgatactaaactcaaaaagaagcaaaataaaataagaggagcaaattcattggctgctggagcagataattcatctcgtgcatttgaccttgaaatcaaaagaagcctatctaaattaaagaaaaaggatgtctactctggtagcgaaacatctgatgatgatgatggctactctgaagttgatgaaactgagagcgaaactactgtttctgatactgagagtgaccttgatgtaaattctggagcctgggatttaaaaggaaacagtctaaagttaattgaacctggggaatctgtgaccgatgatcgtatattgggtgcccgcatgacaaaggccagccttgttcctccagttactaggaagtatgaagttatcgaggagtaccttattgtagcagatttggaggaagtacagcgaaaaatgagagttgctttacctgatgactattctgagaagttgctgtcacagaagaatggcaccgaaaacttggaacttccagaggttaaggattatcaaccccgaaaagtagcaggagatgaaattcttgagcaagaagtatatggcatagatccatacacacacaatctactgagtgacattatgcctgctgatcttgagttgtcacctactgacaagcatatctttattgaggagttgcttctgaatacattgaataagcaagttaggcatttcactggttcgggaaatacccctatgacttacaaccttaggcctgtcattgaagagatccaaaggtctgcagaggataatggtgatagacgaacttcaaagatgtgcttggggatgctaaagaccatgagaaatcgctctgaacagaacttcgttgcttatagaaaggtggatttggtgtagatgactttgttgtagagttctttggggaggtttacccttcttggagatggtatgaaaagcaagatggtattaaacatatacaaaacaacagtgaagatcaagctcctgagttttacaacattatgttagaaaggccaaagggagacggagatggatatgacttggtttttgttgatgcgatgcacaaggccaactacgctagtagaatctgccactcctgcaacccaaactgcgaagcaaaagtgacagcagtgaatggtaaataccagattggagtttacacacttcgaccaattgcagaaggcgaggaaatcacttttgattacaattctgtaactgagaagagcatgaagcatcagtctgcctctgtggaagtcaagtatgccgtggcagctatttgaatttttctggtgaaggagcctttgagaaggtattaatggaattccatggtgtgctcgataggcatagcctgctgctacaggcttgtgaaacagactctgtctctcaacaagacttaattgacttgggtagagctggtcttggtacctgtttgcttgctggtttgcctggatggcttgttgcttacacagctcacctggtgcggtttatataccttgagagacagaaactccctgatgagatcttaaggcacaatgtggatgagaagcgccagttccttatagaaataaacatggattctgagaagaatgatgctgaggttcaggcagagggagtattaaattcaagattacaacaaatagtgcatacacttgacaaggtgagatatgttatgagatgcatatttggagacccaaagaatgctcctcctcctcttgtaaggttgtctgggaaaagtctggtatctgccatctggaaaggggacagttcaatagttgctgaactcattcagtcgatggaacctcatgttgaagaagaggtacttagtgatctgaaggccaaaatccgtgctcatgatccgtcagagtctgaagatattgagggaggcatccggaattctctcttgtggctgcgtgatgaattgcgaactctttcatgcacttacaagtgccgtcatgatgctgctgcagatttgattcatttgtatgcttatacaaagtgcttcttccgagtccgggattataagacagtaaaatctccaccagttcatatcagtccgcttgacttaggccccaaatatgctgataaactgggaccaggctttcaggagtactgcaagacatacccagaaaattattgcttagcccagcttatctattggtatagccagaattcagaacctgaatctagattaacaagagctagaaaaggttgcatgtcgttgccagatgtctcatccttctatgtgaagtctgcaaaaccatcacaagagcgagcttatggaaacagaactgtgagattcatgttatcgcgcatggaaaagcaggcacaaagaccatggccaaaggataggatatgggtgttcaagagtgatccgagattctttggtagtccaatgatggacaccgtgttgaataattccccgcttgacaaggagatggtgcactggctcaagactagaccaaatgttttcctaggctagtaaaaaaggtttgtaggcagataaggtggtatttggttctttctcctttttggagattttagtctacatgattctttttccgactcacaccttggctacctgatcatggggagtttagcttttagatagcagggtagtctcaccacccccatctgtacattcctctctccctactttccttgtagagatgtatctggttaataactgatagattcgtcattgatttgatgtagtgaattttccccataggaatgctccctcttttgtttcatgtaaatgcagaacaatttcaatcttgaattcagtaatgtgttacaggcatgttgcatttctgtggttcagttcgttgtttcaatcaataaaatgttttaggggcttataggtttcattcat

SEQ ID NO: 219414 - DNA, 7600 bp, Zea Mays
ctctcctccgggagagggatagagtgcgtccgtcttcgttccttgccccccttccttcagaagagcgaggccgcggtcgcggaggaggctttacgaacaaacgagccattagtccccaaaagccaacacacaaacccaggcgatagcgagcgcgcccgcgaaggctacgacgcgagagcgcgcgaggtgtggagcccccaatcccggaagcttccttggccgcgcgcagggcgcgggagtgggagctcgccgccggttaccgagccctctccgccgcggatctcccgatctgagacgccactcgtcaattccccgcagggttttgcggtgccagcgacggacatgagcgtggagagcccaggggagctagggttctgaagcgcaccgtggggcacagcgtggcgaacgacggcccccgacatcctgctaggttttccatgggagatgggggagtcgcgtgcgccgtccgctcagtcgagagcttccgtgccggcgccctcgtgaggagaggaggagcgggagaagcgatgccggacaagggggagagggcccatggccaccgccaccagcaccagcactggaagaaccagcagtcggcgacagctgctgacctggaggagggggagctgcttaatggggaggccgggaccaatgggttgcccgagaggagcatgccacctaagaagtggaggaaggtgctggcagcctccgcagctgctgtggaggtggagcctggggagattgtgagtacaaagcaagcagtgccattgaagaaggaaagaagaaacggggacgttgagaaggtagagctgctgccagagaggcagaggaaggaaaagtcttctgggaagagcaccaggaagtctatcaaggatgatgtggagccaggggagattgcactgccaggaaaaaggcgggatgccaagtcccaactggcccatgataacagcaggaggccaagttcgtctgcccagaaaggctccttgcgggattctgatgaagaacctggtgaaattaagccagagagcggcatcagtggcagtgtaaggaagaaccggccaacagagcctcatagcagtaaccacaagcaccacactgacacctctgaccagtcaggatcaaaacatcgcaggaagggagaaggaaagagttcatctgctgccagacatttgtctgggagaattcgtgaggtctcgccaccaacacgggatcggcgtgataagcacgagaggagcccaggcatcttgggccgttttcctcatgaccgttttcgtcatgacaggtatgacaggagcccgagccgcttggagcgttccccacatcgcactcgccactatgatagcagagaccgcagtccatatatttcacctcgacatagagctcgtccgccccaattcagggataacacaccaagtcgtgttgataattcccctcgtgggagggtccagcatgaagatatcagagaccgtagcccatttcgtcatgacaggtcgccttctgaacgttgtcgtcctactgacacgcatgaagcaagcaagaagagcagaagtagcaacaactcagagaagtcacatcacaaaagcaaatcagcgaagcaatcttcaaaaatcaagagtggtagcaatgggaagaatgaggagaaaatctccaaagaaaagcacactgaaagcagtcagtacactgaactgccaccaccacctcctcttcctctaccaccgccaccaccaccgccgccgccaccgccacccctgccgcctgctgtaccacctccattgcctccatcaccagaacctgagccacctggagttctagccgaggatatgatagaagacatggatatctgtgacaccccacctcacactagtgcagtacctgaacccacagaaccaatttgtgatatagggaggtggttttaccttgatcacttcggtatcgagcaaggaccttccaaacttgctgagctgaagaagctggtgcaagatggatatcttctttctgaccatctgataaaacatgctgatagcaaccgatgggtgactgtagagaatgcagcttcaccactggtgccatctgatttcccctctttatattcggacacttcaacacagttggtcaacccaccagaagccccaggaaatttgctcgatgaagctctagaggaggcttctaacttggcatcaggagctgaggataaacaaatggaggaaacgtctgcagaagatagtgaagaattctgcattgatgatagggttgaagcactgatggatggatcaattttggtgcatggccaggagctcgagatcattggagagcttttaggtgcagattttcagcctgctgattggcaaagatggagtcgtcgtgaagattttactaggctcaatgtgcacactgaagtaaacaatgaaatcaatggaggcacagaaaatagagcaacagatgcttatggtcttgtttctgtggagaagaactttcatcataacgctgagtctagcgaatggttttctggtagatggtcttgcaaaggtggtgactggaggagaaatgacgaactaagccaagatactccattcaggaaaaaacttgttctcaatgaagggtatcctctgtgtcaaatgccaaaaggtagctgtgaggatccacgccggccctgcaaggatgagttgtactaccctgtacgtgctaaaaagtatgaactgccattgtgggcattctcattgacagaagaagatattgatagtgttaatgacaccactaaaagcggtgttgtgcctgggaggccaggtcagaccagacagccttctaggggagtgaagggcatgatgctttcagtggttaggataaattctcgtgttgttaaagatcaatcatctgttgaaccccatacaaaacccagaggaactgatcgaccactgtcgaggtcttcacgctcccattcaattggagctgagagaagttctgtccatgaaggttcgtctcatttcaggaagcaccatgaccatgattcacaaagttcgcacaagtccaagcctgttccaaacattccaaaggaccgtgtatgcactgttgatgagctgtcagtttatcggggtgactggtattaccttgatggcactgggcatgagcatggtccattttcttattctgaattgcaagaattagttaaaaatggcactatcattgaacaaagtagtgtgttccgtaagattgataacacatggtttccagttcttaaggatttaaaacctggaagctctgttcccagtgcagcacgaagctcaagttttactgctgctcttatgctcccagaccaatataattttggtgtgaaccaaggatcaggtagcttcaatcagttgcacccccagtttgtgggttatacacgtggtaaattacatgaactagtcatgaaatatttcaagagcagggaacttactttagctataaatgaggtcttggatccctggatctcagcaaagcagccaaaaaaagagtttgaagcatacttctcccacaattcagcatctagaaatttgctgccagatggtgggtctgcaaaaaaggcaaagttgctacctgatcagagtgatgaagatattcatttgtcacaagacattcttgccagtcggaaggaggacatctgttttgacgagctatgtgatgcagaaccttctgttgataatgattctctgaatcccggagcaggaaatgaaacctggggtctactaaacggccatgtgttagcaagaatcttccattttatgagggcagatgtgaaagcacttatttcttctgcagctacctgtaggagctggaatgctgctgtgaagtattacagaaacatgtgtagattcattgatctgtcttctgttggccctctttgcactgattctgtgttttgtgatattatggctggttatgagaagcaaaatattaggacccttattttagctggttgttcgaatcttagttcgcatgcccttggcagagtacttgagcagcttccacaaatatcttatgttgacatccatggttgcggtcatctaggggatctgaaaaataaatttcagcatgtaaaatggatcaggagctcattgaatccagaggagtcatatcggaaaattaaaaccttgaagcagataggtgatgggaacaactacgcatccaaagttgcaaggaacttcaccaatcatctggatggttctgatgagcttgatgggtattttgctgatatttcaaatagagagaatgctaacctttcatttggacaaggtttctataaacgatcaaaattgcttgatgctagaaagtcctctgcggttttgtcgagggatgcagaaatgaggcggttgatgcagagacaggcagagaccagttacagaaagatggaagagttcatcataaacagactgagagaaattatgaggagcaacagatttgattttttcattccaaaggtttccaagattgaaggtaggctaaaaaacgggtattatgctcgccatggctttcgtaccatcaagcatgacatccgtaccatgtgccaagatgcattgagatataaagatggcaatgattcgggagatataaagcaaattgttgtctccttcatacagctagcaaagagactagggaacccaaggtacatttctgatagatatggagcaggagcccaggacagcctggacattaatcaatattcatttgatactaaactcaaaaagaagcaaaataaaataagaggagcaaattcattggctgctggagcagataattcatctcgtgcatttgaccttgaaatcaaaagaagcctatctaaattaaagaaaaaggatgtctactctggtagcgaaacatctgatgatgatgatggctactctgaagttgatgaaactgagagcgaaactactgtttctgatactgagagtgaccttgatgtaaattctggagcctgggatttaaaaggaaacagtctaaagttaattgaacctggggaatctgtgaccgatgatcgtatattgggtgcccgcatgacaaaggccagccttgttcctccagttactaggaagtatgaagttatcgaggagtaccttattgtagcagatttggaggaagtacagcgaaaaatgagagttgctttacctgatgactattctgagaagttgctgtcacagaagaatggcaccgaaaacttggaacttccagaggttaaggattatcaaccccgaaaagtagcaggagatgaaattcttgagcaagaagtatatggcatagatccatacacacacaatctactgagtgacattatgcctgctgatcttgagttgtcacctactgacaagcatatctttattgaggagttgcttctgaatacattgaataagcaagttaggcatttcactggttcgggaaatacccctatgacttacaaccttaggcctgtcattgaagagatccaaaggtctgcagaggataatggtgatagacgaacttcaaagatgtgcttggggatgctaaagaccatgagaaatcgctctgaacagaacttcgttgcttatagaaagggtctcggtgttgtttgcaacaaaaaaggtggatttggtgtagatgactttgttgtagagttctttggggaggtttacccttcttggagatggtatgaaaagcaagatggtattaaacatatacaaaacaacagtgaagatcaagctcctgagttttacaacattatgttagaaaggccaaagggagacggagatggatatgacttggtttttgttgatgcgatgcacaaggccaactacgctagtagaatctgccactcctgcaacccaaactgcgaagcaaaagtgacagcagtgaatggtaaataccagattggagtttacacacttcgaccaattgcagaaggcgaggaaatcacttttgattacaattctgtaactgagaagagcatgaagcatcagtctgcctctgtggaagtcaagtatgccgtggcagctatttgaatttttctggtgaaggagcctttgagaaggtattaatggaattccatggtgtgctcgataggcatagcctgctgctacaggcttgtgaaacagactctgtctctcaacaagacttaattgacttgggtagagctggtcttggtacctgtttgcttgctggtttgcctggatggcttgttgcttacacagctcacctggtgcggtttatataccttgagagacagaaactccctgatgagatcttaaggcacaatgtggatgagaagcgccagttccttatagaaataaacatggattctgagaagaatgatgctgaggttcaggcagagggagtattaaattcaagattacaacaaatagtgcatacacttgacaaggtgagatatgttatgagatgcatatttggagacccaaagaatgctcctcctcctcttgtaaggttgtctgggaaaagtctggtatctgccatctggaaaggggacagttcaatagttgctgaactcattcagtcgatggaacctcatgttgaagaagaggtacttagtgatctgaaggccaaaatccgtgctcatgatccgtcagagtctgaagatattgagggaggcatccggaattctctcttgtggctgcgtgatgaattgcgaactctttcatgcacttacaagtgccgtcatgatgctgctgcagatttgattcatttgtatgcttatacaaagtgcttcttccgagtccgggattataagacagtaaaatctccaccagttcatatcagtccgcttgacttaggccccaaatatgctgataaactgggaccaggctttcaggagtactgcaagacatacccagaaaattattgcttagcccagcttatctattggtatagccagaattcagaacctgaatctagattaacaagagctagaaaaggttgcatgtcgttgccagatgtctcatccttctatgtgaagtctgcaaaaccatcacaagagcgagcttatggaaacagaactgtgagattcatgttatcgcgcatggaaaagcaggcacaaagaccatggccaaaggataggatatgggtgttcaagagtgatccgagattctttggtagtccaatgatggacaccgtgttgaataattccccgcttgacaaggagatggtgcactggctcaagactagaccaaatgttttcctaggctagtaaaaaaggtttgtaggcagataaggtggtatttggttctttctcctttttggagattttagtctacatgattctttttccgactcacaccttggctacctgatcatggggagtttagcttttagatagcagggtagtctcaccacccccatctgtacattcctctctccctactttccttgtagagatgtatctggttaataactgatagattcgtcattgatttgatgtagtgaattttccccataggaatgctccctcttttgtttcatgtaaatgcagaacaatttcaatcttgaattcagtaatgtgttacaggcatgttgcatttctgtggttcagttcgttgtttcaatcaataaaatgttttaggggcttataggtttcattcat

SEQ ID NO: 219415 - DNA, 7575 bp, Zea Mays
ctctcctccgggagagggatagagtgcgtccgtcttcgttccttgccccccttccttcagaagagcgaggccgcggtcgcggaggaggctttacgaacaaacgagccattagtccccaaaagccaacacacaaacccaggcgatagcgagcgcgcccgcgaaggctacgacgcgagagcgcgcgaggtgtggagcccccaatcccggaagcttccttggccgcgcgcagggcgcgggagtgggagctcgccgccggttaccgagccctctccgccgcggatctcccgatctgagacgccactcgtcaattccccgcagggttttgcggtgccagcgacggacatgagcgtggagagcccaggggagctagggttctgaagcgcaccgtggggcacagcgtggcgaacgacggcccccgacatcctgctaggttttccatgggagatgggggagtcgcgtgcgccgtccgctcagtcgagagcttccgtgccggcgccctcgtgaggagaggaggagcgggagaagcgatgccggacaagggggagagggcccatggccaccgccaccagcaccagcactggaagaaccagcagtcggcgacagctgctgacctggaggagggggagctgcttaatggggaggccgggaccaatgggttgcccgagaggagcatgccacctaagaagtggaggaaggtgctggcagcctccgcagctgctgtggaggtggagcctggggagattgtgagtacaaagcaagcagtgccattgaagaaggaaagaagaaacggggacgttgagaaggtagagctgctgccagagaggcagaggaaggaaaagtcttctgggaagagcaccaggaagtctatcaaggatgatgtggagccaggggagattgcactgccaggaaaaaggcgggatgccaagtcccaactggcccatgataacagcaggaggccaagttcgtctgcccagaaaggctccttgcgggattctgatgaagaacctggtgaaattaagccagagagcggcatcagtggcagtgtaaggaagaaccggccaacagagcctcatagcagtaaccacaagcaccacactgacacctctgaccagtcaggatcaaaacatcgcaggaagggagaaggaaagagttcatctgctgccagacatttgtctgggagaattcgtgaggtctcgccaccaacacgggatcggcgtgataagcacgagaggagcccaggcatcttgggccgttttcctcatgaccgttttcgtcatgacaggtatgacaggagcccgagccgcttggagcgttccccacatcgcactcgccactatgatagcagagaccgcagtccatatatttcacctcgacatagagctcgtccgccccaattcagggataacacaccaagtcgtgttgataattcccctcgtgggagggtccagcatgaagatatcagagaccgtagcccatttcgtcatgacaggtcgccttctgaacgttgtcgtcctactgacacgcatgaagcaagcaagaagagcagaagtagcaacaactcagagaagtcacatcacaaaagcaaatcagcgaagcaatcttcaaaaatcaagagtggtagcaatgggaagaatgaggagaaaatctccaaagaaaagcacactgaaagcagtcagtacactgaactgccaccaccacctcctcttcctctaccaccgccaccaccaccgccgccgccaccgccacccctgccgcctgctgtaccacctccattgcctccatcaccagaacctgagccacctggagttctagccgaggatatgatagaagacatggatatctgtgacaccccacctcacactagtgcagtacctgaacccacagaaccaatttgtgatatagggaggtggttttaccttgatcacttcggtatcgagcaaggaccttccaaacttgctgagctgaagaagctggtgcaagatggatatcttctttctgaccatctgataaaacatgctgatagcaaccgatgggtgactgtagagaatgcagcttcaccactggtgccatctgatttcccctctttatattcggacacttcaacacagttggtcaacccaccagaagccccaggaaatttgctcgatgaagctctagaggaggcttctaacttggcatcaggagctgaggataaacaaatggaggaaacgtctgcagaagatagtgaagaattctgcattgatgatagggttgaagcactgatggatggatcaattttggtgcatggccaggagctcgagatcattggagagcttttaggtgcagattttcagcctgctgattggcaaagatggagtcgtcgtgaagattttactaggctcaatgtgcacactgaagtaaacaatgaaatcaatggaggcacagaaaatagagcaacagatgcttatggtcttgtttctgtggagaagaactttcatcataacgctgagtctagcgaatggttttctggtagatggtcttgcaaaggtggtgactggaggagaaatgacgaactaagccaagatactccattcaggaaaaaacttgttctcaatgaagggtatcctctgtgtcaaatgccaaaaggtagctgtgaggatccacgccggccctgcaaggatgagttgtactaccctgtacgtgctaaaaagtatgaactgccattgtgggcattctcattgacagaagaagatattgatagtgttaatgacaccactaaaagcggtgttgtgcctgggaggccaggtcagaccagacagccttctaggggagtgaagggcatgatgctttcagtggttaggataaattctcgtgttgttaaagatcaatcatctgttgaaccccatacaaaacccagaggaactgatcgaccactgtcgaggtcttcacgctcccattcaattggagctgagagaagttctgtccatgaaggttcgtctcatttcaggaagcaccatgaccatgattcacaaagttcgcacaagtccaagcctgttccaaacattccaaaggaccgtgtatgcactgttgatgagctgtcagtttatcggggtgactggtattaccttgatggcactgggcatgagcatggtccattttcttattctgaattgcaagaattagttaaaaatggcactatcattgaacaaagtagtgtgttccgtaagattgataacacatggtttccagttcttaaggatttaaaacctggaagctctgttcccagtgcagcacgaagctcaagttttactgctgctcttatgctcccagaccaatataattttggtgtgaaccaaggatcaggtagcttcaatcagttgcacccccagtttgtgggttatacacgtggtaaattacatgaactagtcatgaaatatttcaagagcagggaacttactttagctataaatgaggtcttggatccctggatctcagcaaagcagccaaaaaaagagtttgaagcatacttctcccacaattcagcatctagaaatttgctgccagaagatggtgggtctgcaaaaaaggcaaagttgctacctgatcagagtgatgaagatattcatttgtcacaagacattcttgccagtcggaaggaggacatctgttttgacgagctatgtgatgcagaaccttctgttgataatgattctctgaatcccggagcaggaaatgaaacctggggtctactaaacggccatgtgttagcaagaatcttccattttatgagggcagatgtgaaagcacttatttcttctgcagctacctgtaggagctggaatgctgctgtgaagtattacagaaacatgtgtagattcattgatctgtcttctgttggccctctttgcactgattctgtgttttgtgatattatggctggttatgagaagcaaaatattaggacccttattttagctggttgttcgaatcttagttcgcatgcccttggcagagtacttgagcagcttccacaaatatcttatgttgacatccatggttgcggtcatctaggggatctgaaaaataaatttcagcatgtaaaatggatcaggagctcattgaatccagaggagtcatatcggaaaattaaaaccttgaagcagataggtgatgggaacaactacgcatccaaagttgcaaggaacttcaccaatcatctggatggttctgatgagcttgatgggtattttgctgatatttcaaatagagagaatgctaacctttcatttggacaaggtttctataaacgatcaaaattgcttgatgctagaaagtcctctgcggttttgtcgagggatgcagaaatgaggcggttgatgcagagacaggcagagaccagttacagaaagatggaagagttcatcataaacagactgagagaaattatgaggagcaacagatttgattttttcattccaaaggtttccaagattgaaggtaggctaaaaaacgggtattatgctcgccatggctttcgtaccatcaagcatgacatccgtaccatgtgccaagatgcattgagatataaagatggcaatgattcgggagatataaagcaaattgttgtctccttcatacagctagcaaagagactagggaacccaaggtacatttctgatagatatggagcaggagcccaggacagcctggacattaatcaatattcatttgatactaaactcaaaaagaagcaaaataaaataagaggagcaaattcattggctgctggagcagataattcatctcgtgcatttgaccttgaaatcaaaagaagcctatctaaattaaagaaaaaggatgtctactctggtagcgaaacatctgatgatgatgatggctactctgaagttgatgaaactgagagcgaaactactgtttctgatactgagagtgaccttgatgtaaattctggagcctgggatttaaaaggaaacagtctaaagttaattgaacctggggaatctgtgaccgatgatcgtatattgggtgcccgcatgacaaaggccagccttgttcctccagttactaggaagtatgaagttatcgaggagtaccttattgtagcagatttggaggaagtacagcgaaaaatgagagttgctttacctgatgactattctgagaagttgctgtcacagaagaatggcaccgaaaacttggaacttccagaggttaaggattatcaaccccgaaaagtagcaggagatgaaattcttgagcaagaagtatatggcatagatccatacacacacaatctactgagtgacattatgcctgctgatcttgagttgtcacctactgacaagcatatctttattgaggagttgcttctgaatacattgaataagcaagttaggcatttcactggttcgggaaatacccctatgacttacaaccttaggcctgtcattgaagagatccaaaggtctgcagaggataatggtgatagacgaacttcaaagatgtgcttggggatgctaaagaccatgagaaatcgctctgaacagaacttcgttgcttatagaaagggtctcggtgttgtttgcaacaaaaaaggtggatttggtgtagatgactttgttgtagagttctttggggaggtttacccttcttggagatggtatgaaaagcaagatggtattaaacatatacaaaacaacagtgaagatcaagctcctgagttttacaacattatgttagaaaggccaaagggagacggagatggatatgacttggtttttgttgatgcgatgcacaaggccaactacgctagtagaatctgccactcctgcaacccaaactgcgaagcaaaattggagtttacacacttcgaccaattgcagaaggcgaggaaatcacttttgattacaattctgtaactgagaagagcatgaagcatcagtctgcctctgtggaagtcaagtatgccgtggcagctatttgaatttttctggtgaaggagcctttgagaaggtattaatggaattccatggtgtgctcgataggcatagcctgctgctacaggcttgtgaaacagactctgtctctcaacaagacttaattgacttgggtagagctggtcttggtacctgtttgcttgctggtttgcctggatggcttgttgcttacacagctcacctggtgcggtttatataccttgagagacagaaactccctgatgagatcttaaggcacaatgtggatgagaagcgccagttccttatagaaataaacatggattctgagaagaatgatgctgaggttcaggcagagggagtattaaattcaagattacaacaaatagtgcatacacttgacaaggtgagatatgttatgagatgcatatttggagacccaaagaatgctcctcctcctcttgtaaggttgtctgggaaaagtctggtatctgccatctggaaaggggacagttcaatagttgctgaactcattcagtcgatggaacctcatgttgaagaagaggtacttagtgatctgaaggccaaaatccgtgctcatgatccgtcagagtctgaagatattgagggaggcatccggaattctctcttgtggctgcgtgatgaattgcgaactctttcatgcacttacaagtgccgtcatgatgctgctgcagatttgattcatttgtatgcttatacaaagtgcttcttccgagtccgggattataagacagtaaaatctccaccagttcatatcagtccgcttgacttaggccccaaatatgctgataaactgggaccaggctttcaggagtactgcaagacatacccagaaaattattgcttagcccagcttatctattggtatagccagaattcagaacctgaatctagattaacaagagctagaaaaggttgcatgtcgttgccagatgtctcatccttctatgtgaagtctgcaaaaccatcacaagagcgagcttatggaaacagaactgtgagattcatgttatcgcgcatggaaaagcaggcacaaagaccatggccaaaggataggatatgggtgttcaagagtgatccgagattctttggtagtccaatgatggacaccgtgttgaataattccccgcttgacaaggagatggtgcactggctcaagactagaccaaatgttttcctaggctagtaaaaaaggtttgtaggcagataaggtggtatttggttctttctcctttttggagattttagtctacatgattctttttccgactcacaccttggctacctgatcatggggagtttagcttttagatagcagggtagtctcaccacccccatctgtacattcctctctccctactttccttgtagagatgtatctggttaataactgatagattcgtcattgatttgatgtagtgaattttccccataggaatgctccctcttttgtttcatgtaaatgcagaacaatttcaatcttgaattcagtaatgtgttacaggcatgttgcatttctgtggttcagttcgttgtttcaatcaataaaatgttttaggggcttataggtttcattcat

SEQ ID NO: 219416 - DNA, 7472 bp, Zea Mays
ctctcctccgggagagggatagagtgcgtccgtcttcgttccttgccccccttccttcagaagagcgaggccgcggtcgcggaggaggctttacgaacaaacgagccattagtccccaaaagccaacacacaaacccaggcgatagcgagcgcgcccgcgaaggctacgacgcgagagcgcgcgaggtgtggagcccccaatcccggaagcttccttggccgcgcgcagggcgcgggagtgggagctcgccgccggttaccgagccctctccgccgcggatctcccgatctgagacgccactcgtcaattccccgcagggttttgcggtgccagcgacggacatgagcgtggagagcccaggggagctagggttctgaagcgcaccgtggggcacagcgtggcgaacgacggcccccgacatcctgctaggttttccatgggagatgggggagtcgcgtgcgccgtccgctcagtcgagagcttccgtgccggcgccctcgtgaggagaggaggagcgggagaagcgatgccggacaagggggagagggcccatggccaccgccaccagcaccagcactggaagaaccagcagtcggcgacagctgctgacctggaggagggggagctgcttaatggggaggccgggaccaatgggttgcccgagaggagcatgccacctaagaagtggaggaaggtgctggcagcctccgcagctgctgtggaggtggagcctggggagattgtgagtacaaagcaagcagtgccattgaagaaggaaagaagaaacggggacgttgagaaggtagagctgctgccagagaggcagaggaaggaaaagtcttctgggaagagcaccaggaagtctatcaaggatgatgtggagccaggggagattgcactgccaggaaaaaggcgggatgccaagtcccaactggcccatgataacagcaggaggccaagttcgtctgcccagaaaggctccttgcgggattctgatgaagaacctggtgaaattaagccagagagcggcatcagtggcagtgtaaggaagaaccggccaacagagcctcatagcagtaaccacaagcaccacactgacacctctgaccagtcaggatcaaaacatcgcaggaagggagaaggaaagagttcatctgctgccagacatttgtctgggagaattcgtgaggtctcgccaccaacacgggatcggcgtgataagcacgagaggagcccaggcatcttgggccgttttcctcatgaccgttttcgtcatgacaggtatgacaggagcccgagccgcttggagcgttccccacatcgcactcgccactatgatagcagagaccgcagtccatatatttcacctcgacatagagctcgtccgccccaattcagggataacacaccaagtcgtgttgataattcccctcgtgggagggtccagcatgaagatatcagagaccgtagcccatttcgtcatgacaggtcgccttctgaacgttgtcgtcctactgacacgcatgaagcaagcaagaagagcagaagtagcaacaactcagagaagtcacatcacaaaagcaaatcagcgaagcaatcttcaaaaatcaagagtggtagcaatgggaagaatgaggagaaaatctccaaagaaaagcacactgaaagcagtcagtacactgaactgccaccaccacctcctcttcctctaccaccgccaccaccaccgccgccgccaccgccacccctgccgcctgctgtaccacctccattgcctccatcaccagaacctgagccacctggagttctagccgaggatatgatagaagacatggatatctgtgacaccccacctcacactagtgcagtacctgaacccacagaaccaatttgtgatatagggaggtggttttaccttgatcacttcggtatcgagcaaggaccttccaaacttgctgagctgaagaagctggtgcaagatggatatcttctttctgaccatctgataaaacatgctgatagcaaccgatgggtgactgtagagaatgcagcttcaccactggtgccatctgatttcccctctttatattcggacacttcaacacagttggtcaacccaccagaagccccaggaaatttgctcgatgaagctctagaggaggcttctaacttggcatcaggagctgaggataaacaaatggaggaaacgtctgcagaagatagtgaagaattctgcattgatgatagggttgaagcactgatggatggatcaattttggtgcatggccaggagctcgagatcattggagagcttttaggtgcagattttcagcctgctgattggcaaagatggagtcgtcgtgaagattttactaggctcaatgtgcacactgaagtaaacaatgaaatcaatggaggcacagaaaatagagcaacagatgcttatggtcttgtttctgtggagaagaactttcatcataacgctgagtctagcgaatggttttctggtagatggtcttgcaaaggtggtgactggaggagaaatgacgaactaagccaagatactccattcaggaaaaaacttgttctcaatgaagggtatcctctgtgtcaaatgccaaaaggtagctgtgaggatccacgccggccctgcaaggatgagttgtactaccctgtacgtgctaaaaagtatgaactgccattgtgggcattctcattgacagaagaagatattgatagtgttaatgacaccactaaaagcggtgttgtgcctgggaggccaggtcagaccagacagccttctaggggagtgaagggcatgatgctttcagtggttaggataaattctcgtgttgttaaagatcaatcatctgttgaaccccatacaaaacccagaggaactgatcgaccactgtcgaggtcttcacgctcccattcaattggagctgagagaagttctgtccatgaaggttcgtctcatttcaggaagcaccatgaccatgattcacaaagttcgcacaagtccaagcctgttccaaacattccaaaggaccgtgtatgcactgttgatgagctgtcagtttatcggggtgactggtattaccttgatggcactgggcatgagcatggtccattttcttattctgaattgcaagaattagttaaaaatggcactatcattgaacaaagtagtgtgttccgtaagattgataacacatggtttccagttcttaaggatttaaaacctggaagctctgttcccagtgcagcacgaagctcaagttttactgctgctcttatgctcccagaccaatataattttggtgtgaaccaaggatcaggtagcttcaatcagttgcacccccagtttgtgggttatacacgtggtaaattacatgaactagtcatgaaatatttcaagagcagggaacttactttagctataaatgaggtcttggatccctggatctcagcaaagcagccaaaaaaagagtttgaagcatacttctcccacaattcagcatctagaaatttgctgccagaagatggtgggtctgcaaaaaaggcaaagttgctacctgatcagagtgatgaagatattcatttgtcacaagacattcttgccagtcggaaggaggacatctgttttgacgagctatgtgatgcagaaccttctgttgataatgattctctgaatcccggagcaggaaatgaaacctggggtctactaaacggccatgtgttagcaagaatcttccattttatgagggcagatgtgaaagcacttatttcttctgcagctacctgtaggagctggaatgctgctgtgaagtattacagaaacatgtgtagattcattgatctgtcttctgttggccctctttgcactgattctgtgttttgtgatattatggctggttatgagaagcaaaatattaggacccttattttagctggttgttcgaatcttagttcgcatgcccttggcagagtacttgagcagcttccacaaatatcttatgttgacatccatggttgcggtcatctaggggatctgaaaaataaatttcagcatgtaaaatggatcaggagctcattgaatccagaggagtcatatcggaaaattaaaaccttgaagcagataggtgatgggaacaactacgcatccaaagttgcaaggaacttcaccaatcatctggatggttctgatgagcttgatgggtattttgctgatatttcaaatagagagaatgctaacctttcatttggacaaggtttctataaacgatcaaaattgcttgatgctagaaagtcctctgcggttttgtcgagggatgcagaaatgaggcggttgatgcagagacaggcagagaccagttacagaaagatggaagagttcatcataaacagactgagagaaattatgaggagcaacagatttgattttttcattccaaaggtttccaagattgaaggtaggctaaaaaacgggtattatgctcgccatggctttcgtaccatcaagcatgacatccgtaccatgtgccaagatgcattgagatataaagatggcaatgattcgggagatataaagcaaattgttgtctccttcatacagctagcaaagagactagggaacccaagataattcatctcgtgcatttgaccttgaaatcaaaagaagcctatctaaattaaagaaaaaggatgtctactctggtagcgaaacatctgatgatgatgatggctactctgaagttgatgaaactgagagcgaaactactgtttctgatactgagagtgaccttgatgtaaattctggagcctgggatttaaaaggaaacagtctaaagttaattgaacctggggaatctgtgaccgatgatcgtatattgggtgcccgcatgacaaaggccagccttgttcctccagttactaggaagtatgaagttatcgaggagtaccttattgtagcagatttggaggaagtacagcgaaaaatgagagttgctttacctgatgactattctgagaagttgctgtcacagaagaatggcaccgaaaacttggaacttccagaggttaaggattatcaaccccgaaaagtagcaggagatgaaattcttgagcaagaagtatatggcatagatccatacacacacaatctactgagtgacattatgcctgctgatcttgagttgtcacctactgacaagcatatctttattgaggagttgcttctgaatacattgaataagcaagttaggcatttcactggttcgggaaatacccctatgacttacaaccttaggcctgtcattgaagagatccaaaggtctgcagaggataatggtgatagacgaacttcaaagatgtgcttggggatgctaaagaccatgagaaatcgctctgaacagaacttcgttgcttatagaaagggtctcggtgttgtttgcaacaaaaaaggtggatttggtgtagatgactttgttgtagagttctttggggaggtttacccttcttggagatggtatgaaaagcaagatggtattaaacatatacaaaacaacagtgaagatcaagctcctgagttttacaacattatgttagaaaggccaaagggagacggagatggatatgacttggtttttgttgatgcgatgcacaaggccaactacgctagtagaatctgccactcctgcaacccaaactgcgaagcaaaagtgacagcagtgaatggtaaataccagattggagtttacacacttcgaccaattgcagaaggcgaggaaatcacttttgattacaattctgtaactgagagcatgaagcatcagtctgcctctgtggaagtcaagtatgccgtggcagctatttgaatttttctggtgaaggagcctttgagaaggtattaatggaattccatggtgtgctcgataggcatagcctgctgctacaggcttgtgaaacagactctgtctctcaacaagacttaattgacttgggtagagctggtcttggtacctgtttgcttgctggtttgcctggatggcttgttgcttacacagctcacctggtgcggtttatataccttgagagacagaaactccctgatgagatcttaaggcacaatgtggatgagaagcgccagttccttatagaaataaacatggattctgagaagaatgatgctgaggttcaggcagagggagtattaaattcaagattacaacaaatagtgcatacacttgacaaggtgagatatgttatgagatgcatatttggagacccaaagaatgctcctcctcctcttgtaaggttgtctgggaaaagtctggtatctgccatctggaaaggggacagttcaatagttgctgaactcattcagtcgatggaacctcatgttgaagaagaggtacttagtgatctgaaggccaaaatccgtgctcatgatccgtcagagtctgaagatattgagggaggcatccggaattctctcttgtggctgcgtgatgaattgcgaactctttcatgcacttacaagtgccgtcatgatgctgctgcagatttgattcatttgtatgcttatacaaagtgcttcttccgagtccgggattataagacagtaaaatctccaccagttcatatcagtccgcttgacttaggccccaaatatgctgataaactgggaccaggctttcaggagtactgcaagacatacccagaaaattattgcttagcccagcttatctattggtatagccagaattcagaacctgaatctagattaacaagagctagaaaaggttgcatgtcgttgccagatgtctcatccttctatgtgaagtctgcaaaaccatcacaagagcgagcttatggaaacagaactgtgagattcatgttatcgcgcatggaaaagcaggcacaaagaccatggccaaaggataggatatgggtgttcaagagtgatccgagattctttggtagtccaatgatggacaccgtgttgaataattccccgcttgacaaggagatggtgcactggctcaagactagaccaaatgttttcctaggctagtaaaaaaggtttgtaggcagataaggtggtatttggttctttctcctttttggagattttagtctacatgattctttttccgactcacaccttggctacctgatcatggggagtttagcttttagatagcagggtagtctcaccacccccatctgtacattcctctctccctactttccttgtagagatgtatctggttaataactgatagattcgtcattgatttgatgtagtgaattttccccataggaatgctccctcttttgtttcatgtaaatgcagaacaatttcaatcttgaattcagtaatgtgttacaggcatgttgcatttctgtggttcagttcgttgtttcaatcaataaaatgttttaggggcttataggtttcattcat

SEQ ID NO: 219417 - DNA, 1731 bp, Zea Mays
acacgtttctttatcgtaactttttcactgctccagtgaaggcacacatccgccgccgtttcttctcccatcatcttcctcgcagcgccggcgctccctctcccgctcccttccttactcgcgctcggcacacaggcggcggcgctcgggctctcagcgacggcgtcagcggcttaccctcgcgccctcgcctccggtcctccgcacaccggccggtgaccctgcgtgcgtgcctatctctctcatcccgcccccggtggatcgtcaacgccaccggccccgccagctgcgccgcgcgcggcctgatggctgcgggagccagcagccgctgctccaccaaggcgttcgcgccgctttggtagcgcttatgccccaaagcgaagcgttacccgtcctcctagcgcttcagcgcgctgaagcgtgcgcttagtgccgccttttggaaccctggcctcttcgcatttgcagggagaagactcagtttatcccttgcactcccttcccagaccccactcatgtagagcctccggcactgggtctgtcctttattactataactgtgatacttttagttctgattctgattgggcagttgatcgtgtggtgcagtccagtgagggaaattattggttggttctcacaggctctctaacttatgccagtcctgttataggttatcagttcctctgtatattagtcatatatacagcacttgcccttgggaatgggggagacaaatgttcagttttatgtacttatgtcagaaatctcatattactatatgagataagtctcttcctaattactatattagataagcttccaaccagtgtttattcataccattgtctctctctgtctaatatgttgtttaatgaactctgtttcccccttattagtgcatgcatgattgtccattcttatttttgtccatcattaattacctgttcattaccataggacaacattgcatctgaactgcattggatcctaagagatgatggatgagtcttttcttgataggatggtttcccaacttcggtcaacatgcaagtactacactggatatcccaaggacttagggcgatcaagaattataccattcacatctgagcgtcagtttgtgcagctattacatgaaggcaggtgcacatatacacagcatcttgataaagttctggaagaggccgcagctaaattttatccacatatcaagtttgtccgagttgagtgcccgaagtaccctgggttttgcctcacaaggcaaaggaacgaatatccatttgttgaagtattctacaacccagaacaggctgcaagcccaggaaagagcgtggatcctaacatcaccaagtattctgtaaaagtgctaccgttcaactatgaccaaagcgtgtatggatttcgagaatatttcaagaagcatggtttcaagtattctgaaacaaactagatctgttgttaaagatctgcctcgagagtagtcctagggacttgagtagcatgtggaggcagttgttgtatggagttgaaatggcgtgaggctctaatgggaggccttgactagttcattcgagaatgcctgtcatgtattcatttgtatacgggctactgctcatgcctagagatttgcttttccgtacctatgaaccattggatttggtaatgttttacctctcaaagcccggagtgagcaatttgcatcattttttcaagcactgtcgatttgag

SEQ ID NO: 219418 - DNA, 996 bp, Zea Mays
acacgtttctttatcgtaactttttcactgctccagtgaaggcacacatccgccgccgtttcttctcccatcatcttcctcgcagcgccggcgctccctctcccgctcccttccttactcgcgctcggcacacaggcggcggcgctcgggctctcagcgacggcgtcagcggcttaccctcgcgccctcgcctccggtcctccgcacaccggccggtgaccctgcgacaacattgcatctgaactgcattggatcctaagagatgatggatgagtcttttcttgataggatggtttcccaacttcggtcaacatgcaagtactacactggatatcccaaggacttagggcgatcaagaattataccattcacatctgagcgtcagtttgtgcagctattacatgaaggcaggtgcacatatacacagcatcttgataaagttctggaagaggccgcagctaaattttatccacatatcaagtttgtccgagttgagtgcccgaagtaccctgggttttgcctcacaaggcaaaggaacgaatatccatttgttgaagtattctacaacccagaacaggctgcaagcccaggaaagagcgtggatcctaacatcaccaagtattctgtaaaagtgctaccgttcaactatgaccaaagcgtgtatggatttcgagaatatttcaagaagcatggtttcaagtattctgaaacaaactagatctgttgttaaagatctgcctcgagagtagtcctagggacttgagtagcatgtggaggcagttgttgtatggagttgaaatggcgtgaggctctaatgggaggccttgactagttcattcgagaatgcctgtcatgtattcatttgtatacgggctactgctcatgcctagagatttgcttttccgtacctatgaaccattggatttggtaatgttttacctctcaaagcccggagtgagcaatttgcatcattttttcaagcactgtcgatttgag

SEQ ID NO: 219419 - DNA, 992 bp, Zea Mays
acacgtttctttatcgtaactttttcactgctccagtgaaggcacacatccgccgccgtttcttctcccatcatcttcctcgcagcgccggcgctccctctcccgctcccttccttactcgcgctcggcacacaggcggcggcgctcgggctctcagcgacggcgtcagcggcttaccctcgcgccctcgcctccggtcctccgcacaccggccggtgaccctgcgacaacattgcatctgaactgcattggatcctaagagatgatggatgagtcttttcttgataggatggtttcccaacttcggtcaacatgcaagtactacactggatatcccaaggacttagggcgatcaagaattataccattcacatctgagcgtcagtttgtgcagctattacatgaaggtgcacatatacacagcatcttgataaagttctggaagaggccgcagctaaattttatccacatatcaagtttgtccgagttgagtgcccgaagtaccctgggttttgcctcacaaggcaaaggaacgaatatccatttgttgaagtattctacaacccagaacaggctgcaagcccaggaaagagcgtggatcctaacatcaccaagtattctgtaaaagtgctaccgttcaactatgaccaaagcgtgtatggatttcgagaatatttcaagaagcatggtttcaagtattctgaaacaaactagatctgttgttaaagatctgcctcgagagtagtcctagggacttgagtagcatgtggaggcagttgttgtatggagttgaaatggcgtgaggctctaatgggaggccttgactagttcattcgagaatgcctgtcatgtattcatttgtatacgggctactgctcatgcctagagatttgcttttccgtacctatgaaccattggatttggtaatgttttacctctcaaagcccggagtgagcaatttgcatcattttttcaagcactgtcgatttgag

SEQ ID NO: 219420 - DNA, 5685 bp, Zea Mays
gggtgtcccggatgcgcgcagagcggaggctcgcggatctagggtttcggagggcctagggttagtgccggcgatctggtgatggtggcgcggcgcggcgccggagctcggcgaggaagagggttcgacggcgacgttggggaagatgcagcgagccggatatgcatgggtggcgcggcgctgagggttgcgacgtcaggaggcagcgtctcgttcggctcatgtggccagcggcacgcgtagaggcagaagctccaccaccacctgcacaaggaccagctacttctccttctggctcatctgtccccccgtctcggacgacttctcttccgccggaatcggcggcgcagcaggagtgcatcgatccccctcgcccagtgtcacccggttcctttgtaaaggacggtcgtgagattagagtaggcgattgtgctctttttcgggctgttgatgttcctccgttcattggattgatacgttggattgagaaaaaggaagacggccatcccaaattacgtgttagttggctttatagacctaccgacgtgaagcttaacaagggtatacaactcagtgctgcaccaaacgagatcttctactctttccaccaggacgaagcatctgctgtttctctactgcatccttgcaaagttgcctttttacgtaaaggcgttgaactaccagctggaatttcttcatttgtatgttggcgtgtgtacgatattgacaataagtgcttatggtggcttactgacaaggactatattaatgaacggcaggaagaagtaaatcgacttctacacagaacaaggctagaaatgcgtgccgcattgcaatcaggtggacgctctccaaagcgtttaaatggtccatcagcttcccagcaactgaagactgcttcagttggtacgcagaatggtggtttatctaaaggaaagaagagagatagaagtgaacagggagttgatccagctaagcgggatcgagatcgtctacttaaggttgacgacagtgagcctggaatctttaacttggatgatattaagtctgaaatagcaaagataacagaaaaagatgggcttccaaatgctgaagcagttgaaaagcttgtacatcttatgcagcttgatcgaactgagcagaagatagaccttagtggtcgggttatacttgctgatgttattgctgctacagagaatcctgattgcctcggcagatttgtgcaatcaaggggccttcccgtgttggacagttggcttcaagaggcccacaaagggaagtctggtgacgggagtagtcctaaagaagcagataagcctattgacgaacttctcttggccctccttcgtgcattagctaaattgcctataaatctcagtgcattgcaaagttgtagcattgggaaatctgtcaatcatctgcgtagccataaaaatctggagattcagaagaaagctaagtgtcttgttgagaactggaagaagcgtgttgatgctgagatgaagtcaaatgatgtgaaacctttagtttcaggtcaatctgtttcctggtcaggaaaagcaggtttccaagaaatttcaaatgctggaaccaaacgaggtggttcaagtgagaacagtccaaaaaatccagtgcccactctttcatcatcaaaatttttgactgataagcctgggggcacagatgctgaagcgaagttgaaccctggggtatctgccttgtcaaattcacaacacgtgcaaccaacaaatgttactaccaatttgaaggaccagccctgcaaatcaactggtgggactggtcctgagctgcctactgtaaaagaggagaaaaccagcagttcaagccaatcaccgaataacagccagtcaatatctagtgagccatcgaaggatgcaagaagttcaactgctgcttctggtggtgctagtaaaacttctgaaagttcttcacgaagccatcgaaaggcaaacaatggtcttgtttcagggaacctgaaggaagcttctgtaggaagatctgtctcccttgatcgatcattgctgcaggataagtcatctcaaactggaacagcttctgaaaaaggacctgatatgccacttgatcatggaaataatcatagattgattgttcgctttccaaatcctggtcgtagtcctgctagaagtgcaagtgctggatcgtttgatgacccatctgtaactgggggtagagcttcatctcctatggttgtggataggcatgatcagactgagcgcaaggtgaaagggaagactgaaaatactcggcctcatttagcatctgatgctaacacagagtcttggcacagcaacgacggagctactggttcagaggaaggtgataaatcgccgtgtgctatattagacgatgacaacagcaggacacctgatgattctgttaaggatacacatgcatcacgagttgcatgctcgtcacatacgaatgaaaaaggtgtcggcgaaactaaggtgggaactccgttcagcccgatgaatgctcttattgaaatcaagtactctgaagctagtcattcacagcaagctggagatgacactgctatgaatcttcttgctagtgtggctggggaaatatctaaatctgaattggtttccccagcttcttcacccagaagttcttctgtaaagaaattggcccgtgatagtgacaacattggaaaggttaaagtagaaagtgacacgggcccatcacatccagggcaagcagatgctaagaaaggcgccatggggaaggaagtgaaaattgatgcttgtttggttgcaaaggaggaacaacgccaaactatgccatctcctgagctaccagattcaaaagcagttgtatcttcagctaagattgaaatctatgaagttgaagccaagattgcaaacaaatgcaactctcagcatgcttcaattgattccaaaggagaaagtcaggatgcctgtactgcccatgggaaagttgtagatggcagtatagacaaggatggtgccatggaatctgcattgggcagccagtgtaggttggttgttcccagtagaaattcaagattggtccatgctggggaatcttcattgtctgctgctgataaacaagcacagggtttgttaaaatcaactaatcataagcagcttctgagtgtgtcggacaacccaggcgcctttgatagacgtgacagtatggctggcaagatggatttgttggctgcagaggtgagaaaaactgatgccgtgggcaatagtaacatagtgcagaacgaggctgaaaagaaggaacatgcttgttcctctttgcctgatgttcccaaactagttgtcgcagcagcgtctccagttggtgtggcaaatgtgaataaggagatgaaagaatcaaaagacagttcaagtgaatccaatagccatgtaaaatctgaaggtgtcaattctcagcaaagcgagcaaagtgcaatgcagagttcaaagaaatcctgtgatggtgtgagtggaaaagaggacgaaaaagaagaccatgtcttatcagacgaaggttcttctctagccgctcacaccaagtcaaatgctacagccaagcttgatttcgacttgaatgaaggaatacctggagatgatgggcatcagtctgagccaactatctcgcctgttgtatgttcttcagcaatcaatttaactgggattttgccattcacttcgcctattacaacggggttgcagccagcttcaataacagtagctgctccagctaaaggaccctttgttcctccagaaaacctactaagagcaaagcctgagattgggtggaaaggttcagcagctacgagtgcatttcgtcctgctgaaccaaggaagattttggagattcctgctgctgcacgcgacattccagtatctcatgctgctgggaagcagtctcgtcccacgcttggttttgatttgaatgttgcagatgaccaagctctcgaggaagatatcccacagagttctgcacagactacctgttctgaatctggaaatacgagaagtcgagatggctcttcacgaagcgctggtattgaacttgatctgaacagagctgatgaagttgcagataatggccaatttgcaccaagtgcttcgcacagagttgaagtcccattgttgtcaacaagatcgttacatggagttttctctaatgctggcatgaatagcgcgagggactttgatcttaacagtggaccaggccttgatgatcttggcaccgaacctgcaccaaagagcctaccttctaaaagtacaagcagtattcaattcctaccacaagttcctgttaggatgaatagtgctgccatgagtaatatatcaccatggcttgcctctgccagcccttgtccagtagctatacaatcttttttatcaactagagaacagccatacccaattgaggcagcacctggagctcaaaggatcattgcgcctacagctgatgctggccagtttggaggtgatccctgcaggcctccagttgtttcaacgtctccagcgatggtttttcatcagcctgcatatcagtatccaggattcccttttcctcccagtgttcaccttcaaacaccggcattttcaattggatcagcaacatttaataattctgcatctgcaggagttccatattttccaactgtctccccctcttttgttgggccagcaggagcgttaactccccaacatttaaggcagtatgctataaaccttgctgagggcagcagcagcagtggacgagacagtaatcgtaaatgggaaagtcagggccttgatcttaactcaggccctggaagtatagatttagaaggaaaggatgaacgggtgcctttaccggtcagacaaaatttgatcccacccccacacggctttgtggaggatcaaggaagaatctaccagatgccagttgtaggaacaaagagaaaggaacctgatggcagctgggactcagaaaggtctacatacaagcaattatcatggcaatgatggctctgaagatcgttctgcactggactggtacctgcatgtagaacttgggcggtgtgttcttcagtcactgcaatattactcgattcagcccatgacgttgatgtgggatccaggaaacgaaaacttgctgtaattgttgtagattttttccctagctgttaggcttttgattctaatttactcaggagggggtatggctgcggaggaggaatctttgtgatcctgagctctggggctactgtaattagacggtccgctctgtttgtcggtgatatactgtttatcacatgctgcagctttacattacataagaatttagatgtgaccttgttccttgctggggaagcgttacgtcagctgaccatatgaacactggtgcaacaatcagctcgagttgatacgccatgtatctttaagttgcagtgcagctgtatgtataaggattctagcagatcagcaagctataattttttgctgtttttttggcaccgaatccatctgcatctgatttagtctagatgttctttctctaaattatttttctgggaggtgataaccggcagatacgaatgggtacaagaataaatgaagtgtgtttttcgtttgatttatattgggtgtaaataaatgaactgttgccttgtagacctctggtttggag

SEQ ID NO: 219421 - DNA, 5700 bp, Zea Mays
gggtgtcccggatgcgcgcagagcggaggctcgcggatctagggtttcggagggcctagggttagtgccggcgatctggtgatggtggcgcggcgcggcgccggagctcggcgaggaagagggttcgacggcgacgttggggaagatgcagcgagccggatatgcatgggtggcgcggcgctgagggttgcgacgtcaggaggcagcgtctcgttcggctcatgtggccagcggcacgcgtagaggcagaagctccaccaccacctgcacaaggaccagctacttctccttctggctcatctgtccccccgtctcggacgacttctcttccgccggaatcggcggcgcagcaggagtgcatcgatccccctcgcccagtgtcacccggttcctttgtaaaggacggtcgtgagattagagtaggcgattgtgctctttttcgggctgttgatgttcctccgttcattggattgatacgttggattgagaaaaaggaagacggccatcccaaattacgtgttagttggctttatagacctaccgacgtgaagcttaacaagggtatacaactcagtgctgcaccaaacgagatcttctactctttccaccaggacgaagcatctgctgtttctctactgcatccttgcaaagttgcctttttacgtaaaggcgttgaactaccagctggaatttcttcatttgtatgttggcgtgtgtacgatattgacaataagtgcttatggtggcttactgacaaggactatattaatgaacggcaggaagaagtaaatcgacttctacacagaacaaggctagaaatgcgtgccgcattgcaatcaggtggacgctctccaaagcgtttaaatggtccatcagcttcccagcaactgaagactgcttcagttggtacgcagaatggtggtttatctaaaggaaagaagagagatagaagtgaacagggagttgatccagctaagcgggatcgagatcgtctacttaaggttgacgacagtgagcctggaatctttaacttggatgatattaagtctgaaatagcaaagataacagaaaaagatgggcttccaaatgctgaagcagttgaaaagcttgtacatcttatgcagcttgatcgaactgagcagaagatagaccttagtggtcgggttatacttgctgatgttattgctgctacagagaatcctgattgcctcggcagatttgtgcaatcaaggggccttcccgtgttggacagttggcttcaagaggcccacaaagggaagtctggtgacgggagtagtcctaaagaagcagataagcctattgacgaacttctcttggccctccttcgtgcattagctaaattgcctataaatctcagtgcattgcaaagttgtagcattgggaaatctgtcaatcatctgcgtagccataaaaatctggagattcagaagaaagctaagtgtcttgttgagaactggaagaagcgtgttgatgctgagatgaagtcaaatgatgtgaaacctttagtttcaggtcaatctgtttcctggtcaggaaaagcaggtttccaagaaatttcaaatgctggaaccaaacgaggtggttcaagtgagaacagtccaaaaaatccagtgcccactctttcatcatcaaaatttttgactgataagcctgggggcacagatgctgaagcgaagttgaaccctggggtatctgccttgtcaaattcacaacacgtgcaaccaacaaatgttactaccaatttgaaggaccagccctgcaaatcaactggtgggactggtcctgagctgcctactgtaaaagaggagaaaaccagcagttcaagccaatcaccgaataacagccagtcaatatctagtgagccatcgaaggatgcaagaagttcaactgctgcttctggtggtgctagtaaaacttctgaaagttcttcacgaagccatcgaaaggcaaacaatggtcttgtttcagggaacctgaaggaagcttctgtaggaagatctgtctcccttgatcgatcattgctgcaggataagtcatctcaaactggaacagcttctgaaaaaggacctgatatgccacttgatcatggaaataatcatagattgattgttcgctttccaaatcctggtcgtagtcctgctagaagtgcaagtgctggatcgtttgatgacccatctgtaactgggggtagagcttcatctcctatggttgtggataggcatgatcagactgagcgcaaggtgaaagggaagactgaaaatactcggcctcatttagcatctgatgctaacacagagtcttggcacagcaacgacggagctactggttcagaggaaggtgataaatcgccgtgtgctatattagacgatgacaacagcaggacacctgatgattctgttaaggatacacatgcatcacgagttgcatgctcgtcacatacgaatgaaaaaggtgtcggcgaaactaaggtgggaactccgttcagcccgatgaatgctcttattgaaatcaagtactctgaagctagtcattcacagcaagctggagatgacactgctatgaatcttcttgctagtgtggctggggaaatatctaaatctgaattggtttccccagcttcttcacccagaagttcttctgtaaagaaattggcccgtgatagtgacaacattggaaaggttaaagtagaaagtgacacgggcccatcacatccagggcaagcagatgctaagaaaggcgccatggggaaggaagtgaaaattgatgcttgtttggttgcaaaggaggaacaacgccaaactatgccatctcctgagctaccagattcaaaagcagttgtatcttcagctaagattgaaatctatgaagttgaagccaagattgcaaacaaatgcaactctcagcatgcttcaattgattccaaaggagaaagtcaggatgcctgtactgcccatgggaaagttgtagatggcagtatagacaaggatggtgccatggaatctgcattgggcagccagtgtaggttggttgttcccagtagaaattcaagattggtccatgctggggaatcttcattgtctgctgctgataaacaagcacagggtttgttaaaatcaactaatcataagcagcttctgagtgtgtcggacaacccaggcgcctttgatagacgtgacagtatggctggcaagatggatttgttggctgcagaggtgagaaaaactgatgccgtgggcaatagtaacatagtgcagaacgaggctgaaaagaaggaacatgcttgttcctctttgcctgatgttcccaaactagttgtcgcagcagcgtctccagttggtgtggcaaatgtgaataaggagatgaaagaatcaaaagacagttcaagtgaatccaatagccatgtaaaatctgaaggtgtcaattctcagcaaagcgagcaaagtgcaatgcagagttcaaagaaatcctgtgatggtgtgagtggaaaagaggacgaaaaagaagaccatgtcttatcagacgaaggttcttctctagccgctcacaccaagtcaaatgctacagccaagcttgatttcgacttgaatgaaggaatacctggagatgatgggcatcagtctgagccaactatctcgcctgttgtatgttcttcagcaatcaatttaactgggattttgccattcacttcgcctattacaacggggttgcagccagcttcaataacagtagctgctccagctaaaggaccctttgttcctccagaaaacctactaagagcaaagcctgagattgggtggaaaggttcagcagctacgagtgcatttcgtcctgctgaaccaaggaagattttggagattcctgctgctgcacgcgacattccagtatctcatgctgctgggaagcagtctcgtcccacgcttggttttgatttgaatgttgcagatgaccaagctctcgaggaagatatcccacagagttctgcacagactacctgttctgaatctggaaatacgagaagtcgagatggctcttcacgaagcgctggtattgaacttgatctgaacagagctgatgaagttgcagataatggccaatttgcaccaagtgcttcgcacagagttgaagtcccattgttgtcaacaagatcgttacatggagttttctctaatgctggcatgaatagcgcgagggactttgatcttaacagtggaccaggccttgatgatcttggcaccgaacctgcaccaaagagcctaccttctaaaagtacaagcagtattcaattcctaccacaagttcctgttaggatgaatagtgctgccatgagtaatatatcaccatggcttgcctctgccagcccttgtccagtagctatacaatcttttttatcaactagagaacagccatacccaattgaggcagcacctggagctcaaaggatcattgcgcctacagctgatgctggccagtttggaggtgatccctgcaggcctccagttgtttcaacgtctccagcgatggtttttcatcagcctgcatatcagtatccaggattcccttttcctcccagtgttcaccttcaaacaccggcattttcaattggatcagcaacatttaataattctgcatctgcaggagttccatattttccaactgtctccccctcttttgttgggccagcaggagcgttaactccccaacatttaaggcagtatgctataaaccttgctgagggcagcagcagcagtggacgagacagtaatcgtaaatgggaaagtcagggccttgatcttaactcaggccctggaagtatagatttagaaggaaaggatgaacgggtgcctttaccggtcagacaaaatttgatcccacccccacacggctttgtggaggatcaaggaagaatctaccagatgccagttgtaggaacaaagagaaaggaacctgatggcagctgggactcagaaaggtctacatacaagcaattatcatggcaatgatggctctgaagatcgttctgcactggactggtatgcgacgagcatgtacctgcatgtagaacttgggcggtgtgttcttcagtcactgcaatattactcgattcagcccatgacgttgatgtgggatccaggaaacgaaaacttgctgtaattgttgtagattttttccctagctgttaggcttttgattctaatttactcaggagggggtatggctgcggaggaggaatctttgtgatcctgagctctggggctactgtaattagacggtccgctctgtttgtcggtgatatactgtttatcacatgctgcagctttacattacataagaatttagatgtgaccttgttccttgctggggaagcgttacgtcagctgaccatatgaacactggtgcaacaatcagctcgagttgatacgccatgtatctttaagttgcagtgcagctgtatgtataaggattctagcagatcagcaagctataattttttgctgtttttttggcaccgaatccatctgcatctgatttagtctagatgttctttctctaaattatttttctgggaggtgataaccggcagatacgaatgggtacaagaataaatgaagtgtgtttttcgtttgatttatattgggtgtaaataaatgaactgttgccttgtagacctctggtttggag

SEQ ID NO: 219422 - DNA, 392 bp, Zea Mays
  misc_feature (1)..(1): n is a, c, g, or t
nttctgatcatatcactgttctcgtggcgccgtagcatagttcagacattcatgtactggcaggtgttgaagctgatgtaccatgctcccgtgacatccagctatcaccagagtacctgggcgaaaatcggccggattgtgaacccgtacatccaccgctacgctccgttcctccagacgcccatttctgcgatccaaagatggtggttcagaattctggagggccattatcataacaagaaggtttttagctgcagggccaccaacgccgaattgcaaaactcagcaaaaatgttccgtgttttttttttgttgggcaccgatgcctgccttcgtagatttgcttgcaatctttgcttcaacggaggagtgtacattatgtttgtgcgtag

SEQ ID NO: 219423 - DNA, 1432 bp, Zea Mays
ttttttttttgaaacgaaccagacatgagagctgccgattatattaattaagaagtggtccggaccggactaaacaacaaacaacatgcggttggattgagacatcaacacgccaacaccatacaactcaactcgtcggttggattaggacatcaacacgacaccacactcaccgtcgacatagagtgcccaaacaacacaggcagcggcaaccccacacgagagcacaaaactgctaaaggtcatcgttatcaagcaaagatgcagagcatccaacaactccgactttccaaagcagccaacaggcgaaccaaacaaaaagcagatagacaacccgaagcgaaaggtctcaacaagtcatcgttgccgggctcaggcacaaagcagcttcgacttccaatcttgaccctctgccctgcctccggtttttgcccgaccttcgaaacattctggaccacgaagaagggaggttcgcctcgtgttatcgttgccgagccacatccactgatgtagcagctccgacttcacgttgcaaaacccccacctccactcgcataccaggcaccgagaagcgaagcaacagccgaaggcaaagtcctggccgagacgaacttcagaagcgacgccttcaggaagggagtgacgtcactgtgacgccaccgtcacctgtccgtgatggaccgagctttcacccaaggaagatagcactggggtgtgacgcccttaacaggggaagcgacgcccatgggcgtcaccgtcgccgagactttcgcccaagagcccccagcacaacgtctggccgaaacctcgagacacagcaagctgcctccgccgtcgccggtaccccgacgtaccacacaaatgatgaagattttgggcctgccgccaccaccaccctgcgctagcccgatcgactagccgatgctgccccagacgagaggaggtcccgccactgcaattccggccgactgcgcaggcctgccggcgcaccaacgccgacctccaccccggctcatgcgctagcccgggaccagcctgccgccgcctccgacggatggcatgcggaggccgccaacctcgcgcgccagatccagccctccgcgcatcaggtacgcgagcacacagtccaggcacacctccaacccccgagcagcagcgattgccgtcgcggcacgcaggcgccgccaccgggctagcctcgcgggcgcgcacccagccacaggcccgttgcctgagtgggcggacgccgccaccgtgggttggacgcacgacaaggcagcaagcacccgcccgacgccttcacccctagccgtgcgagcaacccaccagctagctccggcggggagttggcagccacccgagtcgcgagggggcgaagccggggccgaccacgccgacgagcaactcacggtgaccttggcggctgtgcccg

SEQ ID NO: 219424 - DNA, 3026 bp, Zea Mays
gttatattctgtgatcaccgtcatgttcctgctgcacgcacacctacccagggaaggaattggataaagcttgagtgcagctagtttgagcaattccattgacaacgattccggtggatacaattctggacaaggagaactttacattggaagagcttcttgatgaggatgaaatcattcaggagtgcaaagcgctgaatacccgactcataaatttcttgcgagataaggcccaagtgtcgcaattacttcgttacattgtggaagaagttcctgaggattcagagaagaaacaatctttcaagtttccttttatcgcttgtgagatttttgcttgtgaaattgacattattttgagaaccttggtagaggatgttgagttaatggatttgcttttttcatttataaaacctgaccatccgcatagcacactgttagctggttacttcagtaaggtggttatatgtttgatgcttcgaaagactgctcctcttatgaattatgttcaggagcatccagatattgttgtccagcttgtcgacctcattggtatcacatcaataatggaggtgttggtgagattgattggtgctgatgaaaccatatacttgaatttcgcggatacattgcattggttagagaatacatatgtactggaaatgattgtggataaatttagctcatcagactctcctgaagtgcatgcaaatgctgctgaaattctttctgcggtaactcgatgcgcccctcctgctcttgctgcaaaaatatgcagtccaagttttgttggcaggttgtttcatcatgctcttgacgagtcaagaccaaaatctgttctggttcattcattgtcagtgtgtatatctttattggaccccaaaagactagcatcagtctcataccaagcatttagaagcaacttaactcacgggacgctggttacagccagtccagaaacagttgatggtatactggagagtctaggtgacttgctgaagttactggacattacttcttctcaaaatgtttttcctacaacttatggatgtttgtgtccgcctcttggaaaacaccgtttgaagattgtagaattcatctctgttttgctaacaattggtagcgaaatagctgagaagaagctaataagccaatcagtgataaagcattgcattgatttattttttcagtacccttataataactttttgcatcatcatgttgagaacattattgtttcttgccttgaggttaaaagaaatcaattgattgaccatattcttaatgactgtggtcttgttggtaaagtccttgccgctgaaaaaagttcttctctggcagtggagtctaatgggccaacattaccatcagaagggaaagaacctccaagaattgggaatattgggcacataactcgaatagcgaataagctcattcaatttggaaatagtaacagcatgatccagagtcacttgcaggagaacagtgagtgggctgtatggcaaatagatgtcctgatcaaacgcaatgaggtggagaatgtttaccattgggcatgtggccgtccaacatctctacatgatcgtgggagggatagcgatgacgacgacttccgagacagagactacgatgtggcagcactcactaataatatgagccaggcatttcgatttgggatatacaggaatgatgacattgaagaggcacaaggatcccacgaacgagatgatgaggatgtctactttgatgacgagtcagctgaagtagtaatatcttcattgtgtttgggggatgatcaggacagcagttcactcttcacgaattcaaactggtttacgtttgatggtgatagaggaatcaatgaccgcctagctgcctctgttcctccatcatccccggattctgaagcgatttccttaaacactgagaatactgatgaagcgctaactggtgaaaccactggaggcactgagtcactgcgggaaagtgcatcccttgccaatgaactagcagaagtcgctaacgacaatgatgctgatgccacggacggtgagaaaattttgtgtacagaagaggacagtcaagcctccgaggggcctgtggatgctaaagaggacaagactggaggagcgtctaaagcagcgaatgaatctgtgcctgacaatgccttgcctgaatcccaccacactgattgtcggtgcgctgactcatctgaatcaggaacagaagaagatgtggagattgatgatgagaagaaatctgagactgctatgacaaatgaatgagcgttatgggcttggaatgataggatggcggatcagattcttttgctggtgagcaatgccactcaagcaggggcgccgtacaattttaacagcgctgctttgctattgaggagtctggttgttactgcatactcgggcacgcacgctcttttatcatctcacctcatcaccatcatcccacatggaccaatgtcgtctggcggctcctgattttggtctcttcgaactgtaatatctgcacatcgcttggaggagttggagaaggaaaaaaggcacatatcggcacatagaaactacatgtccttgatctcctgcctcgagagcctcgcaggtcggatctgggagctcaaaattgaatacttctgccgggggatctgtcaggccttcgtcgttgttacgtcccatatcgaaggcggaatcgaactggaggccctaagtgaaggttactgcgatgcctggagtgatacagagcttgccgaaatggtgaaagctgcggagccctttgctcggaaactgggagtcgccctgcttgattgcgctcccccacgaggggttaaggaaaatttgtgtctttgtaatggtttaagggatataactttttttgacatttcttcaattctatgaacatccgtgttggttggcactgggccgagcctaggttggcgttcgcccccttttcctgtgtccgaccccaagaatagttctgaaacatgttttattaataaccatcaaggaattacaaac

SEQ ID NO: 219425 - DNA, 3188 bp, Zea Mays
ttcctccctctcctctctctctgtctgagccgagggctttggcgctcccccccccccccccccccccctctctctctctctctctctcgcacgggcccgcctgcctatcccactgcccggtccaccgccgcaaactctgcccgcccgcgcgcgccccaccccgccgatcgcggtgagcccggactccgccgccgccgcttcgctctaccctgaccagccctagatctgtgcgggatccgccgccatgttctggcgcatgaccggcctctccgcggcctcgcccgtggatacaattctggacaaggagaactttacattggaagagcttcttgatgaggatgaaatcattcaggagtgcaaagcgctgaatacccgactcataaatttcttgcgagataaggcccaagtgtcgcaattacttcgttacattgtggaagaagttcctgaggattcagagaagaaacaatctttcaagtttccttttatcgcttgtgagatttttgcttgtgaaattgacattattttgagaaccttggtagaggatgttgagttaatggatttgcttttttcatttataaaacctgaccatccgcatagcacactgttagctggttacttcagtaaggtggttatatgtttgatgcttcgaaagactgctcctcttatgaattatgttcaggagcatccagatattgttgtccagcttgtcgacctcattggtatcacatcaataatggaggtgttggtgagattgattggtgctgatgaaaccatatacttgaatttcgcggatacattgcattggttagagaatacatatgtactggaaatgattgtggataaatttagctcatcagactctcctgaagtgcatgcaaatgctgctgaaattctttctgcggtaactcgatgcgcccctcctgctcttgctgcaaaaatatgcagtccaagttttgttggcaggttgtttcatcatgctcttgacgagtcaagaccaaaatctgttctggttcattcattgtcagtgtgtatatctttattggaccccaaaagactagcatcagtctcataccaagcatttagaagcaacttaactcacgggacgctggttacagccagtccagaaacagttgatggtatactggagagtctaggtgacttgctgaagttactggacattacttcttctcaaaatgtttttcctacaacttatggatgtttgtgtccgcctcttggaaaacaccgtttgaagattgtagaattcatctctgttttgctaacaattggtagcgaaatagctgagaagaagctaataagccaatcagtgataaagcattgcattgatttattttttcagtacccttataataactttttgcatcatcatgttgagaacattattgtttcttgccttgaggttaaaagaaatcaattgattgaccatattcttaatgactgtggtcttgttggtaaagtccttgccgctgaaaaaagttcttctctggcagtggagtctaatgggccaacattaccatcagaagggaaagaacctccaagaattgggaatattgggcacataactcgaatagcgaataagctcattcaatttggaaatagtaacagcatgatccagagtcacttgcagtgagtgggctgtatggcaaatagatgtcctgatcaaacgcaatgaggtggagaatgtttaccattgggcatgtggccgtccaacatctctacatgatcgtgggagggatagcgatgacgacgacttccgagacagagactacgatgtggcagcactcactaataatatgagccaggcatttcgatttgggatatacaggaatgatgacattgaagaggcacaaggatcccacgaacgagatgatgaggatgtctactttgatgacgagtcagctgaagtagtaatatcttcattgtgtttgggggatgatcaggacagcagttcactcttcacgaattcaaactggtttacgtttgatggtgatagaggaatcaatgaccgcctagctgcctctgttcctccatcatccccggattctgaagcgatttccttaaacactgagaatactgatgaagcgctaactggtgaaaccactggaggcactgagtcactgcgggaaagtgcatcccttgccaatgaactagcagaagtcgctaacgacaatgatgctgatgccacggacggtgagaaaattttgtgtacagaagaggacagtcaagcctccgaggggcctgtggatgctaaagaggacaagactggaggagcgtctaaagcagcgaatgaatctgtgcctgacaatgccttgcctgaatcccaccacactgattgtcggtgcgctgactcatctgaatcaggaacagaagaagatgtggagattgatgatgagaagaaatctgagactgctatgacaaatgaatgagcgttatgggcttggaatgataggatggcggatcagattcttttgctggtgagcaatgccactcaagcaggggcgccgtacaattttaacagcgctgctttgctattgaggagtctggttgttactgcatactcgggcacgcacgctcttttatcatctcacctcatcaccatcatcccacatggaccaatgtcgtctggcggctcctgattttggtctcttcgaactgtaatatctgcacatcgcttggaggagttggagaaggaaaaaaggcacatatcggcacatagaaactacatgtccttgatctcctgcctcgagagcctcgcaggtcggatctgggagctcaaaattgaatacttctgccgggggatctgtcaggccttcgtcgttgttacgtcccatatcgaaggcggaatcgaactggaggccctaagtgaaggttactgcgatgcctggagtgatacagagcttgccgaaatggtgaaagctgcggagccctttgctcggaaactgggagtcgccctgcttgattgcgctcccccacgaggggttaaggaaaatttgtgtctttgtaatggtttaagggatataactttttttgacatttcttcaattctatgaacatccgtgttggttggcactgggccgagcctaggttggcgttcgcccccttttcctgtgtccgaccccaagaatagttctgaaacatgttttattaataaccatcaaggaattacaaac

SEQ ID NO: 219426 - DNA, 3196 bp, Zea Mays
ttcctccctctcctctctctctgtctgagccgagggctttggcgctcccccccccccccccccccccctctctctctctctctctctcgcacgggcccgcctgcctatcccactgcccggtccaccgccgcaaactctgcccgcccgcgcgcgccccaccccgccgatcgcggtgagcccggactccgccgccgccgcttcgctctaccctgaccagccctagatctgtgcgggatccgccgccatgttctggcgcatgaccggcctctccgcggcctcgcccgtggatacaattctggacaaggagaactttacattggaagagcttcttgatgaggatgaaatcattcaggagtgcaaagcgctgaatacccgactcataaatttcttgcgagataaggcccaagtgtcgcaattacttcgttacattgtggaagaagttcctgaggattcagagaagaaacaatctttcaagtttccttttatcgcttgtgagatttttgcttgtgaaattgacattattttgagaaccttggtagaggatgttgagttaatggatttgcttttttcatttataaaacctgaccatccgcatagcacactgttagctggttacttcagtaaggtggttatatgtttgatgcttcgaaagactgctcctcttatgaattatgttcaggagcatccagatattgttgtccagcttgtcgacctcattggtatcacatcaataatggaggtgttggtgagattgattggtgctgatgaaaccatatacttgaatttcgcggatacattgcattggttagagaatacatatgtactggaaatgattgtggataaatttagctcatcagactctcctgaagtgcatgcaaatgctgctgaaattctttctgcggtaactcgatgcgcccctcctgctcttgctgcaaaaatatgcagtccaagttttgttggcaggttgtttcatcatgctcttgacgagtcaagaccaaaatctgttctggttcattcattgtcagtgtgtatatctttattggaccccaaaagactagcatcagtctcataccaagcatttagaagcaacttaactcacgggacgctggttacagccagtccagaaacagttgatggtatactggagagtctaggtgacttgctgaagttactggacattacttcttctcaaaatgtttttcctacaacttatggatgtttgtgtccgcctcttggaaaacaccgtttgaagattgtagaattcatctctgttttgctaacaattggtagcgaaatagctgagaagaagctaataagccaatcagtgataaagcattgcattgatttattttttcagtacccttataataactttttgcatcatcatgttgagaacattattgtttcttgccttgaggttaaaagaaatcaattgattgaccatattcttaatgactgtggtcttgttggtaaagtccttgccgctgaaaaaagttcttctctggcagtggagtctaatgggccaacattaccatcagaagggaaagaacctccaagaattgggaatattgggcacataactcgaatagcgaataagctcattcaatttggaaatagtaacagcatgatccagagtcacttgcaggagaacagtgagtgggctgtatggcaaatagatgtcctgatcaaacgcaatgaggtggagaatgtttaccattgggcatgtggccgtccaacatctctacatgatcgtgggagggatagcgatgacgacgacttccgagacagagactacgatgtggcagcactcactaataatatgagccaggcatttcgatttgggatatacaggaatgatgacattgaagaggcacaaggatcccacgaacgagatgatgaggatgtctactttgatgacgagtcagctgaagtagtaatatcttcattgtgtttgggggatgatcaggacagcagttcactcttcacgaattcaaactggtttacgtttgatggtgatagaggaatcaatgaccgcctagctgcctctgttcctccatcatccccggattctgaagcgatttccttaaacactgagaatactgatgaagcgctaactggtgaaaccactggaggcactgagtcactgcgggaaagtgcatcccttgccaatgaactagcagaagtcgctaacgacaatgatgctgatgccacggacggtgagaaaattttgtgtacagaagaggacagtcaagcctccgaggggcctgtggatgctaaagaggacaagactggaggagcgtctaaagcagcgaatgaatctgtgcctgacaatgccttgcctgaatcccaccacactgattgtcggtgcgctgactcatctgaatcaggaacagaagaagatgtggagattgatgatgagaagaaatctgagactgctatgacaaatgaatgagcgttatgggcttggaatgataggatggcggatcagattcttttgctggtgagcaatgccactcaagcaggggcgccgtacaattttaacagcgctgctttgctattgaggagtctggttgttactgcatactcgggcacgcacgctcttttatcatctcacctcatcaccatcatcccacatggaccaatgtcgtctggcggctcctgattttggtctcttcgaactgtaatatctgcacatcgcttggaggagttggagaaggaaaaaaggcacatatcggcacatagaaactacatgtccttgatctcctgcctcgagagcctcgcaggtcggatctgggagctcaaaattgaatacttctgccgggggatctgtcaggccttcgtcgttgttacgtcccatatcgaaggcggaatcgaactggaggccctaagtgaaggttactgcgatgcctggagtgatacagagcttgccgaaatggtgaaagctgcggagccctttgctcggaaactgggagtcgccctgcttgattgcgctcccccacgaggggttaaggaaaatttgtgtctttgtaatggtttaagggatataactttttttgacatttcttcaattctatgaacatccgtgttggttggcactgggccgagcctaggttggcgttcgcccccttttcctgtgtccgaccccaagaatagttctgaaacatgttttattaataaccatcaaggaattacaaac

SEQ ID NO: 219427 - DNA, 3079 bp, Zea Mays
ttcctccctctcctctctctctgtctgagccgagggctttggcgctcccccccccccccccccccccctctctctctctctctctctcgcacgggcccgcctgcctatcccactgcccggtccaccgccgcaaactctgcccgcccgcgcgcgccccaccccgccgatcgcggtgagcccggactccgccgccgccgcttcgctctaccctgaccagccctagatctgtgcgggatccgccgccatgttctggcgcatgaccggcctctccgcggcctcgcccgtggatacaattctggacaaggagaactttacattggaagagcttcttgatgaggatgaaatcattcaggagtgcaaagcgctgaatacccgactcataaatttcttgcgagataaggcccaagtgtcgcaattacttcgttacattgtggaagaagttcctgaggattcagagaagaaacaatctttcaagtttccttttatcgcttgtgagatttttgcttgtgaaattgacattattttgagaaccttggtagaggatgttgagttaatggatttgcttttttcatttataaaacctgaccatccgcatagcacactgttagctggttacttcagtaaggtggttatatgtttgatgcttcgaaagactgctcctcttatgaattatgttcaggagcatccagatattgttgtccagcttgtcgacctcattggtatcacatcaataatggaggactctcctgaagtgcatgcaaatgctgctgaaattctttctgcggtaactcgatgcgcccctcctgctcttgctgcaaaaatatgcagtccaagttttgttggcaggttgtttcatcatgctcttgacgagtcaagaccaaaatctgttctggttcattcattgtcagtgtgtatatctttattggaccccaaaagactagcatcagtctcataccaagcatttagaagcaacttaactcacgggacgctggttacagccagtccagaaacagttgatggtatactggagagtctaggtgacttgctgaagttactggacattacttcttctcaaaatgtttttcctacaacttatggatgtttgtgtccgcctcttggaaaacaccgtttgaagattgtagaattcatctctgttttgctaacaattggtagcgaaatagctgagaagaagctaataagccaatcagtgataaagcattgcattgatttattttttcagtacccttataataactttttgcatcatcatgttgagaacattattgtttcttgccttgaggttaaaagaaatcaattgattgaccatattcttaatgactgtggtcttgttggtaaagtccttgccgctgaaaaaagttcttctctggcagtggagtctaatgggccaacattaccatcagaagggaaagaacctccaagaattgggaatattgggcacataactcgaatagcgaataagctcattcaatttggaaatagtaacagcatgatccagagtcacttgcaggagaacagtgagtgggctgtatggcaaatagatgtcctgatcaaacgcaatgaggtggagaatgtttaccattgggcatgtggccgtccaacatctctacatgatcgtgggagggatagcgatgacgacgacttccgagacagagactacgatgtggcagcactcactaataatatgagccaggcatttcgatttgggatatacaggaatgatgacattgaagaggcacaaggatcccacgaacgagatgatgaggatgtctactttgatgacgagtcagctgaagtagtaatatcttcattgtgtttgggggatgatcaggacagcagttcactcttcacgaattcaaactggtttacgtttgatggtgatagaggaatcaatgaccgcctagctgcctctgttcctccatcatccccggattctgaagcgatttccttaaacactgagaatactgatgaagcgctaactggtgaaaccactggaggcactgagtcactgcgggaaagtgcatcccttgccaatgaactagcagaagtcgctaacgacaatgatgctgatgccacggacggtgagaaaattttgtgtacagaagaggacagtcaagcctccgaggggcctgtggatgctaaagaggacaagactggaggagcgtctaaagcagcgaatgaatctgtgcctgacaatgccttgcctgaatcccaccacactgattgtcggtgcgctgactcatctgaatcaggaacagaagaagatgtggagattgatgatgagaagaaatctgagactgctatgacaaatgaatgagcgttatgggcttggaatgataggatggcggatcagattcttttgctggtgagcaatgccactcaagcaggggcgccgtacaattttaacagcgctgctttgctattgaggagtctggttgttactgcatactcgggcacgcacgctcttttatcatctcacctcatcaccatcatcccacatggaccaatgtcgtctggcggctcctgattttggtctcttcgaactgtaatatctgcacatcgcttggaggagttggagaaggaaaaaaggcacatatcggcacatagaaactacatgtccttgatctcctgcctcgagagcctcgcaggtcggatctgggagctcaaaattgaatacttctgccgggggatctgtcaggccttcgtcgttgttacgtcccatatcgaaggcggaatcgaactggaggccctaagtgaaggttactgcgatgcctggagtgatacagagcttgccgaaatggtgaaagctgcggagccctttgctcggaaactgggagtcgccctgcttgattgcgctcccccacgaggggttaaggaaaatttgtgtctttgtaatggtttaagggatataactttttttgacatttcttcaattctatgaacatccgtgttggttggcactgggccgagcctaggttggcgttcgcccccttttcctgtgtccgaccccaagaatagttctgaaacatgttttattaataaccatcaaggaattacaaac

SEQ ID NO: 219428 - DNA, 4300 bp, Zea Mays
ttcctccctctcctctctctctgtctgagccgagggctttggcgctcccccccccccccccccccccctctctctctctctctctctcgcacgggcccgcctgcctatcccactgcccggtccaccgccgcaaactctgcccgcccgcgcgcgccccaccccgccgatcgcggtgagcccggactccgccgccgccgcttcgctctaccctgaccagccctagatctgtgcgggatccgccgccatgttctggcgcatgaccggcctctccgcggcctcgccccttccactccacgttcagggttatattctgtgatcaccgtcatgttcctgctgcacgcacacctacccagggaaggaattggataaagcttgagtgcagctagtttgagcaattccattgacaacgattccggttcattaataaacaggctttctctggctctctgcacattttctgttactgtctctgtgggaacatattttctgtttctgtcccattactatttatagggcttcctatacctgtgtcggaaactaatttcatgtcaagtatgcttactgtttatttatttcttattcccttataaagagtcgtaaaactttttctggcccatggggtagtttcatcatcatgttatcactagatgtattcttttggttcattgtactcattttatagtaataataactaactgtccagtggaccgaccatgtttattgtcatgtcttatttatttaggggctgtttggatcccaggagctaaaacaaaagtgactaaagtttagttacttagagcaactccagtagttctctaaatgactctctaaatcaagaatttagatagttagcacaaaaacctctctccaacagctctctaaattgacttcataaatttagtcacttctcatgtaaccctatttcctccctacatttgataatcatgtagcaagtcacgaaaaaaaactgacgccattttctcactcgtggcaatctttccctgttcctgctgcttcgtatgtcacacatgcctttgactcttcctgttttgtacggcagtcgtgttgcatggtatccaaatgacccaccaatttgatttttcaaacagattaactacctaaataatagcaactgttggagatccacaaattttttttgaacgcccaatagctgtttacaaacttgctaaatacaattttaaggagatatattttacataactactggagctgctcttaggagctaaagatccaaataggaagcactaaaactgattatagtggtgaaaaaagtatcaatttagtcacttttagctcttcctgtttggatatttagctcctaagtaactaaactctataatcatttttgctttagctcctggaatccaaacatgcccttagtataccttttttttttaccatctcaggtttcttgtgaaaatttagtagcatacactggggcatccccgtcccacatgcctaactttcttttcctgttggtcaggtggatacaattctggacaaggagaactttacattggaagagcttcttgatgaggatgaaatcattcaggagtgcaaagcgctgaatacccgactcataaatttcttgcgagataaggcccaagtgtcgcaattacttcgttacattgtggaagaagttcctgaggattcagagaagaaacaatctttcaagtttccttttatcgcttgtgagatttttgcttgtgaaattgacattattttgagaaccttggtagaggatgttgagttaatggatttgcttttttcatttataaaacctgaccatccgcatagcacactgttagctggttacttcagtaaggtggttatatgtttgatgcttcgaaagactgctcctcttatgaattatgttcaggagcatccagatattgttgtccagcttgtcgacctcattggtatcacatcaataatggaggactctcctgaagtgcatgcaaatgctgctgaaattctttctgcggtaactcgatgcgcccctcctgctcttgctgcaaaaatatgcagtccaagttttgttggcaggttgtttcatcatgctcttgacgagtcaagaccaaaatctgttctggttcattcattgtcagtgtgtatatctttattggaccccaaaagactagcatcagtctcataccaagcatttagaagcaacttaactcacgggacgctggttacagccagtccagaaacagttgatggtatactggagagtctaggtgacttgctgaagttactggacattacttcttctcaaaatgtttttcctacaacttatggatgtttgtgtccgcctcttggaaaacaccgtttgaagattgtagaattcatctctgttttgctaacaattggtagcgaaatagctgagaagaagctaataagccaatcagtgataaagcattgcattgatttattttttcagtacccttataataactttttgcatcatcatgttgagaacattattgtttcttgccttgaggttaaaagaaatcaattgattgaccatattcttaatgactgtggtcttgttggtaaagtccttgccgctgaaaaaagttcttctctggcagtggagtctaatgggccaacattaccatcagaagggaaagaacctccaagaattgggaatattgggcacataactcgaatagcgaataagctcattcaatttggaaatagtaacagcatgatccagagtcacttgcaggagaacagtgagtgggctgtatggcaaatagatgtcctgatcaaacgcaatgaggtggagaatgtttaccattgggcatgtggccgtccaacatctctacatgatcgtgggagggatagcgatgacgacgacttccgagacagagactacgatgtggcagcactcactaataatatgagccaggcatttcgatttgggatatacaggaatgatgacattgaagaggcacaaggatcccacgaacgagatgatgaggatgtctactttgatgacgagtcagctgaagtagtaatatcttcattgtgtttgggggatgatcaggacagcagttcactcttcacgaattcaaactggtttacgtttgatggtgatagaggaatcaatgaccgcctagctgcctctgttcctccatcatccccggattctgaagcgatttccttaaacactgagaatactgatgaagcgctaactggtgaaaccactggaggcactgagtcactgcgggaaagtgcatcccttgccaatgaactagcagaagtcgctaacgacaatgatgctgatgccacggacggtgagaaaattttgtgtacagaagaggacagtcaagcctccgaggggcctgtggatgctaaagaggacaagactggaggagcgtctaaagcagcgaatgaatctgtgcctgacaatgccttgcctgaatcccaccacactgattgtcggtgcgctgactcatctgaatcaggaacagaagaagatgtggagattgatgatgagaagaaatctgagactgctatgacaaatgaatgagcgttatgggcttggaatgataggatggcggatcagattcttttgctggtgagcaatgccactcaagcaggggcgccgtacaattttaacagcgctgctttgctattgaggagtctggttgttactgcatactcgggcacgcacgctcttttatcatctcacctcatcaccatcatcccacatggaccaatgtcgtctggcggctcctgattttggtctcttcgaactgtaatatctgcacatcgcttggaggagttggagaaggaaaaaaggcacatatcggcacatagaaactacatgtccttgatctcctgcctcgagagcctcgcaggtcggatctgggagctcaaaattgaatacttctgccgggggatctgtcaggccttcgtcgttgttacgtcccatatcgaaggcggaatcgaactggaggccctaagtgaaggttactgcgatgcctggagtgatacagagcttgccgaaatggtgaaagctgcggagccctttgctcggaaactgggagtcgccctgcttgattgcgctcccccacgaggggttaaggaaaatttgtgtctttgtaatggtttaagggatataactttttttgacatttcttcaattctatgaacatccgtgttggttggcactgggccgagcctaggttggcgttcgcccccttttcctgtgtccgaccccaagaatagttctgaaacatgttttattaataaccatcaaggaattacaaac

SEQ ID NO: 219429 - DNA, 4031 bp, Zea Mays
ttcctccctctcctctctctctgtctgagccgagggctttggcgctcccccccccccccccccccccctctctctctctctctctctcgcacgggcccgcctgcctatcccactgcccggtccaccgccgcaaactctgcccgcccgcgcgcgccccaccccgccgatcgcggtgagcccggactccgccgccgccgcttcgctctaccctgaccagccctagatctgtgcgggatccgccgccatgttctggcgcatgaccggcctctccgcggcctcgccccttccactccacgttcagggttatattctgtgatcaccgtcatgttcctgctgcacgcacacctacccagggaaggaattggataaagcttgagtgcagctagtttgagcaattccattgacaacgattccggttcattaataaacaggctttctctggctctctgcacattttctgttactgtctctgtgggaacatattttctgtttctgtcccattactatttatagggcttcctatacctgtgtcggaaactaatttcatgtcaagtatgcttactgtttatttatttcttattcccttataaagagtcgtaaaactttttctggcccatggggtagtttcatcatcatgttatcactagatgtattcttttggttcattgtactcattttatagtaataataactaactgtccagtggaccgaccatgtttattgtcatgtcttatttatttaggggctgtttggatcccaggagctaaaacaaaagtgactaaagtttagttacttagagcaactccagtagttctctaaatgactctctaaatcaagaatttagatagttagcacaaaaacctctctccaacagctctctaaattgacttcataaatttagtcacttctcatgtaaccctatttcctccctacatttgataatcatgtagcaagtcacgaaaaaaaactgacgccattttctcactcgtggcaatctttccctgttcctgctgcttcgtatgtcacacatgcctttgactcttcctgttttgtacggcagtcgtgttgcatggtatccaaatgacccaccaatttgatttttcaaacagattaactacctaaataatagcaactgttggagatccacaaattttttttgaacgcccaatagctgtttacaaacttgctaaatacaattttaaggagatatattttacataactactggagctgctcttaggagctaaagatccaaataggaagcactaaaactgattatagtggtgaaaaaagtatcaatttagtcacttttagctcttcctgtttggatatttagctcctaagtaactaaactctataatcatttttgctttagctcctggaatccaaacatgcccttagtataccttttttttttaccatctcaggtttcttgtgaaaatttagtagcatacactggggcatccccgtcccacatgcctaactttcttttcctgttggtcaggtggatacaattctggacaaggagaactttacattggaagagcttcttgatgaggatgaaatcattcaggagtgcaaagcgctgaatacccgactcataaatttcttgcgagataaggcccaagtgtcgcaattacttcgttacattgtggaagaagttcctgaggattcagagaagaaacaatctttcaagtttccttttatcgcttgtgagatttttgcttgtgaaattgacattattttgagaaccttggtagaggatgttgagttaatggatttgcttttttcatttataaaacctgaccatccgcatagcacactgttagctggttacttcagtaaggtggttatatgtttgatgcttcgaaagactgctcctcttatgaattatgttcaggagcatccagatattgttgtccagcttgtcgacctcattggtatcacatcaataatggaggtgttggtgagattgattggtgctgatgaaaccatatacttgaatttcgcggatacattgcattggttagagaatacatatgtactggaaatgattgtggataaatttagctcatcagactctcctgaagtgcatgcaaatgctgctgaaattctttctgcggtaactcgatgcgcccctcctgctcttgctgcaaaaatatgcagtccaagttttgttggcaggttgtttcatcatgctcttgacgagtcaagaccaaaatctgttctggttcattcattgtcagtgtgtatatctttattggaccccaaaagactagcatcagtctcataccaagcatttagaagcaacttaactcacgggacgctggttacagccagtccagaaacagttgatggtatactggagagtctaggtgacttgctgaagttactggacattacttcttctcaaaatgtttttcctacaacttatggatgtttgtgtccgcctcttggaaaacaccgtttgaagattgtagaattcatctctgttttgctaacaattggtagcgaaatagctgagaagaagctaataagccaatcagtgataaagcattgcattgatttattttttcagtacccttataataactttttgcatcatcatgttgagaacattattgtttcttgccttgaggttaaaagaaatcaattgattgaccatattcttaatgactgtggtcttgttggtaaagtccttgccgctgaaaaaagttcttctctggcagtggagtctaatgggccaacattaccatcagaagggaaagaacctccaagaattgggaatattgggcacataactcgaatagcgaataagctcattcaatttggaaatagtaacagcatgatccagagtcacttgcaggagaacagtgagtgggctgtatggcaaatagatgtcctgatcaaacgcaatgaggtggagaatgtttaccattgggcatccgtccaacatctctacatgatcgtgggagggatagcgatgacgacgacttccgagacagagactacgatgtggcagcactcactaataatatgagccaggcatttcgatttgggatatacaggaatgatgacattgaagaggcacaaggatcccacgaacgagatgatgaggatgtctactttgatgacgagtcagctgaagtagtaatatcttcattgtgtttgggggatgatcaggacagcagttcactcttcacgaattcaaactggtttacgtttgatggtgatagaggaatcaatgaccgcctagctgcctctgttcctccatcatccccggattctgaagcgatttccttaaacactgagaatactgatgaagcgctaactggtgaaaccactggaggcactgagtcactgcgggaaagtgcatcccttgccaatgaactagcagaagtcgctaacgacaatgatgctgatgccacggacggtgagaaaattttgtgtacagaagaggacagtcaagcctccgaggggcctgtggatgctaaagaggacaagactggaggagcgtctaaagcagcgaatgaatctgtgcctgacaatgccttgcctgaatcccaccacactgattgtcggtgcgctgactcatctgaatcaggaacagaagaagatgtggagattgatgatgagaagaaatctgagactgctatgacaaatgaatgagcgttatgggcttggaatgataggatggcggatcagattcttttgctggtgagcaatgccactcaagcaggggcgccgtacaattttaacagcgctgctttgctattgaggagtctggttgttactgcatactcgggcacgcacgctcttttatcatctcacctcatcaccatcatcccacatggaccaatgtcgtctggcggctcctgattttggtctcttcgaactgtaatatctgcagtgagttttttccatcagtttttatttttttttccgggtttctgcatctgtaatagctatttcttcaagcgcaaaacatgtcttctctttgttgctataaaaagcatatagtttcaccaaaa

SEQ ID NO: 219430 - DNA, 1974 bp, Zea Mays
ttcctccctctcctctctctctgtctgagccgagggctttggcgctcccccccccccccccccccccctctctctctctctctctctcgcacgggcccgcctgcctatcccactgcccggtccaccgccgcaaactctgcccgcccgcgcgcgccccaccccgccgatcgcggtgagcccggactccgccgccgccgcttcgctctaccctgaccagccctagatctgtgcgggatccgccgccatgttctggcgcatgaccggcctctccgcggcctcgcccgtggatacaattctggacaaggagaactttacattggaagagcttcttgatgaggatgaaatcattcaggagtgcaaagcgctgaatacccgactcataaatttcttgcgagataaggcccaagtgtcgcaattacttcgttacattgtggaagaagttcctgaggattcagagaagaaacaatctttcaagtttccttttatcgcttgtgagatttttgcttgtgaaattgacattattttgagaaccttggtagaggatgttgagttaatggatttgcttttttcatttataaaacctgaccatccgcatagcacactgttagctggttacttcagtaaggtggttatatgtttgatgcttcgaaagactgctcctcttatgaattatgttcaggagcatccagatattgttgtccagcttgtcgacctcattggtatcacatcaataatggaggtgttggtgagattgattggtgctgatgaaaccatatacttgaatttcgcggatacattgcattggttagagaatacatatgtactggaaatgattgtggataaatttagctcatcagactctcctgaagtgcatgcaaatgctgctgaaattctttctgcggtaactcgatgcgcccctcctgctcttgctgcaaaaatatgcagtccaagttttgttggcaggttgtttcatcatgctcttgacgagtcaagaccaaaatctgttctggttcattcattgtcagtgtgtatatctttattggaccccaaaagactagcatcagtctcataccaagcatttagaagcaacttaactcacgggacgctggttacagccagtccagaaacagttgatggtatactggagagtctaggtgacttgctgaagttactggacattacttcttctcaaaatgtttttcctacaacttatggatgtttgtgtccgcctcttggaaaacaccgtttgaagattgtagaattcatctctgttttgctaacaattggtagcgaaatagctgagaagaagctaataagccaatcagtgataaagcattgcattgatttattttttcagtacccttataataactttttgcatcatcatgttgagaacattattgtttcttgccttgaggttaaaagaaatcaattgattgaccatattcttaatgactgtggtcttgttggtaaagtccttgccgctgaaaaaagttcttctctggcagtggagtctaatgggccaacattaccatcagaagggaaagaacctccaagaattgggaatattgggcacataactcgaatagcgaataagctcattcaatttggaaatagtaacagcatgatccagagtcacttgcaggagaacagtgagtgggctgtatggcaaatagatgtcctgatcaaacgcaatgaggtggagaatgtttaccattgggcatgtggccgtccaacatctctacatgatcgtgggagggatagcgatgacgacgacttccgagacagagactacgatgtggcagcactcactaataatatgagccaggcatttcgatttgggatatacaggaatgatgacattgaagaggtgaactgcgcatcattatattaagaagatagaagggtccaaaatacaccaatacaagataaagaaaccaccttacggtgggcaaaaaagaaaatacaaaaagc

SEQ ID NO: 219431 - DNA, 1970 bp, Zea Mays
ttcctccctctcctctctctctgtctgagccgagggctttggcgctcccccccccccccccccccccctctctctctctctctctctcgcacgggcccgcctgcctatcccactgcccggtccaccgccgcaaactctgcccgcccgcgcgcgccccaccccgccgatcgcggtgagcccggactccgccgccgccgcttcgctctaccctgaccagccctagatctgtgcgggatccgccgccatgttctggcgcatgaccggcctctccgcggcctcgcccgtggatacaattctggacaaggagaactttacattggaagagcttcttgatgaggatgaaatcattcaggagtgcaaagcgctgaatacccgactcataaatttcttgcgagataaggcccaagtgtcgcaattacttcgttacattgtggaagaagttcctgaggattcagagaagaaacaatctttcaagtttccttttatcgcttgtgagatttttgcttgtgaaattgacattattttgagaaccttggtagaggatgttgagttaatggatttgcttttttcatttataaaacctgaccatccgcatagcacactgttagctggttacttcagtaaggtggttatatgtttgatgcttcgaaagactgctcctcttatgaattatgttcaggagcatccagatattgttgtccagcttgtcgacctcattggtatcacatcaataatggaggtgttggtgagattgattggtgctgatgaaaccatatacttgaatttcgcggatacattgcattggttagagaatacatatgtactggaaatgattgtggataaatttagctcatcagactctcctgaagtgcatgcaaatgctgctgaaattctttctgcggtaactcgatgcgcccctcctgctcttgctgcaaaaatatgcagtccaagttttgttggcaggttgtttcatcatgctcttgacgagtcaagaccaaaatctgttctggttcattcattgtcagtgtgtatatctttattggaccccaaaagactagcatcagtctcataccaagcatttagaagcaacttaactcacgggacgctggttacagccagtccagaaacagttgatggtatactggagagtctaggtgacttgctgaagttactggacattacttcttctcaaaatgtttttcctacaacttatggatgtttgtgtccgcctcttggaaaacaccgtttgaagattgtagaattcatctctgttttgctaacaattggtagcgaaatagctgagaagaagctaataagccaatcagtgataaagcattgcattgatttattttttcagtacccttataataactttttgcatcatcatgttgagaacattattgtttcttgccttgaggttaaaagaaatcaattgattgaccatattcttaatgactgtggtcttgttggtaaagtccttgccgctgaaaaaagttcttctctggcagtggagtctaatgggccaacattaccatcagaagggaaagaacctccaagaattgggaatattgggcacataactcgaatagcgaataagctcattcaatttggaaatagtaacagcatgatccagagtcacttgcaggagaacagtgagtgggctgtatggcaaatagatgtcctgatcaaacgcaatgaggtggagaatgtttaccattgggcatccgtccaacatctctacatgatcgtgggagggatagcgatgacgacgacttccgagacagagactacgatgtggcagcactcactaataatatgagccaggcatttcgatttgggatatacaggaatgatgacattgaagaggtgaactgcgcatcattatattaagaagatagaagggtccaaaatacaccaatacaagataaagaaaccaccttacggtgggcaaaaaagaaaatacaaaaagc

SEQ ID NO: 219432 - DNA, 2570 bp, Zea Mays
ccactcctctctgctgtccaaggcaggggccaggggcgggcggacagcggaggcaagaggcgcgagctcggcccaaggcgctgagggagacagccagccgctgcattgcgctactacattggccaggagggctcgccgccggggggaggctcggatctcgccgtctctggccacccgtacctgctgccgcgtgcttcacttggtgccgctttccgcgcctactggcgggcggcctcgactccagcgcggcgtgatctggcgcgcgccaccgacgccgctcgcgtggggaggcctggatcttggcgcgccgcgagaccccggggaggacggcgacggcgcgctcatcagtcgcccgcagtccgctgagctgctgccgactgcgcccggcggccgggagatctggccgacggcgcggcgctgcagatcccgtcctgcctgcgcgcgtgggcacggctcactgctgctgtggaggctgttacgcgcggtggtggtaccgatgggctacgggtacgtggaacccttcctgcccccacagcagcagcagcagcaggggggctacgggcaactgcaggcgcagctggctccgcggccgccggcttgcccgtactcgtcgtccgcctccgctccgccggtctccgcgtcctaccattcttcgcccccgccaacgtcgcctccgccgctaagcagcccacctccggcgtcccctttaccggagccatcgccgccgtcgtctccgccgccggcattgttgcctcctccgccggacgctccccctccgtcgcttcccccgtcaccgctgccacatccaaccccgtcaccgcctcaagccccgccgcccccgctgccgacggaccagccgcgcgttcagccccgcgtatacccatcaccgccaccgccgtcgcttcctcctcctcctccgccgcctcccaccgtctcgccgccatcgccgggtccatccaactctccatcgccgtcgccgtcgcctgctccagctacacaagctccagctccggctcctgcgcgtgttgctgcctattcgcctcccccgccaaaaatcgcccctcccccgccaccgcactatcgcggcaagtcgcattacacgccgcactcgcccgtgaagtcgcattcgaactcgacccatgcagctagcggcagcggcaacaacatcgagatatcgagggaagcggccaccaccatcgtagcactggccggtctcgctatgctcagctttattggcgccaccatttggttcgtcaagaaaaagcgccggcgcattgagcccccggcgacactgcctacacagcaaccagctcctccgccaccgcccaactacattccatcttcggctggatcctcactagcttcagatgggttctacttgagatcgccagggtatcctttcatgagctatcacagatgactttgcagaagagaaccttttgggggaaggtggatttgggtgcgtgttcaagggcattttgcaagatggtcgcccagttgccgtcaagaagctcaagattgggaatgggcaaggcgagcgtgagttcaaggctgaggtcgatactatcagcagagtacatcatagacatttggtttctctagtaggctattgcactgcggagggccagcgaatgcttgtttacgattttgttcccaacaacacactttattaccacctccatgtaagtgaagcatcactggattggcagacaagggttaagattgcagctggagcagctcgagggattggttacctccatgaagattgtcatccacgtattattcatagagatattaaatcatccaatattttgttggataacaacttcgaagctcaggtttctgattttggacttgcaaggaagaaaacctgttgatgcttctcagcctttgggagatgaaagtctggttgaatgggctcgtcctcttctgatgaaggcaatcgagcttcgggagtttggggaccttcctgaccccaggatgggaaacaggttcgatgaaaacgagatgttccatatgataggagctgcggctgcatgcattcggcattctgcagcaatgaggccacggatggggcaggtggttagagcactagatagtttagccgactctaatctgaacaacggcctccaacccggacgcagcgaggtgttcttagagccacagacggaggagattcgactgttccagctgagggagttcggcagccgggactgtagcgacgagctgagccaagcgagctggagaagccgaagagatttgtgaacagattcggtacaagatcattaacattctttttttttgctcattctttacatgtaattatctcttttacatgattctttttttggttttactcctccctgaggccattcttgttccccggtggaataaattttgcgtgagataagtaaattgaaccctctttttgcagtgaagagagttcggttcctggcattcactgacaaatattactgctagtgctagtgtctgtgtgtaaggattagggcagttcacttgtatgcttaactgaccaggcgctgcgttgggcgggcacaagtacaatgatt

SEQ ID NO: 219433 - DNA, 2572 bp, Zea Mays
ccactcctctctgctgtccaaggcaggggccaggggcgggcggacagcggaggcaagaggcgcgagctcggcccaaggcgctgagggagacagccagccgctgcattgcgctactacattggccaggagggctcgccgccggggggaggctcggatctcgccgtctctggccacccgtacctgctgccgcgtgcttcacttggtgccgctttccgcgcctactggcgggcggcctcgactccagcgcggcgtgatctggcgcgcgccaccgacgccgctcgcgtggggaggcctggatcttggcgcgccgcgagaccccggggaggacggcgacggcgcgctcatcagtcgcccgcagtccgctgagctgctgccgactgcgcccggcggccgggagatctggccgacggcgcggcgctgcagatcccgtcctgcctgcgcgcgtgggcacggctcactgctgctgtggaggctgttacgcgcggtggtggtaccgatgggctacgggtacgtggaacccttcctgcccccacagcagcagcagcagcaggggggctacgggcaactgcaggcgcagctggctccgcggccgccggcttgcccgtactcgtcgtccgcctccgctccgccggtctccgcgtcctaccattcttcgcccccgccaacgtcgcctccgccgctaagcagcccacctccggcgtcccctttaccggagccatcgccgccgtcgtctccgccgccggcattgttgcctcctccgccggacgctccccctccgtcgcttcccccgtcaccgctgccacatccaaccccgtcaccgcctcaagccccgccgcccccgctgccgacggaccagccgcgcgttcagccccgcgtatacccatcaccgccaccgccgtcgcttcctcctcctcctccgccgcctcccaccgtctcgccgccatcgccgggtccatccaactctccatcgccgtcgccgtcgcctgctccagctacacaagctccagctccggctcctgcgcgtgttgctgcctattcgcctcccccgccaaaaatcgcccctcccccgccaccgcactatcgcggcaagtcgcattacacgccgcactcgcccgtgaagtcgcattcgaactcgacccatgcagctagcggcagcggcaacaacatcgagatatcgagggaagcggccaccaccatcgtagcactggccggtctcgctatgctcagctttattggcgccaccatttggttcgtcaagaaaaagcgccggcgcattgagcccccggcgacactgcctacacagcaaccagctcctccgccaccgcccaactacattccatcttcggctggatcctcactagcttcagatgggttctacttgagatcgccagggtatcctttcatgagctatcacagatgactttgcagaagagaaccttttgggggaaggtggatttgggtgcgtgttcaagggcattttgcaagatggtcgcccagttgccgtcaagaagctcaagattgggaatgggcaaggcgagctaagtgaagcatcactggattggcagacaagggttaagattgcagctggagcagctcgagggattggttacctccatgaagattgtcatccacgtattattcatagagatattaaatcatccaatattttgttggataacaacttcgaagctcaggtttctgattttggacttgcaaggttagctgccgattccaatacacatgttaccacacgtgtcatggggacatttgggtatttggctccagagtatgcattgtcaggcaagttaacagcaaagtctgatgtatattcttttggggttgttcttttggagcttattacaggaagaaaacctgttgatgcttctcagcctttgggagatgaaagtctggttgaatgggctcgtcctcttctgatgaaggcaatcgagcttcgggagtttggggaccttcctgaccccaggatgggaaacaggttcgatgaaaacgagatgttccatatgataggagctgcggctgcatgcattcggcattctgcagcaatgaggccacggatggggcaggtggttagagcactagatagtttagccgactctaatctgaacaacggcctccaacccggacgcagcgaggtgttcttagagccacagacggaggagattcgactgttccagctgagggagttcggcagccgggactgtagcgacgagctgagccaagcgagctggagaagccgaagagatttgtgaacagattcggtacaagatcattaacattctttttttttgctcattctttacatgtaattatctcttttacatgattctttttttggttttactcctccctgaggccattcttgttccccggtggaataaattttgcgtgagataagtaaattgaaccctctttttgcagtgaagagagttcggttcctggcattcactgacaaatattactgctagtgctagtgtctgtgtgtaaggattagggcagttcacttgtatgcttaactgaccaggcgctgcgttgggcgggcacaagtacaatgatt

SEQ ID NO: 219434 - DNA, 2562 bp, Zea Mays
attataccactcctctctgctgtccaaggcaggggccaggggcgggcggacagcggaggcaagaggcgcgagctcggcccaaggcgctgagggagacagccagccgctgcattgcgctactacattggccaggagggctcgccgccggggggaggctcggatctcgccgtctctggccacccgtacctgctgccgcgtgcttcacttggtgccgctttccgcgcctactggcgggcggcctcgactccagcgcggcgtgatctggcgcgcgccaccgacgccgctcgcgtggggaggcctggatcttggcgcgccgcgagaccccggggaggacggcgacggcgcgctcatcagtcgcccgcagtccgctgagctgctgccgactgcgcccggcggccgggagatctggccgacggcgcggcgctgcagatcccgtcctgcctgcgcgcgtgggcacggctcactgctgctgtggaggctgttacgcgcggtggtggtaccgatgggctacgggtacgtggaacccttcctgcccccacagcagcagcagcagcaggggggctacgggcaactgcaggcgcagctggctccgcggccgccggcttgcccgtactcgtcgtccgcctccgctccgccggtctccgcgtcctaccattcttcgcccccgccaacgtcgcctccgccgctaagcagcccacctccggcgtcccctttaccggagccatcgccgccgtcgtctccgccgccggcattgttgcctcctccgccggacgctccccctccgtcgcttcccccgtcaccgctgccacatccaaccccgtcaccgcctcaagccccgccgcccccgctgccgacggaccagccgcgcgttcagccccgcgtatacccatcaccgccaccgccgtcgcttcctcctcctcctccgccgcctcccaccgtctcgccgccatcgccgggtccatccaactctccatcgccgtcgccgtcgcctgctccagctacacaagctccagctccggctcctgcgcgtgttgctgcctattcgcctcccccgccaaaaatcgcccctcccccgccaccgcactatcgcggcaagtcgcattacacgccgcactcgcccgtgaagtcgcattcgaactcgacccatgcagctagcggcagcggcaacaacatcgagatatcgagggaagcggccaccaccatcgtagcactggccggtctcgctatgctcagctttattggcgccaccatttggttcgtcaagaaaaagcgccggcgcattgagcccccggcgacactgcctacacagcaaccagctcctccgccaccgcccaactacattccatcttcggctggatcctcactagcttcagatgggttctacttgagatcgccagggtatcctttcatgagctatcacagatgactttgcagaagagaaccttttgggggaaggtggatttgggtgcgtgttcaagggcattttgcaagatggtcgcccagttgccgtcaagaagctcaagattgggaatgggcaaggcgagcgtgagttcaaggctgaggtcgatactatcagcagagtacatcatagacatttggtttctctagtaggctattgcactgcggagggccagcgaatgcttgtttacgattttgttcccaacaacacactttattaccacctccatgtaagtgaagcatcactggattggcagacaagggttaagattgcagctggagcagctcgagggattggttacctccatgaagattgtcatccacgtattattcatagagatattaaatcatccaatattttgttggataacaacttcgaagctcaggtttctgattttggacttgcaaggttagctgccgattccaatacacatgttaccacacgtgtcatggggacatttgggtatttggctccagagtatgcattgtcaggcaagttaacagcaaagtctgatgtatattcttttggggttgttcttttggagcttattacaggaagaaaacctgttgatgcttctcagcctttgggagatgaaagtctggttgaatgggctcgtcctcttctgatgaaggcaatcgagcttcgggagtttggggaccttcctgaccccaggatgggaaacaggttcgatgaaaacgagatgttccatatgataggagctgcggctgcatgcattcggcattctgcagcaatgaggccacggatggggcaggtggttagagcactagatagtttagccgactctaatctgaacaacggcctccaacccggacgcagcgaggtgttcttagagccacagacggaggagattcgactgttccagctgagggagttcggcagccgggactgtagcgacgagctgagccaagcgagctggagaagccgaagagatttgtgaacagattcgtgaagagagttcggttcctggcattcactgacaaatattactgctagtgctagtgtctgtgtgtaaggattagggcagttcacttgtatgcttaactgaccaggcgctgcgttgggcgggcacaagtacaatgatt

SEQ ID NO: 219435 - DNA, 2140 bp, Zea Mays
gctcccccctctgccagcctatgcagcgcccgagcgctcgcctttttgaccgcgtccgcctgccgccctgtcctgtacccctccctccctcccccctcctccccttcacagtgtcacacgcacttctcgttctcgccgatccagtgccactacactacaatactactgcgcggtagcgctcgcactcgcaccacaccacgccaccgctgctgcctgctcctcacagtcctccccgcgctcgcattgcgattcgcgacctagcgcgagggtacggggggtggtgcgcgcgcgtgctcggtgatccgggaagcgccgcgagatggccgggggcggaggcggcggtgccgcgccgaagcacgacgacttcacgccgcaccccgtcaaggaccagctccctggggtctcctactgcatcaccagccctcccccgtggcctgaagccgttcttcttgggttccaacattatctggtcatgcttggtaccactgtgatcataccaactgcacttgttccacaaatgggaggaaacaatgaggacaaagcagtggttatccagacattgctgttcgttgcaggtatcaacaccctcctgcagagtttctttggtaccatgttgcctgcagtgatcggcgggtcatacacctttgttctgcctaccatttcgatcatccttgctggacgttatgctaatgaacctaatccacatattaaatttctccgcatcatgcgtgggacacaaggtgcgttgattgtggcttcagccttacagattatagttggcttcagtggcctttggcgtaatgttgccaggtatctgagtccactttcagctgctcctttggtggcactagttggatttggactgtatgagctaggatttccatcggtcgccaaatgtgttgagattggtctacctcaactcatccttcttgtgatctttacaatgtacctgccacatgctgttcacatgctgaagtctatcttcgatcgatttgctgtcctgttcactatccccatagtgtggctctatgcatatcttctcactgttggaggagcatacaggaatgcaccaccaaagactcaatttcattgccgcactgaccgttctggattaattggtggcgcaccctggataagagtaccatatccttttcagtggggtgctccaacttttgatgcgggtgaagctttcgcgatgatggcagcatcatttgttgctctcgtggagtccactggggccttcattgctgtctctaggtatgctagtgctacaccaatcccaccctctgttcttagccgtggtattggctggcagggcatcggtattcttctggatgggctatttgggactggaaatgggtcttctgtatcagttgaaaatgctggtttgctagctttgacacgcgttggtagccgaagggtagtgcagatatcagctggtttcatgatattcttttctattctcgggaaattcggagctgtgttcgcctcaattcctgcacccatctttgcagctatgtattgtatcttctttgcttatgccggttctgctgggatcggcttccttcagttctgtaacctcaacacctttaggaccaagttcatccttgggttctcagttttcatgggcctttctgttcctcaatacttcaatgagtacacatctattgctggttatggtcctgttcacacacattcaagatggttcaacgatatagtgaatgtgatattctcgtccaaggcgtttgttgctggcttcgtggcatatttgctggacaacactattgacaggcatgaagcttcagtcaggagagaccgaggctaccattggtgggacaaattccggtcgtacaggaccgatacaagaagcgaggagttctattccctgccattcaatctgaataagttcttcccatcggtctgagcttttgctgtggttaatacctatcactataacggattggaacaatatcacgatacctccaacatgcctaagtactatcactatgactcgatctgaatatgtgagtattgaaaacaagtcgacctatgtgtcgttggctcgttggagagttgtaaaagaacttgtatttgagtattgcgaagttcgctgattgtttattgcatgagaactaaagtt

SEQ ID NO: 219436 - DNA, 2215 bp, Zea Mays
gctcccccctctgccagcctatgcagcgcccgagcgctcgcctttttgaccgcgtccgcctgccgccctgtcctgtacccctccctccctcccccctcctccccttcacagtgtcacacgcacttctcgttctcgccgatccagtgccactacactacaatactactgcgcggtagcgctcgcactcgcaccacaccacgccaccgctgctgcctgctcctcacagtcctccccgcgctcgcattgcgattcgcgacctagcgcgagggtacggggggtggtgcgcgcgcgtgctcggtgatccgggaagcgccgcgagatggccgggggcggaggcggcggtgccgcgccgaagcacgacgacttcacgccgcaccccgtcaaggaccagctccctggggtctcctactgcatcaccagccctcccccgtggcctgaagccgttcttcttgggttccaacattatctggtcatgcttggtaccactgtgatcataccaactgcacttgttccacaaatgggaggaaacaatgaggacaaagcagtggttatccagacattgctgttcgttgcaggtatcaacaccctcctgcagagtttctttggtaccatgttgcctgcagtgatcggcgggtcatacacctttgttctgcctaccatttcgatcatccttgctggacgttatgctaatgaacctaatccacatattaaatttctccgcatcatgcgtgggacacaaggtgcgttgattgtggcttcagccttacagattatagttggcttcagtggcctttggcgtaatgttgccaggtatctgagtccactttcagctgctcctttggtggcactagttggatttggactgtatgagctaggatttccatcggtcgccaaatgtgttgagattggtctacctcaactcatccttcttgtgatctttacaatgtacctgccacatgctgttcacatgctgaagtctatcttcgatcgatttgctgtcctgttcactatccccatagtgtggctctatgcatatcttctcactgttggaggagcatacaggaatgcaccaccaaagactcaatttcattgccgcactgaccgttctggattaattggtggcgcaccctggataagagtaccatatccttttcagtggggtgctccaacttttgatgcgggtgaagctttcgcgatgatggcagcatcatttgttgctctcgtggagtccactggggccttcattgctgtctctaggtatgctagtgctacaccaatcccaccctctgttcttagccgtggtattggctggcagggcatcggtattcttctggatgggctatttgggactggaaatgggtcttctgtatcagttgaaaatgctggtttgctagctttgacacgcgttggtagccgaagggtagtgcagatatcagctggtttcatgatattcttttctattctcgggaaattcggagctgtgttcgcctcaattcctgcacccatctttgcagctatgtattgtatcttctttgcttatgccggttctgctgggatcggcttccttcagttctgtaacctcaacacctttaggaccaagttcatccttgggttctcagttttcatgggcctttctgttcctcaatacttcaatgagtacacatctattgctggttatggtcctgttcacacacattcaagatggttcaacgatatagtgaatgtgatattctcgtccaaggcgtttgttgctggcttcgtggcatatttgctggacaacactattgacaggcatgaagcttcagtcaggagagaccgaggctaccattggtgggacaaattccggtcgtacaggaccgatacaagaagcgaggagttctattccctgccattcaatctgaataagttcttcccatcggtctgagcttttgctgtggttaatgtgagatgctcttgttactctggaactgcccaccccctgttctccggcggtggcaccgtgatctggattttctcgacctatcactataacggattggaacaatatcacgatacctccaacatgcctaagtactatcactatgactcgatctgaatatgtgagtattgaaaacaagtcgacctatgtgtcgttggctcgttggagagttgtaaaagaacttgtatttgagtattgcgaagttcgctgattgtttattgcatgagaactaaagtt

SEQ ID NO: 219437 - DNA, 2072 bp, Zea Mays
gctcccccctctgccagcctatgcagcgcccgagcgctcgcctttttgaccgcgtccgcctgccgccctgtcctgtacccctccctccctcccccctcctccccttcacagtgtcacacgcacttctcgttctcgccgatccagtgccactacactacaatactactgcgcggtagcgctcgcactcgcaccacaccacgccaccgctgctgcctgctcctcacagtcctccccgcgctcgcattgcgattcgcgacctagcgcgagggtacggggggtggtgcgcgcgcgtgctcggtgatccgggaagcgccgcgagatggccgggggcggaggcggcggtgccgcgccgaagcacgacgacttcacgccgcaccccgtcaaggaccagctccctggggtctcctactgcatcaccagccctcccccgtggcctgaagccgttcttcttgggttccaacattatctggtcatgcttggtaccactgtgatcataccaactgcacttgttccacaaatgggaggaaacaatgaggacaaagcagtggttatccagacattgctgttcgttgcaggtatcaacaccctcctgcagagtttctttggtaccatgttgcctgcagtgatcggcgggtcatacacctttgttctgcctaccatttcgatcatccttgctggacgttatgctaatgaacctaatccacatattaaatttctccgcatcatgcgtgggacacaaggtgcgttgattgtggcttcagccttacagattatagttggcttcagtggcctttggcgtaatgttgccagaggtatctgagtccactttcagctgctcctttggtggcactagttggatttggactgtatgagctaggatttccatcggtcgccaaatgtgttgagattggtctacctcaactcatccttcttgtgatctttacaatgtacctgccacatgctgttcacatgctgaagtctatcttcgatcgatttgctgtcctgttcactatccccatagtgtggctctatgcatatcttctcactgttggaggagcatacaggaatgcaccaccaaagactcaatttcattgccgcactgaccgttctggattaattggtggcgcaccctggataagagtaccatatccttttcagtggggtgctccaacttttgatgcgggtgaagctttcgcgatgatggcagcatcatttgttgctctcgtggagtccactggggccttcattgctgtctctaggtatgctagtgctacaccaatcccaccctctgttcttagccgtggtattggctggcagggcatcggtattcttctggatgggctatttgggactggaaatgggtcttctgtatcagttgaaaatgctggtttgctagctttgacacgcgttggtagccgaagggtagtgcagatatcagctggtttcatgatattcttttctattctcgggaaattcggagctgtgttcgcctcaattcctgcacccatctttgcagctatgtattgtatcttctttgcttatgccggttctgctgggatcggcttccttcagttctgtaacctcaacacctttaggaccaagttcatccttgggttctcagttttcatgggcctttctgttcctcaatacttcaatgagtacacatctattgctggttatggtcctgttcacacacattcaagatggttcaacgatatagtgaatgtgatattctcgtccaaggcgtttgttgctggcttcgtggcatatttgctggacaacactattgacaggcatgaagcttcagtcaggagagaccgaggctaccattggtgggacaaattccggtcgtacaggaccgatacaagaagcgaggagttctattccctgccattcaatctgaataagttcttcccatcggtctgagcttttgctgtggttaatgtgagatgctcttgttactctggaactgcccaccccctgttctccggcggtggcaccgtgatctggattttctcggtacatgaaaaaattactgtatattaaaacccgctcagctcgggtttcacctc

SEQ ID NO: 219438 - DNA, 1861 bp, Zea Mays
gtagcatccacaggctgctgcggcagtgcaagagtgtgaccctcgctcgcttcgaggccacctcgtgactaatcattctagctgggagcctgggattaacggacgacaccagcgaggggagacgaggaaaaagaaaagaaaggcgctgtgctgccgaaagagcgaggagcaaaacggaggaacacaatgatagggagtagtacggccgcgcaactctgcgtacagctgaagccgttcttcttgggttccaacattatctggtcatgcttggtaccactgtgatcataccaactgcacttgttccacaaatgggaggaaacaatgaggacaaagcagtggttatccagacattgctgttcgttgcaggtatcaacaccctcctgcagagtttctttggtaccatgttgcctgcagtgatcggcgggtcatacacctttgttctgcctaccatttcgatcatccttgctggacgttatgctaatgaacctaatccacatattaaatttctccgcatcatgcgtgggacacaaggtgcgttgattgtggcttcagccttacagattatagttggcttcagtggcctttggcgtaatgttgccaggtatctgagtccactttcagctgctcctttggtggcactagttggatttggactgtatgagctaggatttccatcggtcgccaaatgtgttgagattggtctacctcaactcatccttcttgtgatctttacaatgtacctgccacatgctgttcacatgctgaagtctatcttcgatcgatttgctgtcctgttcactatccccatagtgtggctctatgcatatcttctcactgttggaggagcatacaggaatgcaccaccaaagactcaatttcattgccgcactgaccgttctggattaattggtggcgcaccctggataagagtaccatatccttttcagtggggtgctccaacttttgatgcgggtgaagctttcgcgatgatggcagcatcatttgttgctctcgtggagtccactggggccttcattgctgtctctaggtatgctagtgctacaccaatcccaccctctgttcttagccgtggtattggctggcagggcatcggtattcttctggatgggctatttgggactggaaatgggtcttctgtatcagttgaaaatgctggtttgctagctttgacacgcgttggtagccgaagggtagtgcagatatcagctggtttcatgatattcttttctattctcgggaaattcggagctgtgttcgcctcaattcctgcacccatctttgcagctatgtattgtatcttctttgcttatgccggttctgctgggatcggcttccttcagttctgtaacctcaacacctttaggaccaagttcatccttgggttctcagttttcatgggcctttctgttcctcaatacttcaatgagtacacatctattgctggttatggtcctgttcacacacattcaagatggttcaacgatatagtgaatgtgatattctcgtccaaggcgtttgttgctggcttcgtggcatatttgctggacaacactattgacaggcatgaagcttcagtcaggagagaccgaggctaccattggtgggacaaattccggtcgtacaggaccgatacaagaagcgaggagttctattccctgccattcaatctgaataagttcttcccatcggtctgagcttttgctgtggttaatgtgagatgctcttgttactctggaactgcccaccccctgttctccggcggtggcaccgtgatctggattttctcggtacatgaaaaaattactgtatattaaaacccgctcagctcgggtttcacctc

SEQ ID NO: 219439 - DNA, 856 bp, Zea Mays
ttcgacggctgggggtttgccaccgaggcgtccaaagggagcaagcgcgtcgaccagctcttcgccgctcgatgcctacagagtaccgctgcgcgagtcgtgaccttcccgacgtgcgtgacgcctaaccaagccccgcaccgccccgcccgcccccgcccccgccccgccgcaggagacggggtcggcacggggcgatgaggagcagcgaggccatggagctcctgggcttccctccctactccaggccctccccttccgaggtgaaggctgcgtatagaagaatggtgatggagtcccatcctgatcgtgtcccaacgcatctgaaatcgcaggctgagtcaaaattcaaggaggtaagatagcagaagcatattcttgtttgaaggacggaagaagatcagggagtaggatggaagttcatgttatgcgttctggtgttccaactagccacggaagatcaaatagaacgttggttaaagccccgtttctactcataatgtttgcagcagtttcttttggcgccttcagcgcatcaagagcgtatcaacggcaaaaggaactgtgttcctctcagaacccatttctaccatagaggaagacggtgggctctgtccatgttcataggcgagaagagcttcttgctacgttgtatacagatgtaaaacaatcacaccatcctgaataaacgtgccaacctgtgccttctaactttgttgtttcagactttccaaacatgtaaaatcacttttgtattggtttcctgatttcgtctgccttgttgctactacgttcagttagctttgctttaaaactgcttcgagggcaaccagaaacacacaacagcatgtccaag

SEQ ID NO: 219440 - DNA, 1878 bp, Zea Mays
ggcatcagcacagctccgccagcctcggccacggccagcctcgctcctcactcactcccccagccagcgttacaataggaaggagggaggagcaacctagcggcagccacagcagcagcgtagctgtagccacagcagagcagcggcggctgcgttcagacgaccactacttgttcctcctcctcctcctgctccttcccccaaattccacccccctcaaataataaacaaatcaaagcaagcgaggaggggagcagatccgcgagatccggcgcgccgccgatgacgagcggcgccgggggagccgcggccgggatcgggggcaccagggtgcccacgtggagggagcgcgagaacaaccgccgcagggagcgccggcgccgcgcgatcgccgccaagatcttcgccggcctcagggcctacggcaactacaacctgcccaagcactgcgacaacaacgaggtgctcaaggcgctctgcaacgaggccggctggaccgtcgagcccgacggcaccacctaccgcaagggatgtaaacctctggcaacagagcgtccagatccaattgggaggtctgcatcaccaagcccctgctcttcatatcaaccaagtccgcgagcctcatacaacccaagcgcggcatcctcctcgttcccaagctctgggtcctcctcccacattactcttggcgggagcaacttcatgggaggcgtcgagggcagctcccttatcccgtggctaaagaacctctcgtcgagctcctcgttcgcctcctcctccaagttcccgcagcttcaccacctctacttcaacggcggttccatcagcgcgccggtgacgcctccatccagctctccaacccgcacgcctcgcatcaagactgactgggagaacccgagtgttcagccaccgtgggctggggcgaactacgcgtctcttcccaactcccagccgccgagccctgggcaccaggttgctccggacccggcgtggctagccgggttccagatttcgtctgctggcccttcgtctccaacttacagccttgtggctccgaatccgtttggtatcttcaaggagaccatcgtcagcacctcaagaatgtgcacccctgggcagagtggaacgtgctctcctgtaatgggcggtgcgccgatccatcacgatgtccagatggctgatggtgccccagatgacttcgccttcgggagcagcagcaacggcaacaacgagtcgcctggtctcgtgaaggcatgggagggggaacggatacacgaggagtgcgcctcggacgagcatgagctggagctcacccttgggagctcaaagactcgtgcagatccttcctgatcatgctgcaagagacaagtcttcacctgttttttttttttactttcatctttattcggacggtgctcctctgctttatgagttcaatgtttgtagaaagagggaagggattcagagaccttatcctgctcctctggagatgatatccatcctctttcaaggatatgaactttattctagcttaagcaaattgttaacttatttatttcattttttcttcatatcctttttttttgtctccctcaagaaacgaaaaggaaaaaaatgcaagggaaaagagtgcttgcaggaaccttttagacaagtcgcagaacttgtcatctgtcagcagtagctgagattcctgtggcattcctgtggccttgtaaaaattagctccagttgtcattgatatgactattatcgttgtacttgtgtcgaaagtgtgtacattgtatggatcatttaggtcttgttgtcattgatatgactattatcgttgtacttgtgtcgaaagtgtgtacattgtatggatcatttaggtctttc

SEQ ID NO: 219441 - DNA, 2860 bp, Zea Mays
gcaattgtttccaggtaatctcgcatcagcaaacagcaccgggctccgttcaccgccttcccttctcttctccggttcctccctcgcgcgttcgctcgctctcgtggcgcaactcgtagaccgccgccgcctccgctctacgccaggtgcctaggtctagcttcgtcggtcccttcgccaacgacgagcacccacccgattgcgagatctgacgccagaagttcagctaggagtgcatcttgtttacctgttgcttaatcatggacaactctcagaatcaaccaccaccacctggtgttggaacatggccgcagacacctcctagtcacccgccacaatgccatgctgatccacagtcttatcatccacaatttgctgctagacctgacaatgctagtgccaataatagtggtagttcagcaaacattgagtcagctgtccaggaggctgttcttcacgcgcaggacattgagactcagcaagtcatacagaatcaaagatatgcaaacacaacaagtgaacctacaaaatatggggaagacttactttcgaaccgccgtgaccctaatgcattgaaggagcatttactaaagatgacagctgatcatcgtgcagagatggcaagcaaaagggggaagccacttcatccaaacaatggcaactgtgaaattggcaatggctatggtgtacctggaggcggtgcttattatgctgcaaacttgccaagtcctcaaatgaataaacctagagatgaaactgataaagctaaatgtgcaaacgatctccctgattttttaaagcagaggttaagggcaaggggaattctcaaagatgagactacaaataagaattacacgagtacgcagactgtaagttgctaatttctttccaaactgaagtgcgaaggtggaagctaagtactagtagttgggagaaacttgatctagtgccagcacaatcttattattcagcagtaggcaagtatcattaccctgcagttgtgtctgagtgcctgattcaggtctttggtcgtagtccttaggtgtagtcttcttcatttgttccctagttctgttctttacaaacttctgtattttcattttattaatggaaatggggttatccttggatcgaaaagaaaaaaaaatgccacatggatatggaaatctatcatatgaaatgatgaaaactgtatggttgactaaaagtgcacttacctacataaataaaaagaacactgggaaatttgatgatactgaaaaatgttagaaaggatgccttttgtctttagcattagcttgcacatatgacaaacttgatgtgcaattgatattttatccatcacatttttttgtgttaattaatgtgtcattcatttggtgccactgagttacaggtggattctcaagaaatcgagaacaaatctgcacaagagttgcctcctggttggattgaagtgaaggacccgacaactggagcgccatacttctacaatcaaagcactggagtgagtcaatgggatcgccctgacagtgttgtgaatatcatgcaacatcaagtttctccatccttgccagagaactgggaggaggcaattgacaaatcaacaggccacaaatactattataacacgaagacacagaccacacaatgggaacctcctacttctgtgaacaccagtgttagacctccagcttccaccaacactgcagttgagccagtcgctcaagctgcagatatttggaactctcaaatgcagagatgtttgggctgtggtggatggggagttggtcttgtccagccttggggatactgcaatcactgcacaagggttcaaaatcgtccttttcaacagtacccatcttacacaaataatacgatgcacgccagtggtaacaatgctcccaaagctcaggggaatgtttcagctaagaacagatcaagctcaaagccacctttagggaaaccaaacagaaaagaccaccgcaaaagaaatcgccccgaggatgatgaacttgacccaatggacccgagttcttactcagatgctccacgcgggggctgggttgttggtttgaagggtgttcaaccacgagcagcagatactaccgcagctggacctttgttccaacaaagaccatatccctcaccgggtgctgtgttgagaaaaaatgcagaggtagcaacccatggcaagaaacgtggtggtatggctccgataacaaaaagaggagatggcagcgacggacttggggaggcagattagtcttttggtgaactgaaatgttgtgctatccgaatctccttggtggttgtctctggagctgctaaactatcattgcacgcctgaagaaaatcgaaaaaatattggctgccagatctggaatgaggaaactcactacagttcgcgagtttttgcagcgattaacgctagtgtactcgctggacctcgaggctagagcaatgcgagctcaccccggcttgctgatgacacattcactgagttcactgcggtttgccgatgacattcaatgtgcccttggtgtgaattttatatgaaaatgaactataatctgtaattggaaagagtgatttcaatgtaaggaattaacttttgtggggtgatgaaccatactagcgatgcacttagccaaacaagagaaatttggatttgtaccattaaaagattacaactttagatatatagcattgctatctcactaacatgtgtggtccacatgagacatgagtcaataacatgtggagccattgttatatatttaaagttgcaatcttttaatgatatagatttaattatttctaaaaacattgaccattttgacgaaacattttattggac

SEQ ID NO: 219442 - DNA, 2835 bp, Zea Mays
gcaattgtttccaggtaatctcgcatcagcaaacagcaccgggctccgttcaccgccttcccttctcttctccggttcctccctcgcgcgttcgctcgctctcgtggcgcaactcgtagaccgccgccgcctccgctctacgccaggtgcctaggtctagcttcgtcggtcccttcgccaacgacgagcacccacccgattgcgagatctgacgccagaagttcagctaggagtgcatcttgtttacctgttgcttaatcatggacaactctcagaatcaaccaccaccacctggtgttggaacatggccgcagacacctcctagtcacccgccacaatgccatgctgatccacagtcttatcatccacaatttgctgctagacctgacaatgctagtgccaataatagtggtagttcagcaaacattgagtcagctgtccaggaggctgttcttcacgcgcaggacattgagactcagcaagtcatacagaatcaaagatatgcaaacacaacaagtgaacctacaaaatatggggaagacttactttcgaaccgccgtgaccctaatgcattgaaggagcatttactaaagatgacagctgatcatcgtgcagagatggcaagcaaaagggggaagccacttcatccaaacaatggcaactgtgaaattggcaatggctatggtgtacctggaggcggtgcttattatgctgcaaacttgccaagtcctcaaatgaataaacctagagatgaaactgataaagctaaatgtgcaaacgatctccctgattttttaaagcagaggttaagggcaaggggaattctcaaagatgagactacaaataagaattacacgagtacgcagactgtaagttgctaatttctttccaaactgaagtgcgaaggtggaagctaagtactagtagttgggagaaacttgatctagtgccagcacaatcttattattcagcagtaggcaagtatcattaccctgcagttgtgtctgagtgcctgattcaggtctttggtcgtagtccttaggtgtagtcttcttcatttgttccctagttctgttctttacaaacttctgtattttcattttattaatggaaatggggttatccttggatcgaaaagaaaaaaaaatgccacatggatatggaaatctatcatatgaaatgatgaaaactgtatggttgactaaaagtgcacttacctacataaataaaaagaacactgggaaatttgatgatactgaaaaatgttagaaaggatgccttttgtctttagcattagcttgcacatatgacaaacttgatgtgcaattgatattttatccatcacatttttttgtgttaattaatgtgtcattcatttggtgccactgagttacaggtggattctcaagaaatcgagaacaaatctgcacaagagttgcctcctggttggattgaagtgaaggacccgacaactggagcgccatacttctacaatcaaagcactggagtgagtcaatgggatcgccctgacagtgttgtgaatatcatgcaacatcaagtttctccatccttgccagagaactgggaggaggcaattgacaaatcaacaggccacaaatactattataacacgaagacacagaccacacaatgggaacctcctacttctgtgaacaccagtgttagacctccagcttccaccaacactgcagttgagccagtcgctcaagctgcagatatttggaactctcaaatgcagagatgtttgggctgtggtggatggggagttggtcttgtccagccttggggatactgcaatcactgcacaagtacccatcttacacaaataatacgatgcacgccagtggtaacaatgctcccaaagctcaggggaatgtttcagctaagaacagatcaagctcaaagccacctttagggaaaccaaacagaaaagaccaccgcaaaagaaatcgccccgaggatgatgaacttgacccaatggacccgagttcttactcagatgctccacgcgggggctgggttgttggtttgaagggtgttcaaccacgagcagcagatactaccgcagctggacctttgttccaacaaagaccatatccctcaccgggtgctgtgttgagaaaaaatgcagaggtagcaacccatggcaagaaacgtggtggtatggctccgataacaaaaagaggagatggcagcgacggacttggggaggcagattagtcttttggtgaactgaaatgttgtgctatccgaatctccttggtggttgtctctggagctgctaaactatcattgcacgcctgaagaaaatcgaaaaaatattggctgccagatctggaatgaggaaactcactacagttcgcgagtttttgcagcgattaacgctagtgtactcgctggacctcgaggctagagcaatgcgagctcaccccggcttgctgatgacacattcactgagttcactgcggtttgccgatgacattcaatgtgcccttggtgtgaattttatatgaaaatgaactataatctgtaattggaaagagtgatttcaatgtaaggaattaacttttgtggggtgatgaaccatactagcgatgcacttagccaaacaagagaaatttggatttgtaccattaaaagattacaactttagatatatagcattgctatctcactaacatgtgtggtccacatgagacatgagtcaataacatgtggagccattgttatatatttaaagttgcaatcttttaatgatatagatttaattatttctaaaaacattgaccattttgacgaaacattttattggac

SEQ ID NO: 219443 - DNA, 2350 bp, Zea Mays
gcaattgtttccaggtaatctcgcatcagcaaacagcaccgggctccgttcaccgccttcccttctcttctccggttcctccctcgcgcgttcgctcgctctcgtggcgcaactcgtagaccgccgccgcctccgctctacgccaggtgcctaggtctagcttcgtcggtcccttcgccaacgacgagcacccacccgattgcgagatctgacgccagaagttcagctaggagtgcatcttgtttacctgttgcttaatcatggacaactctcagaatcaaccaccaccacctggtgttggaacatggccgcagacacctcctagtcacccgccacaatgccatgctgatccacagtcttatcatccacaatttgctgctagacctgacaatgctagtgccaataatagtggtagttcagcaaacattgagtcagctgtccaggaggctgttcttcacgcgcagttgtttatgataaccaggacattgagactcagcaagtcatacagaatcaaagatatgcaaacacaacaagtgaacctacaaaatatggggaagacttactttcgaaccgccgtgaccctaatgcattgaaggagcatttactaaagatgacagctgatcatcgtgcagagatggcaagcaaaagggggaagccacttcatccaaacaatggcaactgtgaaattggcaatggctatggtgtacctggaggcggtgcttattatgctgcaaacttgccaagtcctcaaatgaataaacctagagatgaaactgataaagctaaatgtgcaaacgatctccctgattttttaaagcagaggttaagggcaaggggaattctcaaagatgagactacaaataagaattacacgagtacgcagactgtggattctcaagaaatcgagaacaaatctgcacaagagttgcctcctggttggattgaagtgaaggacccgacaactggagcgccatacttctacaatcaaagcactggagtgagtcaatgggatcgccctgacagtgttgtgaatatcatgcaacatcaagtttctccatccttgccagagaactgggaggaggcaattgacaaatcaacaggccacaaatactattataacacgaagacacagaccacacaatgggaacctcctacttctgtgaacaccagtgttagacctccagcttccaccaacactgcagttgagccagtcgctcaagctgcagatatttggaactctcaaatgcagagatgtttgggctgtggtggatggggagttggtcttgtccagccttggggatactgcaatcactgcacaagggttcaaaatcgtccttttcaacagtacccatcttacacaaataatacgatgcacgccagtggtaacaatgctcccaaagctcaggggaatgtttcagctaagaacagatcaagctcaaagccacctttagggaaaccaaacagaaaagaccaccgcaaaagaaatcgccccgaggatgatgaacttgacccaatggacccgagttcttactcagatgctccacgcgggggctgggttgttggtttgaagggtgttcaaccacgagcagcagatactaccgcagctggacctttgttccaacaaagaccatatccctcaccgggtgctgtgttgagaaaaaatgcagaggtagcaacccatggcaagaaacgtggtggtatggctccgataacaaaaagaggagatggcagcgacggacttggggaggcagattagtcttttggtgaactgaaatgttgtgctatccgaatctccttggtggttgtctctggagctgctaaactatcattgcacgcctgaagaaaatcgaaaaaatattggctgccagatctggaatgaggaaactcactacagttcgcgagtttttgcagcgattaacgctagtgtactcgctggacctcgaggctagagcaatgcgagctcaccccggcttgctgatgacacattcactgagttcactgcggtttgccgatgacattcaatgtgcccttggtgtgaattttatatgaaaatgaactataatctgtaattggaaagagtgatttcaatgtaaggaattaacttttgtggggtgatgaaccatactagcgatgcacttagccaaacaagagaaatttggatttgtaccattaaaagattacaactttagatatatagcattgctatctcactaacatgtgtggtccacatgagacatgagtcaataacatgtggagccattgttatatatttaaagttgcaatcttttaatgatatagatttaattatttctaaaaacattgaccattttgacgaaacattttattggac

SEQ ID NO: 219444 - DNA, 1701 bp, Zea Mays
gtcactgtcttttcatgataatgctgcaactgtgaaattggcaatggctatggtgtacctggaggcggtgcttattatgctgcaaacttgccaagtcctcaaatgaataaacctagagatgaaactgataaagctaaatgtgcaaacgatctccctgattttttaaagcagaggttaagggcaaggggaattctcaaagatgagactacaaataagaattacacgagtacgcagactgtggattctcaagaaatcgagaacaaatctgcacaagagttgcctcctggttggattgaagtgaaggacccgacaactggagcgccatacttctacaatcaaagcactggagtgagtcaatgggatcgccctgacagtgttgtgaatatcatgcaacatcaagtttctccatccttgccagagaactgggaggaggcaattgacaaatcaacaggccacaaatactattataacacgaagacacagaccacacaatgggaacctcctacttctgtgaacaccagtgttagacctccagcttccaccaacactgcagttgagccagtcgctcaagctgcagatatttggaactctcaaatgcagagatgtttgggctgtggtggatggggagttggtcttgtccagccttggggatactgcaatcactgcacaagggttcaaaatcgtccttttcaacagtacccatcttacacaaataatacgatgcacgccagtggtaacaatgctcccaaagctcaggggaatgtttcagctaagaacagatcaagctcaaagccacctttagggaaaccaaacagaaaagaccaccgcaaaagaaatcgccccgaggatgatgaacttgacccaatggacccgagttcttactcagatgctccacgcgggggctgggttgttggtttgaagggtgttcaaccacgagcagcagatactaccgcagctggacctttgttccaacaaagaccatatccctcaccgggtgctgtgttgagaaaaaatgcagaggtagcaacccatggcaagaaacgtggtggtatggctccgataacaaaaagaggagatggcagcgacggacttggggaggcagattagtcttttggtgaactgaaatgttgtgctatccgaatctccttggtggttgtctctggagctgctaaactatcattgcacgcctgaagaaaatcgaaaaaatattggctgccagatctggaatgaggaaactcactacagttcgcgagtttttgcagcgattaacgctagtgtactcgctggacctcgaggctagagcaatgcgagctcaccccggcttgctgatgacacattcactgagttcactgcggtttgccgatgacattcaatgtgcccttggtgtgaattttatatgaaaatgaactataatctgtaattggaaagagtgatttcaatgtaaggaattaacttttgtggggtgatgaaccatactagcgatgcacttagccaaacaagagaaatttggatttgtaccattaaaagattacaactttagatatatagcattgctatctcactaacatgtgtggtccacatgagacatgagtcaataacatgtggagccattgttatatatttaaagttgcaatcttttaatgatatagatttaattatttctaaaaacattgaccattttgacgaaacattttattggac

SEQ ID NO: 219445 - DNA, 1759 bp, Zea Mays
tttctttccaaactgaagtgcgaaggtggaagctaagtactagtagttgggagaaacttgatctagtgccagcacaatcttattattcagcagtaggcaagtatcattaccctgcagttgtgtctgagtgcctgattcaggtctttggtcgtagtccttaggtgtagtcttcttcatttgttccctagttctgttctttacaaacttctgtattttcattttattaatggaaatggggttatccttggatcgaaaagaaaaaaaaatgccacatggatatggaaatctatcatatgaaatgatgaaaactgtatggttgactaaaagtgcacttacctacataaataaaaagaacactgggaaatttgatgatactgaaaaatgttagaaaggatgccttttgtctttagcattagcttgcacatatgacaaacttgatgtgcaattgatattttatccatcacatttttttgtgttaattaatgtgtcattcatttggtgccactgagttacaggtggattctcaagaaatcgagaacaaatctgcacaagagttgcctcctggttggattgaagtgaaggacccgacaactggagcgccatacttctacaatcaaagcactggagtgagtcaatgggatcgccctgacagtgttgtgaatatcatgcaacatcaagtttctccatccttgccagagaactgggaggaggcaattgacaaatcaacagggttcaaaatcgtccttttcaacagtacccatcttacacaaataatacgatgcacgccagtggtaacaatgctcccaaagctcaggggaatgtttcagctaagaacagatcaagctcaaagccacctttagggaaaccaaacagaaaagaccaccgcaaaagaaatcgccccgaggatgatgaacttgacccaatggacccgagttcttactcagatgctccacgcgggggctgggttgttggtttgaagggtgttcaaccacgagcagcagatactaccgcagctggacctttgttccaacaaagaccatatccctcaccgggtgctgtgttgagaaaaaatgcagaggtagcaacccatggcaagaaacgtggtggtatggctccgataacaaaaagaggagatggcagcgacggacttggggaggcagattagtcttttggtgaactgaaatgttgtgctatccgaatctccttggtggttgtctctggagctgctaaactatcattgcacgcctgaagaaaatcgaaaaaatattggctgccagatctggaatgaggaaactcactacagttcgcgagtttttgcagcgattaacgctagtgtactcgctggacctcgaggctagagcaatgcgagctcaccccggcttgctgatgacacattcactgagttcactgcggtttgccgatgacattcaatgtgcccttggtgtgaattttatatgaaaatgaactataatctgtaattggaaagagtgatttcaatgtaaggaattaacttttgtggggtgatgaaccatactagcgatgcacttagccaaacaagagaaatttggatttgtaccattaaaagattacaactttagatatatagcattgctatctcactaacatgtgtggtccacatgagacatgagtcaataacatgtggagccattgttatatatttaaagttgcaatcttttaatgatatagatttaattatttctaaaaacattgaccattttgacgaaacattttattggac

SEQ ID NO: 219446 - DNA, 2569 bp, Zea Mays
aaatccgtgtggattttgcacggccacgtcccgaaaatgccacaggttctgcacaacaggacttcctagcgatgtcaccgttgaggttggggatatgtctttccaccttcacaagttccctttactttcaaaaagcgcctttcttgaacggtcaattgaagaaaactctgaccaagaagaatgcatcatcaaactaaatgacattcctgggggtgccaagtcatttgagctagttgcaaggttctgctatggtgtgaaaatagagctttcacctgcaaatgttgtctacctacggtgtgcctcagagcatctagaaatgactgaagaagtagctgaggaaaacctgattgcacagtcagaaatgttcctcaaccaagtggttctccgtaactggaaagattccttggcagcattggaaacatgtgatgacctactcccccatgctgaagacctccagattgtgaacagatgcatcgagtcattggcatcaaaagctactagtaatccaaacctcttcggatggccgataagggaacatggcatgatgcaaagtcctggtggcagtgtactatggaatgggatcagcacgggtgcaaggcccagaaatttcaattcagactggtggtatggtgatgcttcatcattgagttttcccatgtataagaggttaatctccaccatggagtctcgaggcatccggcctgaaataattgctggttccttaacctactatgccaagaagtatcttccaggacttaggcgtcatagtcatagcatgggcacaatgcctcttactgctactctatctgaggttgaacaaaaaaaattacttgaggagatcgacaggcttttgcctcttcacaggggtatagcatcgacaaaagttctgcttgggctccttcgcactgccatgattctgaaagccagccccacgtgcatttctaacttggagaaacgaattggcatgcaactagaccaggccactttggaggatctgctgctgccaaatttctcctacacaatggaaacactgtacaatgtggagtgtgtgcacaggattcttgatcatttcttggcaatggaccaagcaaatggtggcgagtccccatgcttggatgatgtcatggcatccccatccttgacaccgatcacaagtgttgccaagctaattgacggctatcttgcagaaattgcaccagatatcaatttgaagcctccaaagttccaagctctggcctctgctattcctgaatatgcccggccactggatgatggcctttatcgtgccattgatatatacttgaaggctcattcctggctgtcagaagctgaaagggagcagttctgccggctgttggactgccagaagctctccctggaagcatgcacccacgccgcccagaacgagaggctgccgttgcgcgtggtggtgcaagtcctcttcttcgagcaactccagctaagaacctcgatcgcagggtgcctgctggtctcggacaacctcgaaggctccaggcctctgcggagcggcattgccacatccggcgaggctggaggctgggccacggctgtccgagagaaccaggtcctgaaggtcggcatggacaacatgcggacgcggctggccgagctggagaaggagtgctcgagcatgcggcaggagatcgagaagctgggcgggcgcgctggtaagggcggcggtggcgggtgggcctcccgcgtcgtgccccggcgactgggcctgaaggtgaggtcgcagatgtgcagcgcccaggagggctccgtcagtgagcagcacaggagcatgagcgccaagctcgacaagctgcaggctaaggtgtcgaagcagaagaagcagctggccgcggatgcctgaagttgaggtttcgagactccggcttcatggcctgaccttgtaattttagcccggtatcaattgtttttgcctctcttttgttgcctgtgtagctgttaggcgaaacgaccgagtgcagtgtgtcggttcgttcttgaaccgtggatggtaccaagaagaatgggagtgtcctagctaagaacacgaacctgatgtgatcagttaatagtttgttaccggtaaggaaaatgtcgcttgcttggttacttttgtgatctgtgacatgtccgttgcctacatgttaaacttttctgtctgctaggactaaactaggagtgctgcttgactgctagtggtggaagacggcggcacaccgctatcacttggagtgagggttttgctcctactgtcgtcttgcttggttataacttataaatataaacgtcggttcagattcgagtcgggtaaaagtcgggttcttgttcgtttggcatgacccatatccgactcgtatcggatcagatttattcgtgtttttttgtcggatttttttaggttagatcgtttttttctttgcgttgggttttaggttaaaagttataatccgtacgtccccctatattgttgtgggtcggaccacccatgctcatgtttacttggtttggttatatggtcttatttgtttcggacctggggtaggcattcatatcagat

SEQ ID NO: 219447 - DNA, 1522 bp, Zea Mays
gatggtcaggtatttgatgatcatggacgggccattcaatacatgtctattgaggaggctgatttgttgattagaaagcgtgctaggcaaagtgatattgctgcaagttatgtcaaggttgtggatgaggaaggcatcaattctttgcataaaggggacgacagaccatcattgagtcccaaggcttacataaatgggtatgctgcttcttttcgaaacggattgggttttaacaatggaaatggtatttattctggcgagcaagggtttgctattggtggtgaagagcggttaagcagatcaaatgctgatccttttaaaaacgggttgggttttaacaatggaaatggtatttactctggtgagcaagggttcgctattggtggtgaagagaggttaagcagatcaaatggctatctttctgagttggtcgcggcagcatatgtgtgccatggtggtgttcaaagagttcatattatagatggatgtgttgatggatcacttctattagaattgtttacgagagatggagcaggaacaatgattgctagggatgtttatgaaggaacaaggatggctacagcggaagatcttcctggcattagaaaaattattcggccgctggaggattctggtgttttggtgcggagaacagatgcacagcttcttgaagcgctagagtcattctatgttgttgaaagagatggttcaatcattgcttgtgctgctctatttccattccctgaggaacaatctggtgaagttgctgcaattgctgtatctgaagaatgccgaggaagaggtcagggggacaagttacttgattacgtggaaaagatggcattatccctgggtctcaagaaattattcttgcttactacacgaactgcagattggtttgtgcgacgtggcttttcagagtgctcaattggatctatccctgagcagaggagaaaacgtatcaacttgtcccgtggatccaagtattacataaagcagctgtagccaaagcctgctgggattatcgccaacaattttgtcatcaggtgactcagcagcatgcacagagtttggttccacacttccacttaattaagatggtaccagccaagattacaccaatttcgcggttgcccaaaggcatataattgcacaaagaaacaaaacaccattttactgtcactgtgtttgaaagatggttgtctttgtttaagtatgtgacagaagtttgttttgccaatagaatcaaggcagagaagaaatagctgattgaattatatgtagaccctatttaacaagcaataccaaagatgaagtgctcgtacagtatcatctctggttggtgcctcattgtgtgcatcatagatgattgaacttgccttttccactcatagctgattggccttatcttttctacttttgttgagagaaaaaaaagagctagtgaaacaattggttctcttgtatcagatgtcaaagtatccttgaatgaaaacaaaaaatatgaagtgctcgtctgtta

SEQ ID NO: 219448 - DNA, 2427 bp, Zea Mays
acgaaacctgtgtgtgaatgtgtgatgagggcaaaaagcaagtaacccatctatctagggttggaagcttgtacatggccacctcggtggttgtggcacgcctcgcgggcgaggcctcgcagcccaaggtcctaccttctgcgaatggagtctcatccgagagctattggcgggtagctgctacgcgccgttggcagggccgcggtgtccggtgctgcgcggccggtttccgcggtgggggcgccgacgccgacgccgtgatcgccagcgaggactttgtggggttctttcgggaggcgtggccgtacatccggggccaccgtgggagcaccttcgtggtggtcatctccagcgaggtcgtgtgcgggccgcacttctaccgcgttctgcaggacatatcacttctccatggtctggggattaaatttgttcttgttccaggaacacatattcaaattgataagctgttgtcagaaagagggaagaaggccaagtatgttggtcagtacagaattactgatgaagatgcaagaaaggctgcaatggatgcagctggtagaatacgattgacaatagaagctaaactttctcctggtcctccaatgttaaatcttcgtaggcatggtgttattggacgctggcatggtcttgtggatagcattgcaagtggcaatttccttggtgctaagagaagaggggtggttaatggtattgactacggattcaccggggaagttacgaaaatagacgtttcacggataagagaaaggcttgatagtgatagcatagttgttatcagcaacatgggcttcagttcatcgggagatgtgttaaattgcaacacctacgaggttgctactgcatgtgctttagccttggaggcagataaacttatctgcgttgtagatggtcaggtatttgatgatcatggacgggccattcaatacatgtctattgaggaggctgatttgttgattagaaagcgtgctaggcaaagtgatattgctgcaagttatgtcaaggttgtggatgaggaaggcatcaattctttgcataaaggggacgacagaccatcattgagtcccaaggcttacataaatgggtatgctgcttcttttcgaaacggattgggttttaacaatggaaatggtatttattctggcgagcaagggtttgctattggtggtgaagagcggttaagcagatcaaatgctgatccttttaaaaacgggttgggttttaacaatggaaatggtatttactctggtgagcaagggttcgctattggtggtgaagagaggttaagcagatcaaatggctatctttctgagttggtcgcggcagcatatgtgtgccatggtggtgttcaaagagttcatattatagatggatgtgttgatggatcacttctattagaattgtttacgagagatggagcaggaacaatgattgctagggatgtttatgaaggaacaaggatggctacagcggaagatcttcctggcattagaaaaattattcggccgctggaggattctggtgttttggtgcggagaacagatgcacagcttcttgaagcgctagagtcattctatgttgttgaaagagatggttcaatcattgcttgtgctgctctatttccattccctgaggaacaatctggtgaagttgctgcaattgctgtatctgaagaatgccgaggaagaggtcagggggacaagttacttgattacgtggaaaagatggcattatccctgggtctcaagaaattattcttgcttactacacgaactgcagattggtttgtgcgacgtggcttttcagagtgctcaattggatctatccctgagcagaggagaaaacgtatcaacttgtcccgtggatccaagtattacataaagcagctgtagccaaagcctgctgggattatcgccaacaattttgtcatcaggtgactcagcagcatgcacagagtttggttccacacttccacttaattaagatggtaccagccaagattacaccaatttcgcggttgcccaaaggcatataattgcacaaagaaacaaaacaccattttactgtcactgtgtttgaaagatggttgtctttgtttaagtatgtgacagaagtttgttttgccaatagaatcaaggcagagaagaaatagctgattgaattatatgtagaccctatttaacaagcaataccaaagatgaagtgctcgtacagtatcatctctggttggtgcctcattgtgtgcatcatagatgattgaacttgccttttccactcatagctgattggccttatcttttctacttttgttgagagaaaaaaaagagctagtgaaacaattggttctcttgtatcagatgtcaaagtatccttgaatgaaaacaaaaaatatgaagtgctcgtctgtta

SEQ ID NO: 219449 - DNA, 2604 bp, Zea Mays
acgaaacctgtgtgtgaatgtgtgatgagggcaaaaagcaagtaacccatctatctagggttggaagcttgtacatggccacctcggtggttgtggcacgcctcgcgggcgaggcctcgcagcccaaggtcctaccttctgcgaatggagtctcatccgagagctattggcgggtagctgctacgcgccgttggcagggccgcggtgtccggtgctgcgcggccggtttccgcggtgggggcgccgacgccgacgccgtgatcgccagcgaggactttgtggggttctttcgggaggcgtggccgtacatccggggccaccgtgggagcaccttcgtggtggtcatctccagcgaggtcgtgtgcgggccgcacttctaccgcgttctgcaggacatatcacttctccatggtctggggattaaatttgttcttgttccaggaacacatattcaaattgataagctgttgtcagaaagagggaagaaggccaagtatgttggtcagtacagaattactgatgaagatgcaagaaaggctgcaatggatgcagctggtagaatacgattgacaatagaagctaaactttctcctggtcctccaatgttaaatcttcgtaggcatggtgttattggacgctggcatggtcttgtggatagcattgcaagtggcaatttccttggtgctaagagaagaggggtggttaatggtattgactacggattcaccggggaagttacgaaaatagacgtttcacggataagagaaaggcttgatagtgatagcatagttgttatcagcaacatgggcttcagttcatcgggagatgtgttaaattgcaagtatattttcttaattatttttaagttttttcgtatgattgtacaatgtatacatcaaaattgtgtagttgtatgcttgctaccaagtcaagcataatatcatatgaatgcaaataattttcgtaaaacttgttcctttgcatatattgcagctaccatactaaacaaaattgatttgtgttgtttgcaataattcagcacctacgaggttgctactgcatgtgctttagccttggaggcagataaacttatctgcgttgtagatggtcaggtatttgatgatcatggacgggccattcaatacatgtctattgaggaggctgatttgttgattagaaagcgtgctaggcaaagtgatattgctgcaagttatgtcaaggttgtggatgaggaaggcatcaattctttgcataaaggggacgacagaccatcattgagtcccaaggcttacataaatgggtatgctgcttcttttcgaaacggattgggttttaacaatggaaatggtatttattctggcgagcaagggtttgctattggtggtgaagagcggttaagcagatcaaatgctgatccttttaaaaacgggttgggttttaacaatggaaatggtatttactctggtgagcaagggttcgctattggtggtgaagagaggttaagcagatcaaatggctatctttctgagttggtcgcggcagcatatgtgtgccatggtggtgttcaaagagttcatattatagatggatgtgttgatggatcacttctattagaattgtttacgagagatggagcaggaacaatgattgctagggatgtttatgaaggaacaaggatggctacagcggaagatcttcctggcattagaaaaattattcggccgctggaggattctggtgttttggtgcggagaacagatgcacagcttcttgaagcgctagagtcattctatgttgttgaaagagatggttcaatcattgcttgtgctgctctatttccattccctgaggaacaatctggtgaagttgctgcaattgctgtatctgaagaatgccgaggaagagattacgtggaaaagatggcattatccctgggtctcaagaaattattcttgcttactacacgaactgcagattggtttgtgcgacgtggcttttcagagtgctcaattggatctatccctgagcagaggagaaaacgtatcaacttgtcccgtggatccaagtattacataaagcagctgtagccaaagcctgctgggattatcgccaacaattttgtcatcaggtgactcagcagcatgcacagagtttggttccacacttccacttaattaagatggtaccagccaagattacaccaatttcgcggttgcccaaaggcatataattgcacaaagaaacaaaacaccattttactgtcactgtgtttgaaagatggttgtctttgtttaagtatgtgacagaagtttgttttgccaatagaatcaaggcagagaagaaatagctgattgaattatatgtagaccctatttaacaagcaataccaaagatgaagtgctcgtacagtatcatctctggttggtgcctcattgtgtgcatcatagatgattgaacttgccttttccactcatagctgattggccttatcttttctacttttgttgagagaaaaaaaagagctagtgaaacaattggttctcttgtatcagatgtcaaagtatccttgaatgaaaacaaaaaatatgaagtgctcgtctgtta

SEQ ID NO: 219450 - DNA, 2926 bp, Zea Mays
acgaaacctgtgtgtgaatgtgtgatgagggcaaaaagcaagtaacccatctatctagggttggaagcttgtacatggccacctcggtggttgtggcacgcctcgcgggcgaggcctcgcagcccaaggtcctaccttctgcgaatggagtctcatccgagagctattggcgggtagctgctacgcgccgttggcagggccgcggtgtccggtgctgcgcggccggtttccgcggtgggggcgccgacgccgacgccgtgatcgccagcgaggactttgtggggttctttcgggaggcgtggccgtacatccggggccaccgtgggagcaccttcgtggtggtcatctccagcgaggtcgtgtgcgggccgcacttctaccgcgttctgcaggacatatcacttctccatggtctggggattaaatttgttcttgttccaggaacacatattcaaattgataagctgttgtcagaaagagggaagaaggccaagtatgttggtcagtacagaattactgatgaagatgcaagaaaggctgcaatggatgcagctggtagaatacgattgacaatagaagctaaactttctcctggtcctccaatgttaaatcttcgtaggcatggtgttattggacgctggcatggtcttgtggatagcattgcaagtggcaatttccttggtgctaagagaagaggggtggttaatggtattgactacggattcaccggggaagttacgaaaatagacgtttcacggataagagaaaggcttgatagtgatagcatagttgttatcagcaacatgggcttcagttcatcgggagatgtgttaaattgcaagtatattttcttaattatttttaagttttttcgtatgattgtacaatgtatacatcaaaattgtgtagttgtatgcttgctaccaagtcaagcataatatcatatgaatgcaaataattttcgtaaaacttgttcctttgcatatattgcagctaccatactaaacaaaattgatttgtgttgtttgcaataattcagcacctacgaggttgctactgcatgtgctttagccttggaggcagataaacttatctgcgttgtagatggtcaggtatttgatgatcatggacgggccattcaatacatgtctattgaggaggctgatttgttgattagaaagcgtgctaggcaaagtgatattgctgcaagttatgtcaaggttgtggatgaggaaggcatcaattctttgcataaaggggacgacagaccatcattgagtcccaaggcttacataaatgggtatgctgcttcttttcgaaacggattgggttttaacaatggaaatggtatttattctggcgagcaagggtttgctattggtggtgaagagcggttaagcagatcaaatgctgatccttttaaaaacgggttgggttttaacaatggaaatggtatttactctggtgagcaagggttcgctattggtggtgaagagaggttaagcagatcaaatggctatctttctgagttggtcgcggcagcatatgtgtgccatggtggtgttcaaagagttcatattatagatggatgtgttgatggatcacttctattagaattgtttacgagagatggagcaggaacaatgattgctagggatgtttatgaaggaacaaggatggctacagcggaagatcttcctggcattagaaaaattattcggccgctggaggattctggtgttttggtgcggagaacagatgcacagcttcttgaagcgctagagtcattctatgttgttgaaagagatggttcaatcattgcttgtgctgctctatttccattccctgaggaacaatctggtgaagttgctgcaattgctgtatctgaagaatgccgaggaagaggtcagggggacaagttacttggtatgttctttgcttacatggataatcagaatccattctcttgattggttgttgcaacccctctaccaggttgccacaaccatttctccaacacatgcccacatgttcctgtgtgcactttctcacatgcacatacaatccctaaatattataacaagataacagaccgcctaccagtaatgtggtgttaaagtgggggttctctgttttttcagtaagcgtatcttctcacccattttaaaggggtttcagtcttgtggcatttgtactagaacaagctaagaagtcctttttttgttactcatggtggttgccattcttcagattacgtggaaaagatggcattatccctgggtctcaagaaattattcttgcttactacacgaactgcagattgagtgctcaattggatctatccctgagcagaggagaaaacgtatcaacttgtcccgtggatccaagtattacataaagcagctgtagccaaagcctgctgggattatcgccaacaattttgtcatcaggtgactcagcagcatgcacagagtttggttccacacttccacttaattaagatggtaccagccaagattacaccaatttcgcggttgcccaaaggcatataattgcacaaagaaacaaaacaccattttactgtcactgtgtttgaaagatggttgtctttgtttaagtatgtgacagaagtttgttttgccaatagaatcaaggcagagaagaaatagctgattgaattatatgtagaccctatttaacaagcaataccaaagatgaagtgctcgtacagtatcatctctggttggtgcctcattgtgtgcatcatagatgattgaacttgccttttccactcatagctgattggccttatcttttctacttttgttgagagaaaaaaaagagctagtgaaacaattggttctcttgtatcagatgtcaaagtatccttgaatgaaaacaaaaaatatgaagtgctcgtctgtta

SEQ ID NO: 219451 - DNA, 2329 bp, Zea Mays
acgaaacctgtgtgtgaatgtgtgatgagggcaaaaagcaagtaacccatctatctagggttggaagcttgtacatggccacctcggtggttgtggcacgcctcgcgggcgaggcctcgcagcccaaggtcctaccttctgcgaatggagtctcatccgagagctattggcgggtagctgctacgcgccgttggcagggccgcggtgtccggtgctgcgcggccggtttccgcggtgggggcgccgacgccgacgccgtgatcgccagcgaggactttgtggggttctttcgggaggcgtggccgtacatccggggccaccgtgggagcaccttcgtggtggtcatctccagcgaggtcgtgtgcgggccgcacttctaccgcgttctgcaggacatatcacttctccatggtctggggattaaatttgttcttgttccaggaacacatattcaaattgataagctgttgtcagaaagagggaagaaggccaagtatgttggtcagtacagaattactgatgaagatgcaagaaaggctgcaatggatgcagctggtagaatacgattgacaatagaagctaaactttctcctggtcctccaatgttaaatcttcgtaggcatggtgttattggacgctggcatggtcttgtggatagcattgcaagtggcaatttccttggtgctaagagaagaggggtggttaatggtattgactacggattcaccggggaagttacgaaaatagacgtttcacggataagagaaaggcttgatagtgatagcatagttgttatcagcaacatgggcttcagttcatcgggagatgtgttaaattgcaacacctacgaggttgctactgcatgtgctttagccttggaggcagataaacttatctgcgttgtagatggtcaggtatttgatgatcatggacgggccattcaatacatgtctattgaggaggctgatttgttgattagaaagcgtgctaggcaaagtgatattgctgcaagttatgtcaaggttgtggatgaggaaggcatcaattctttgcataaaggggacgacagaccatcattgagtcccaaggcttacataaatgggtatgctgcttcttttcgaaacggattgggttttaacaatggaaatggtatttattctggcgagcaagggtttgctattggtggtgaagagcggttaagcagatcaaatgctgatccttttaaaaacgggttgggttttaacaatggaaatggtatttactctggtgagcaagggttcgctattggtggtgaagagaggttaagcagatcaaatggctatctttctgagttggtcgcggcagcatatgtgtgccatggatgtttatgaaggaacaaggatggctacagcggaagatcttcctggcattagaaaaattattcggccgctggaggattctggtgttttggtgcggagaacagatgcacagcttcttgaagcgctagagtcattctatgttgttgaaagagatggttcaatcattgcttgtgctgctctatttccattccctgaggaacaatctggtgaagttgctgcaattgctgtatctgaagaatgccgaggaagaggtcagggggacaagttacttgattacgtggaaaagatggcattatccctgggtctcaagaaattattcttgcttactacacgaactgcagattggtttgtgcgacgtggcttttcagagtgctcaattggatctatccctgagcagaggagaaaacgtatcaacttgtcccgtggatccaagtattacataaagcagctgtagccaaagcctgctgggattatcgccaacaattttgtcatcaggtgactcagcagcatgcacagagtttggttccacacttccacttaattaagatggtaccagccaagattacaccaatttcgcggttgcccaaaggcatataattgcacaaagaaacaaaacaccattttactgtcactgtgtttgaaagatggttgtctttgtttaagtatgtgacagaagtttgttttgccaatagaatcaaggcagagaagaaatagctgattgaattatatgtagaccctatttaacaagcaataccaaagatgaagtgctcgtacagtatcatctctggttggtgcctcattgtgtgcatcatagatgattgaacttgccttttccactcatagctgattggccttatcttttctacttttgttgagagaaaaaaaagagctagtgaaacaattggttctcttgtatcagatgtcaaagtatccttgaatgaaaacaaaaaatatgaagtgctcgtctgtta

SEQ ID NO: 219452 - DNA, 2362 bp, Zea Mays
acgaaacctgtgtgtgaatgtgtgatgagggcaaaaagcaagtaacccatctatctagggttggaagcttgtacatggccacctcggtggttgtggcacgcctcgcgggcgaggcctcgcagcccaaggtcctaccttctgcgaatggagtctcatccgagagctattggcgggtagctgctacgcgccgttggcagggccgcggtgtccggtgctgcgcggccggtttccgcggtgggggcgccgacgccgacgccgtgatcgccagcgaggactttgtggggttctttcgggaggcgtggccgtacatccggggccaccgtgggagcaccttcgtggtggtcatctccagcgaggtcgtgtgcgggccgcacttctaccgcgttctgcaggacatatcacttctccatggtctggggattaaatttgttcttgttccaggaacacatattcaaattgataagctgttgtcagaaagagggaagaaggccaagtatgttggtcagtacagaattactgatgaagatgcaagaaaggctgcaatggatgcagctggtagaatacgattgacaatagaagctaaactttctcctggtcctccaatgttaaatcttcgtaggcatggtgttattggacgctggcatggtcttgtggatagcattgcaagtggcaatttccttggtgctaagagaagaggggtggttaatggtattgactacggattcaccggggaagttacgaaaatagacgtttcacggataagagaaaggcttgatagtgatagcatagttgttatcagcaacatgggcttcagttcatcgggagatgtgttaaattgcaaatggtcaggtatttgatgatcatggacgggccattcaatacatgtctattgaggaggctgatttgttgattagaaagcgtgctaggcaaagtgatattgctgcaagttatgtcaaggttgtggatgaggaaggcatcaattctttgcataaaggggacgacagaccatcattgagtcccaaggcttacataaatgggtatgctgcttcttttcgaaacggattgggttttaacaatggaaatggtatttattctggcgagcaagggtttgctattggtggtgaagagcggttaagcagatcaaatgctgatccttttaaaaacgggttgggttttaacaatggaaatggtatttactctggtgagcaagggttcgctattggtggtgaagagaggttaagcagatcaaatggctatctttctgagttggtcgcggcagcatatgtgtgccatggtggtgttcaaagagttcatattatagatggatgtgttgatggatcacttctattagaattgtttacgagagatggagcaggaacaatgattgctagggatgtttatgaaggaacaaggatggctacagcggaagatcttcctggcattagaaaaattattcggccgctggaggattctggtgttttggtgcggagaacagatgcacagcttcttgaagcgctagagtcattctatgttgttgaaagagatggttcaatcattgcttgtgctgctctatttccattccctgaggaacaatctggtgaagttgctgcaattgctgtatctgaagaatgccgaggaagaggtcagggggacaagttacttgattacgtggaaaagatggcattatccctgggtctcaagaaattattcttgcttactacacgaactgcagattggtttgtgcgacgtggcttttcagagtgctcaattggatctatccctgagcagaggagaaaacgtatcaacttgtcccgtggatccaagtattacataaagcagctgtagccaaagcctgctgggattatcgccaacaattttgtcatcaggtgactcagcagcatgcacagagtttggttccacacttccacttaattaagatggtaccagccaagattacaccaatttcgcggttgcccaaaggcatataattgcacaaagaaacaaaacaccattttactgtcactgtgtttgaaagatggttgtctttgtttaagtatgtgacagaagtttgttttgccaatagaatcaaggcagagaagaaatagctgattgaattatatgtagaccctatttaacaagcaataccaaagatgaagtgctcgtacagtatcatctctggttggtgcctcattgtgtgcatcatagatgattgaacttgccttttccactcatagctgattggccttatcttttctacttttgttgagagaaaaaaaagagctagtgaaacaattggttctcttgtatcagatgtcaaagtatccttgaatgaaaacaaaaaatatgaagtgctcgtctgtta

SEQ ID NO: 219453 - DNA, 2835 bp, Zea Mays
cgccaatcagcagaacagcacaacctcggaaacgtccgtactccgtagtgcgaggaccctccccgtcctcccgtgtctatttccgtccccgtccccaaccacccgcgttccccgctttccgtgcgcatggccgccgcgcgggcgcaaccaccaccgccgtggccggatgtctagaaagcccctcctccccacctgcgggtcctccacccctcccccgctcctcctcctccgccgcttcctccctcgccgccgcgcgacctcctctcccccgccgccctccacccggcggaggaccgccgccatgccaccccgcgccggcgactccgccgcggcggcggctgcggcggcatccttccgtctcgggatggtgcgggtggtctctttccttgtaggcgggctcaacctcgcggtgctgctgctcggactctacattatcgacgccgtgctcccgtcggggtgcggcggggggctcgctttcgcctcggcgcccgctctggctggggtccgcgtgctctccatgatcggcgccgcgcgcgcgcagcacgccacggcggacgccatagctaagcgccacctccacgagagcgacgcatctgtcgcagctgatgccgtagctcgccacgagattagggtgaggtacaaacgctggttgtggtggaccagatttggtatggcagttggtgcattgcagttggttgcagcaatttatctcatgtttgtcattgtaagagatctctcaaatgaaagaagatccacttcctgcttctttggacaggataaagctgatcgggtgtcagtacgagcacttattgctttatttcttatcctttcatgggttgtgatcattgtccaatgcttcacgggttctgatatattgaggtggcgatcattttatgcaacacatgatatggcatggaaagctcattacagggaagtgttcgaccatggaatccgagaagctttgtgctgcctaggacgtgcaaaatatctaactgtattggaagaagatgaggtttattctgttgcaagactccttggtgatttggttgcatatcgtgcttctgggacaggacatttggagctcttagcagggcttgctctattgcagaagcacgggaatttatctgaattgcagactgaccttgtggaggcatcccatgagcttatgcaagaagctgctttcctccatccatttgcggaagcatgttatacgggaccacttcttgattttggacgaaatcctatcctgtttccctgtgcatgggtttatagacaaggtgtgttaactccatgggcacgcagaagacgccctgcacttgatggtgataattggtggcgaggccatgctgcagctttccttagatttgttaatataccacctaaagcacttctgaaaggacgtgtttgccagagcaagcgtgaagctgcttattttgttgtggttctccatgacaaaagaactgttgtcattggggttcgtggaacagagacaccagaggatctcataactgatggattatgcagagaatgtgcttttactatggaagatttggatggactagtaaatagtgaacaattacctgcaactacaagagagagagttatttcaacatttccacactatggtcatggtggaattgtagagtctgccagggagcttttcatgcaactaaatggagaaaacacatcttctggaagacttgggttcctttccacactgctgggggagggcagtgagtgtcatggatataaagttcgtcttgttgggcattctttaggaggcgctgttgctacagtcctaggaatgatgctatatggcaaatacccaagcgtgcatgtatatgcatatggaccacttccttgtgtggactttgtaatagcggaagcatgttcgcattttgtcacaaccattatttgcaatgatgaattttcctctcgcctttcaatcaattcgattcttaggctacgatctgctgcaataagtgctctttcagataactctccagctgatacagcaatgatacaaaagctcgctcgaagaattttgcatgtgaacaggtatcatgataatggtcctgacgatggcataatccagggctatgctgatcatacaagaacagcagatacaacagtaccgaatgaaagacaaatttctcatcagattccattatgcaatactgaactagacctccacaatacgcaaaatggcttttttaggtataatgggtccagtgcatcaatagatgagcatctgagctatgaaggcataagcagtggccatgatatgcaaataattccacttgatggggctgattctggttttgaagggcaccagacatcttacagagaaataccagtggagcctcctgagatgtttcttgcaggcttaattgttcacatagtgcggcaaagaagaagtctctttcctctttggaaatgctggagcatccaggaaactgaaccaccatacaaagctgttttagcgaaaagggagaacttcagggatatagtggttactccttacatgtttacagatcacttaccatggaggtgccactttgctatgcagaagattgttgaagctcaaacgcctatgagacgtgcgcattccgatccacccgtacaacaacatttggctggaccgctggaggcatatttcagtccttcaggcagccagaatatgtccgtgacagacccaaaatcgtgacgagcttattgacagtcagaggccaccgagacatgatcactggttactgtacaccaaacagtatctaatcagtctactcaccctggcaacctgcgcgtcaattaattaattcatcgattgttctcttc

SEQ ID NO: 219454 - DNA, 3233 bp, Zea Mays
caatcagcagaacagcacaacctcggaaacgtccgtactccgtagtgcgaggaccctccccgtcctcccgtgtctatttccgtccccgtccccaaccacccgcgttccccgctttccgtgcgcatggccgccgcgcgggcgcaaccaccaccgccgtggccggatgtctagaaagcccctcctccccacctgcgggtcctccacccctcccccgctcctcctcctccgccgcttcctccctcgccgccgcgcgacctcctctcccccgccgccctccacccggcggaggaccgccgccatgccaccccgcgccggcgactccgccgcggcggcggctgcggcggcatccttccgtctcgggatggtgcgggtggtctctttccttgtaggcgggctcaacctcgcggtgctgctgctcggactctacattatcgacgccgtgctcccgtcggggtgcggcggggggctcgctttcgcctcggcgcccgctctggctggggtccgcgtgctctccatgatcggcgccgcgcgcgcgcagcacgccacggcggacgccatagctaagcgccacctccacgagagcgacgcatctgtcgcagctgatgccgtagctcgccacgagattagggtgaggtacaaacgctggttgtggtggaccagatttggtatggcagttggtgcattgcagttggttgcagcaatttatctcatgtttgtcattgtaagagatctctcaaatgaaagaagatccacttcctgcttctttggtatgttggtcgccattctgagctatttatttcctaactttgtacataattttttacaagttcttgtttgctggtagtttacaatcacatgaacttcatacatatacaacgacacacataaagtgggaaaaactttcgagcacccttttcttgaagttccatatgaaatttttttagtgaatgtaccacaaacatgctaactactctcactttgagcagattttgcttcaataaatgcactgaaacatagttaattaacacaatctagtaacaactcttaagagtatacacatttcattatactatcctaaggttttattttctgctgtgctaatccactcatctacttgggattgaataagtcgtttggatggtttataatctaggacaggataaagctgatcgggtgtcagtacgagcacttattgctttatttcttatcctttcatgggttgtgatcattgtccaatgcttcacgggttctgatatattgaggtggcgatcattttatgcaacacatgatatggcatggaaagctcattacagggaagtgttcgaccatggaatccgagaagctttgtgctgcctaggacgtgcaaaatatctaactgtattggaagaagatgaggtttattctgttgcaagactccttggtgatttggttgcatatcgtgcttctgggacaggacatttggagctcttagcagggcttgctctattgcagaagcacgggaatttatctgaattgcagactgaccttgtggaggcatcccatgagcttatgcaagaagctgctttcctccatccatttgcggaagcatgttatacgggaccacttcttgattttggacgaaatcctatcctgtttccctgtgcatgggtttatagacaaggtgtgttaactccatgggcacgcagaagacgccctgcacttgatggtgataattggtggcgaggccatgctgcagctttccttagatttgttaatataccacctaaagcacttctgaaaggacgtgtttgccagagcaagcgtgaagctgcttattttgttgtggttctccatgacaaaagaactgttgtcattggggttcgtggaacagagacaccagaggatctcataactgatggattatgcagagaatgtgcttttactatggaagatttggatggactagtaaatagtgaacaattacctgcaactacaagagagagagttatttcaacatttccacactatggtcatggtggaattgtagagtctgccagggagcttttcatgcaactaaatggagaaaacacatcttctggaagacttgggttcctttccacactgctgggggagggcagtgagtgtcatggatataaagttcgtcttgttgggcattctttaggaggcgctgttgctacagtcctaggaatgatgctatatggcaaatacccaagcgtgcatgtatatgcatatggaccacttccttgtgtggactttgtaatagcggaagcatgttcgcattttgtcacaaccattatttgcaatgatgaattttcctctcgcctttcaatcaattcgattcttaggctacgatctgctgcaataagtgctctttcagataactctccagctgatacagcaatgatacaaaagctcgctcgaagaattttgcatgtgaacaggtatcatgataatggtcctgacgatggcataatccagggctatgctgatcatacaagaacagcagatacaacagtaccgaatgaaagacaaatttctcatcagattccattatgcaatactgaactagacctccacaatacgcaaaatggcttttttaggtataatgggtccagtgcatcaatagatgagcatctgagctatgaaggcataagcagtggccatgatatgcaaataattccacttgatggggctgattctggttttgaagggcaccagacatcttacagagaaataccagtggagcctcctgagatgtttcttgcaggcttaattgttcacatagtgcggcaaagaagaagtctctttcctctttggaaatgctggagcatccaggaaactgaaccaccatacaaagctgttttagcgaaaagggagaacttcagggatatagtggttactccttacatgtttacagatcacttaccatggaggtgccactttgctatgcagaagattgttgaagctcaaacgcctatgagacgtgcgcattccgatccacccgtacaacaacatttgcatggtttattgcaggctggaccgctggaggcatatttcagtccttcaggcagccagaatatgtccgtgacagacccaaaatcgtgacgagcttattgacagtcagaggccaccgagacatgatcactggttactgtacaccaaacagtatctaatcagtctactcaccctggcaacctgcgcgtcaattaattaattcatcgattgttctcttc

SEQ ID NO: 219455 - DNA, 2641 bp, Zea Mays
cagaacagcacaacctcggaaacgtccgtactccgtagtgcgaggaccctccccgtcctcccgtgtctatttccgtccccgtccccaaccacccgcgttccccgctttccgtgcgcatggccgccgcgcgggcgcaaccaccaccgccgtggccggatgtctagaaagcccctcctccccacctgcgggtcctccacccctcccccgctcctcctcctccgccgcttcctccctcgccgccgcgcgacctcctctcccccgccgccctccacccggcggaggaccgccgccatgccaccccgcgccggcgactccgccgcggcggcggctgcggcggcatccttccgtctcgggatggtgcgggtggtctctttccttgtaggcgggctcaacctcgcggtgctgctgctcggactctacattatcgacgccgtgctcccgtcggggtgcggcggggggctcgctttcgcctcggcgcccgctctggctggggtccgcgtgctctccatgatcggcgccgcgcgcgcgcagcacgccacggcggacgccatagctaagcgccacctccacgagagcgacgcatctgtcgcagctgatgccgtagctcgccacgagattagggtgaggtacaaacgctggttgtggtggaccagatttggtatggcagttggtgcattgcagttggttgcagcaatttatctcatgtttgtcattgtaagagatctctcaaatgaaagaagatccacttcctgcttctttggacaggataaagctgatcgggtgtcagtacgagcacttattgctttatttcttatcctttcatgggttgtgatcattgtccaatgcttcacgggttctgatatattgaggtggcgatcattttatgcaacacatgatatggcatggaaagctcattacagggaagtgttcgaccatggaatccgagaagctttgtgctgcctaggacgtgcaaaatatctaactgtattggaagaagatgaggtttattctgttgcaagactccttggtgatttggttgcatatcgtgcttctgggacaggacatttggagctcttagcagggcttgctctattgcagaagcacgggaatttatctgaattgcagactgaccttgtggaggcatcccatgagcttatgcaagaagctgctttcctccatccatttgcggaagcatgttatacgggaccacttcttgattttggacgaaatcctatcctgtttccctgtgcatgggtttatagacaaggtgtgttaactccatgggcacgcagaagacgccctgcacttgatggtgataattggtggcgaggccatgctgcagctttccttagatttgttaatataccacctaaagcacttctgaaaggacgtgtttgccagagcaagcgtgaagctgcttattttgttgtggttctccatgacaaaagaactgttgtcattggggttcgtggaacagagacaccagaggatctcataactgatggattatgcagagaatgtgcttttactatggaagatttggatggactagtaaatagtgaacaattacctgcaactacaagagagagagttatttcaacatttccacactatggtcatggtggaattgtagagtctgccagggagcttttcatgcaactaaatggagaaaacacatcttctggaagacttgggttcctttccacactgctgggggagggcagtgagtgtcatggatataaagttcgtcttgttgggcattctttaggaggcgctgttgctacagtcctaggaatgatgctatatggcaaatacccaagcgtgcatgtatatgcatatggaccacttccttgtgtggactttgtaatagcggaagcatgttcgcattttgtcacaacgtacgaataaactgagatcttcctgtggctactattttcaatggaacttcagttttggtgtgctgttctcttataaggttcattaacttctgactaccgagataactctccagctgatacagcaatgatacaaaagctcgctcgaagaattttgcatgtgaacaggtatcatgataatggtcctgacgatggcataatccagggctatgctgatcatacaagaacagcagatacaacagtaccgaatgaaagacaaatttctcatcagattccattatgcaatactgaactagacctccacaatacgcaaaatggcttttttaggtataatgggtccagtgcatcaatagatgagcatctgagctatgaaggcataagcagtggccatgatatgcaaataattccacttgatggggctgattctggttttgaagggcaccagacatcttacagagaaataccagtggagcctcctgagatgtttcttgcaggcttaattgttcacatagtgcggcaaagaagaagtctctttcctctttggaaatgctggagcatccaggaaactgaaccaccatacaaagctgttttagcgaaaagggagaacttcagggatatagtggttactccttacatgtttacagatcacttaccatggagatgttcgtgcttctactatacctgcctcacgattagaacagtccttgatggagtccttatcttcttcaattgtgccttcttcagtg

SEQ ID NO: 219456 - DNA, 2981 bp, Zea Mays
cagaacagcacaacctcggaaacgtccgtactccgtagtgcgaggaccctccccgtcctcccgtgtctatttccgtccccgtccccaaccacccgcgttccccgctttccgtgcgcatggccgccgcgcgggcgcaaccaccaccgccgtggccggatgtctagaaagcccctcctccccacctgcgggtcctccacccctcccccgctcctcctcctccgccgcttcctccctcgccgccgcgcgacctcctctcccccgccgccctccacccggcggaggaccgccgccatgccaccccgcgccggcgactccgccgcggcggcggctgcggcggcatccttccgtctcgggatggtgcgggtggtctctttccttgtaggcgggctcaacctcgcggtgctgctgctcggactctacattatcgacgccgtgctcccgtcggggtgcggcggggggctcgctttcgcctcggcgcccgctctggctggggtccgcgtgctctccatgatcggcgccgcgcgcgcgcagcacgccacggcggacgccatagctaagcgccacctccacgagagcgacgcatctgtcgcagctgatgccgtagctcgccacgagattagggtgaggtacaaacgctggttgtggtggaccagatttggtatggcagttggtgcattgcagttggttgcagcaatttatctcatgtttgtcattgtaagagatctctcaaatgaaagaagatccacttcctgcttctttggacaggataaagctgatcgggtgtcagtacgagcacttattgctttatttcttatcctttcatgggttgtgatcattgtccaatgcttcacgggttctgatatattgaggtggcgatcattttatgcaacacatgatatggcatggaaagctcattacagggaagtgttcgaccatggaatccgagaagctttgtgctgcctaggacgtgcaaaatatctaactgtattggaagaagatgaggtttattctgttgcaagactccttggtgatttggttgcatatcgtgcttctgggacaggacatttggagctcttagcagggcttgctctattgcagaagcacgggaatttatctgaattgcagactgaccttgtggaggcatcccatgagcttatgcaagaagctgctttcctccatccatttgcggaagcatgttatacgggaccacttcttgattttggacgaaatcctatcctgtttccctgtgcatgggtttatagacaaggtgtgttaactccatgggcacgcagaagacgccctgcacttgatggtgataattggtggcgaggccatgctgcagctttccttagatttgttaatataccacctaaagcacttctgaaaggacgtgtttgccagagcaagcgtgaagctgcttattttgttgtggttctccatgacaaaagaactgttgtcattggggttcgtggaacagagacaccagaggatctcataactgatggattatgcagagaatgtgcttttactatggaagatttggatggactagtaaatagtgaacaattacctgcaactacaagagagagagttatttcaacatttccacactatggtcatggtggaattgtagagtctgccagggagcttttcatgcaactaaatggagaaaacacatcttctggaagacttgggttcctttccacactgctgggggagggcagtgagtgtcatggatataaagttcgtcttgttgggcattctttaggaggcgctgttgctacagtcctaggaatgatgctatatggcaaatacccaagcgtgcatgtatatgcatatggaccacttccttgtgtggactttgtaatagcggaagcatgttcgcattttgtcacaaccattatttgcaatgatgaattttcctctcgcctttcaatcaattcgattcttaggctacgatctgctgcaataagtgctctttcagataactctccagctgatacagcaatgatacaaaagctcgctcgaagaattttgcatgtgaacaggtatcatgataatggtcctgacgatggcataatccagggctatgctgatcatacaagaacagcagatacaacagtaccgaatgaaagacaaatttctcatcagattccattatgcaatactgaactagacctccacaatacgcaaaatggcttttttaggtataatgggtccagtgcatcaatagatgagcatctgagctatgaaggcataagcagtggccatgatatgcaaataattccacttgatggggctgattctggttttgaagggcaccagacatcttacagagaaataccagtggagcctcctgagatgtttcttgcaggcttaattgttcacatagtgcggcaaagaagaagtctctttcctctttggaaatgctggagcatccaggaaactgaaccaccatacaaagctgttttagcgaaaagggagaacttcagggatatagtggttactccttacatgtttacagatcacttaccatggagatgttcgtgcttctactatacctgcctcacgattagaacagtccttgatggagtccttatcttcttcaattgtgccttcttcagtggtacctcccttcccttggtgtcttctttagagtctccttccttggtttctgactagactaggaagcctccggtgacacatgtctactctcaacgggtcgtaaattcttctggtatgccgtcttcctctgctgagctaccctcttttgttgtgccatcttctactattgagtcatctttctctaatgattcaccttcatttgatgagaatatgctgagccaacttcttctggtagttcttcactgcgacagtttctcgcttttatcaatcacttgaccggaatggcagcatgcaatggacgaggagattgttgctcttgagtgtatcgatatgtgggaacttgttactaagcatat

SEQ ID NO: 219457 - DNA, 2606 bp, Zea Mays
tcggaaacgtccgtactccgtagtgcgaggaccctccccgtcctcccgtgtctatttccgtccccgtccccaaccacccgcgttccccgctttccgtgcgcatggccgccgcgcgggcgcaaccaccaccgccgtggccggatgtctagaaagcccctcctccccacctgcgggtcctccacccctcccccgctcctcctcctccgccgcttcctccctcgccgccgcgcgacctcctctcccccgccgccctccacccggcggaggaccgccgccatgccaccccgcgccggcgactccgccgcggcggcggctgcggcggcatccttccgtctcgggatggtgcgggtggtctctttccttgtaggcgggctcaacctcgcggtgctgctgctcggactctacattatcgacgccgtgctcccgtcggggtgcggcggggggctcgctttcgcctcggcgcccgctctggctggggtccgcgtgctctccatgatcggcgccgcgcgcgcgcagcacgccacggcggacgccatagctaagcgccacctccacgagagcgacgcatctgtcgcagctgatgccgtagctcgccacgagattagggtgaggtacaaacgctggttgtggtggaccagatttggtatggcagttggtgcattgcagttggttgcagcaatttatctcatgtttgtcattgtaagagatctctcaaatgaaagaagatccacttcctgcttctttggataaagctgatcgggtgtcagtacgagcacttattgctttatttcttatcctttcatgggttgtgatcattgtccaatgcttcacgggttctgatatattgaggtggcgatcattttatgcaacacatgatatggcatggaaagctcattacagggaagtgttcgaccatggaatccgagaagctttgtgctgcctaggacgtgcaaaatatctaactgtattggaagaagatgaggtttattctgttgcaagactccttggtgatttggttgcatatcgtgcttctgggacaggacatttggagctcttagcagggcttgctctattgcagaagcacgggaatttatctgaattgcagactgaccttgtggaggcatcccatgagcttatgcaagaagctgctttcctccatccatttgcggaagcatgttatacgggaccacttcttgattttggacgaaatcctatcctgtttccctgtgcatgggtttatagacaaggtgtgttaactccatgggcacgcagaagacgccctgcacttgatggtgataattggtggcgaggccatgctgcagctttccttagatttgttaatataccacctaaagcacttctgaaaggacgtgtttgccagagcaagcgtgaagctgcttattttgttgtggttctccatgacaaaagaactgttgtcattggggttcgtggaacagagacaccagaggatctcataactgatggattatgcagagaatgtgcttttactatggaagatttggatggactagtaaatagtgaacaattacctgcaactacaagagagagagttatttcaacatttccacactatggtcatggtggaattgtagagtctgccagggagcttttcatgcaactaaatggagaaaacacatcttctggaagacttgggttcctttccacactgctgggggagggcagtgagtgtcatggatataaagttcgtcttgttgggcattctttaggaggcgctgttgctacagtcctaggaatgatgctatatggcaaatacccaagcgtgcatgtatatgcatatggaccacttccttgtgtggactttgtaatagcggaagcatgttcgcattttgtcacaaccattatttgcaatgatgaattttcctctcgcctttcaatcaattcgattcttaggctacgatctgctgcaataagtgctctttcagataactctccagctgatacagcaatgatacaaaagctcgctcgaagaattttgcatgtgaacaggtatcatgataatggtcctgacgatggcataatccagggctatgctgatcatacaagaacagcagatacaacagtaccgaatgaaagacaaatttctcatcagattccattatgcaatactgaactagacctccacaatacgcaaaatggcttttttaggtataatgggtccagtgcatcaatagatgagcatctgagctatgaaggcataagcagtggccatgatatgcaaataattccacttgatggggctgattctggttttgaagggcaccagacatcttacagagaaataccagtggagcctcctgagatgtttcttgcaggcttaattgttcacatagtgcggcaaagaagaagtctctttcctctttggaaatgctggagcatccaggaaactgaaccaccatacaaagctgttttagcgaaaagggagaacttcagggatatagtggttactccttacatgtttacagatcacttaccatggagatgttcgtgcttctactatacctgcctcacgattagaacagtccttgatggagtccttatcttcttcaattgtgccttcttcagtg

SEQ ID NO: 219458 - DNA, 3278 bp, Zea Mays
cgtccgtactccgtagtgcgaggaccctccccgtcctcccgtgtctatttccgtccccgtccccaaccacccgcgttccccgctttccgtgcgcatggccgccgcgcgggcgcaaccaccaccgccgtggccggatgtctagaaagcccctcctccccacctgcgggtcctccacccctcccccgctcctcctcctccgccgcttcctccctcgccgccgcgcgacctcctctcccccgccgccctccacccggcggaggaccgccgccatgccaccccgcgccggcgactccgccgcggcggcggctgcggcggcatccttccgtctcgggatggtgcgggtggtctctttccttgtaggcgggctcaacctcgcggtgctgctgctcggactctacattatcgacgccgtgctcccgtcggggtgcggcggggggctcgctttcgcctcggcgcccgctctggctggggtccgcgtgctctccatgatcggcgccgcgcgcgcgcagcacgccacggcggacgccatagctaagcgccacctccacgagagcgacgcatctgtcgcagctgatgccgtagctcgccacgagattagggtgaggtacaaacgctggttgtggtggaccagatttggtatggcagttggtgcattgcagttggttgcagcaatttatctcatgtttgtcattgtaagagatctctcaaatgaaagaagatccacttcctgcttctttggtatgttggtcgccattctgagctatttatttcctaactttgtacataattttttacaagttcttgtttgctggtagtttacaatcacatgaacttcatacatatacaacgacacacataaagtgggaaaaactttcgagcacccttttcttgaagttccatatgaaatttttttagtgaatgtaccacaaacatgctaactactctcactttgagcagattttgcttcaataaatgcactgaaacatagttaattaacacaatctagtaacaactcttaagagtatacacatttcattatactatcctaaggttttattttctgctgtgctaatccactcatctacttgggattgaataagtcgtttggatggtttataatctaggacaggataaagctgatcgggtgtcagtacgagcacttattgctttatttcttatcctttcatgggttgtgatcattgtccaatgcttcacgggttctgatatattgaggtggcgatcattttatgcaacacatgatatggcatggaaagctcattacagggaagtgttcgaccatggaatccgagaagctttgtgctgcctaggacgtgcaaaatatctaactgtattggaagaagatgaggtttattctgttgcaagactccttggtgatttggttgcatatcgtgcttctgggacaggacatttggagctcttagcagggcttgctctattgcagaagcacgggaatttatctgaattgcagactgaccttgtggaggcatcccatgagcttatgcaagaagctgctttcctccatccatttgcggaagcatgttatacgggaccacttcttgattttggacgaaatcctatcctgtttccctgtgcatgggtttatagacaaggtgtgttaactccatgggcacgcagaagacgccctgcacttgatggtgataattggtggcgaggccatgctgcagctttccttagatttgttaatataccacctaaagcacttctgaaaggacgtgtttgccagagcaagcgtgaagctgcttattttgttgtggttctccatgacaaaagaactgttgtcattggggttcgtggaacagagacaccagaggatctcataactgatggattatgcagagaatgtgcttttactatggaagatttggatggactagtaaatgaacaattacctgcaactacaagagagagagttatttcaacatttccacactatggtcatggtggaattgtagagtctgccagggagcttttcatgcaactaaatggagaaaacacatcttctggaagacttgggttcctttccacactgctgggggagggcagtgagtgtcatggatataaagttcgtcttgttgggcattctttaggaggcgctgttgctacagtcctaggaatgatgctatatggcaaatacccaagcgtgcatgtatatgcatatggaccacttccttgtgtggactttgtaatagcggaagcatgttcgcattttgtcacaaccattatttgcaatgatgaattttcctctcgcctttcaatcaattcgattcttaggctacgatctgctgcaataagtgctctttcagataactctccagctgatacagcaatgatacaaaagctcgctcgaagaattttgcatgtgaacaggtatcatgataatggtcctgacgatggcataatccagggctatgctgatcatacaagaacagcagatacaacagtaccgaatgaaagacaaatttctcatcagattccattatgcaatactgaactagacctccacaatacgcaaaatggcttttttaggtataatgggtccagtgcatcaatagatgagcatctgagctatgaaggcataagcagtggccatgatatgcaaataattccacttgatggggctgattctggttttgaagggcaccagacatcttacagagaaataccagtggagcctcctgagatgtttcttgcaggcttaattgttcacatagtgcggcaaagaagaagtctctttcctctttggaaatgctggagcatccaggaaactgaaccaccatacaaagctgttttagcgaaaagggagaacttcagggatatagtggttactccttacatgtttacagatcacttaccatggaggtgccactttgctatgcagaagattgttgaagctcaaacgcctatgagacgtgcgcattccgatccacccgtacaacaacatttggtctgaccaggacaaaactgctgcccatgtacagaattgcgtgaaggacagaaaattatgatgatcacatttagcagcatggtttattgcaggctggaccgctggaggcatatttcagtccttcaggcagccagaatatgtccgtgacagacccaaaatcgtgacgagcttattgacagtcagaggccaccgagacatgatcactggttactgtacaccaaacagtatctaatcagtctactcaccctggcaacctgcgcgtcaattaattaattcatcgattgttctcttc

SEQ ID NO: 219459 - DNA, 2830 bp, Zea Mays
ttccgtccccgtccccaaccacccgcgttccccgctttccgtgcgcatggccgccgcgcgggcgcaaccaccaccgccgtggccggatgtctagaaagcccctcctccccacctgcgggtcctccacccctcccccgctcctcctcctccgccgcttcctccctcgccgccgcgcgacctcctctcccccgccgccctccacccggcggaggaccgccgccatgccaccccgcgccggcgactccgccgcggcggcggctgcggcggcatccttccgtctcgggatggtgcgggtggtctctttccttgtaggcgggctcaacctcgcggtgctgctgctcggactctacattatcgacgccgtgctcccgtcggggtgcggcggggggctcgctttcgcctcggcgcccgctctggctggggtccgcgtgctctccatgatcggcgccgcgcgcgcgcagcacgccacggcggacgccatagctaagcgccacctccacgagagcgacgcatctgtcgcagctgatgccgtagctcgccacgagattagggtgaggtacaaacgctggttgtggtggaccagatttggtatggcagttggtgcattgcagttggttgcagcaatttatctcatgtttgtcattgtaagagatctctcaaatgaaagaagatccacttcctgcttctttggacaggataaagctgatcgggtgtcagtacgagcacttattgctttatttcttatcctttcatgggttgtgatcattgtccaatgcttcacgggttctgatatattgaggtggcgatcattttatgcaacacatgatatggcatggaaagctcattacagggaagtgttcgaccatggaatccgagaagctttgtgctgcctaggacgtgcaaaatatctatgaggtttattctgttgcaagactccttggtgatttggttgcatatcgtgcttctgggacaggacatttggagctcttagcagggcttgctctattgcagaagcacgggaatttatctgaattgcagactgaccttgtggaggcatcccatgagcttatgcaagaagctgctttcctccatccatttgcggaagcatgttatacgggaccacttcttgattttggacgaaatcctatcctgtttccctgtgcatgggtttatagacaaggtgtgttaactccatgggcacgcagaagacgccctgcacttgatggtgataattggtggcgaggccatgctgcagctttccttagatttgttaatataccacctaaagcacttctgaaaggacgtgtttgccagagcaagcgtgaagctgcttattttgttgtggttctccatgacaaaagaactgttgtcattggggttcgtggaacagagacaccagaggatctcataactgatggattatgcagagaatgtgcttttactatggaagatttggatggactagtaaatagtgaacaattacctgcaactacaagagagagagttatttcaacatttccacactatggtcatggtggaattgtagagtctgccagggagcttttcatgcaactaaatggagaaaacacatcttctggaagacttgggttcctttccacactgctgggggagggcagtgagtgtcatggatataaagttcgtcttgttgggcattctttaggaggcgctgttgctacagtcctaggaatgatgctatatggcaaatacccaagcgtgcatgtatatgcatatggaccacttccttgtgtggactttgtaatagcggaagcatgttcgcattttgtcacaaccattatttgcaatgatgaattttcctctcgcctttcaatcaattcgattcttaggctacgatctgctgcaataagtgctctttcagataactctccagctgatacagcaatgatacaaaagctcgctcgaagaattttgcatgtgaacaggtatcatgataatggtcctgacgatggcataatccagggctatgctgatcatacaagaacagcagatacaacagtaccgaatgaaagacaaatttctcatcagattccattatgcaatactgaactagacctccacaatacgcaaaatggcttttttaggtataatgggtccagtgcatcaatagatgagcatctgagctatgaaggcataagcagtggccatgatatgcaaataattccacttgatggggctgattctggttttgaagggcaccagacatcttacagagaaataccagtggagcctcctgagatgtttcttgcaggcttaattgttcacatagtgcggcaaagaagaagtctctttcctctttggaaatgctggagcatccaggaaactgaaccaccatacaaagctgttttagcgaaaagggagaacttcagggatatagtggttactccttacatgtttacagatcacttaccatggaggtgccactttgctatgcagaagattgttgaagctcaaacgcctatgagacgtgcgcattccgatccacccgtacaacaacatttggtctgaccaggacaaaactgctgcccatgtacagaattgcgtgaaggacagaaaattatgatgatcacatttagcagcatggtttattgcaggctggaccgctggaggcatatttcagtccttcaggcagccagaatatgtccgtgacagacccaaaatcgtgacgagcttattgacagtcagaggccaccgagacatgatcactggttactgtacaccaaacagtatctaatcagtctactcaccctggcaacctgcgcgtcaattaattaattcatcgattgttctcttc

SEQ ID NO: 219460 - DNA, 3128 bp, Zea Mays
cccgtccccaaccacccgcgttccccgctttccgtgcgcatggccgccgcgcgggcgcaaccaccaccgccgtggccggatgtctagaaagcccctcctccccacctgcgggtcctccacccctcccccgctcctcctcctccgccgcttcctccctcgccgccgcgcgacctcctctcccccgccgccctccacccggcggaggaccgccgccatgccaccccgcgccggcgactccgccgcggcggcggctgcggcggcatccttccgtctcgggatggtgcgggtggtctctttccttgtaggcgggctcaacctcgcggtgctgctgctcggactctacattatcgacgccgtgctcccgtcggggtgcggcggggggctcgctttcgcctcggcgcccgctctggctggggtccgcgtgctctccatgatcggcgccgcgcgcgcgcagcacgccacggcggacgccatagctaagcgccacctccacgagagcgacgcatctgtcgcagctgatgccgtagctcgccacgagattagggtgaggtacaaacgctggttgtggtggaccagatttggtatggcagttggtgcattgcagttggttgcagcaatttatctcatgtttgtcattgtaagagatctctcaaatgaaagaagatccacttcctgcttctttggtatgttggtcgccattctgagctatttatttcctaactttgtacataattttttacaagttcttgtttgctggtagtttacaatcacatgaacttcatacatatacaacgacacacataaagtgggaaaaactttcgagcacccttttcttgaagttccatatgaaatttttttagtgaatgtaccacaaacatgctaactactctcactttgagcagattttgcttcaataaatgcactgaaacatagttaattaacacaatctagtaacaactcttaagagtatacacatttcattatactatcctaaggttttattttctgctgtgctaatccactcatctacttgggattgaataagtcgtttggatggtttataatctaggacaggataaagctgatcgggtgtcagtacgagcacttattgctttatttcttatcctttcatgggttgtgatcattgtccaatgcttcacgggttctgatatattgaggtggcgatcattttatgcaacacatgatatggcatggaaagctcattacagggaagtgttcgaccatggaatccgagaagctttgtgctgcctaggacgtgcaaaatatctaactgtattggaagaagatgaggtttattctgttgcaagactccttggtgatttggttgcatatcgtgcttctgggacaggacatttggagctcttagcagggcttgctctattgcagaagcacgggaatttatctgaattgcagactgaccttgtggaggcatcccatgagcttatgcaagaagctgctttcctccatccatttgcggaagcatgttatacgggaccacttcttgattttggacgaaatcctatcctgtttccctgtgcatgggtttatagacaaggtgtgttaactccatgggcacgcagaagacgccctgcacttgatggtgataattggtggcgaggccatgctgcagctttccttagatttgttaatataccacctaaagcacttctgaaaggacgtgtttgccagagcaagcgtgaagctgcttattttgttgtggttctccatgacaaaagaactgttgtcattggggttcgtggaacagagacaccagaggatctcataactgatggattatgcagagaatgtgcttttactatggaagatttggatggactagtaaatagtgaacaattacctgcaactacaagagagagagttatttcaacatttccacactatggtcatggtggaattgtagagtctgccagggagcttttcatgcaactaaatggagaaaacacatcttctggaagacttgggttcctttccacactgctgggggagggcagtgagtgtcatggatataaagttcgtcttgttgggcattctttaggaggcgctgttgctacagtcctaggaatgatgcattatttgcaatgatgaattttcctctcgcctttcaatcaattcgattcttaggctacgatctgctgcaataagtgctctttcagataactctccagctgatacagcaatgatacaaaagctcgctcgaagaattttgcatgtgaacaggtatcatgataatggtcctgacgatggcataatccagggctatgctgatcatacaagaacagcagatacaacagtaccgaatgaaagacaaatttctcatcagattccattatgcaatactgaactagacctccacaatacgcaaaatggcttttttaggtataatgggtccagtgcatcaatagatgagcatctgagctatgaaggcataagcagtggccatgatatgcaaataattccacttgatggggctgattctggttttgaagggcaccagacatcttacagagaaataccagtggagcctcctgagatgtttcttgcaggcttaattgttcacatagtgcggcaaagaagaagtctctttcctctttggaaatgctggagcatccaggaaactgaaccaccatacaaagctgttttagcgaaaagggagaacttcagggatatagtggttactccttacatgtttacagatcacttaccatggaggtgccactttgctatgcagaagattgttgaagctcaaacgcctatgagacgtgcgcattccgatccacccgtacaacaacatttggtctgaccaggacaaaactgctgcccatgtacagaattgcgtgaaggacagaaaattatgatgatcacatttagcagcatggtttattgcaggctggaccgctggaggcatatttcagtccttcaggcagccagaatatgtccgtgacagacccaaaatcgtgacgagcttattgacagtcagaggccaccgagacatgatcactggttactgtacaccaaacagtatctaatcagtctactcaccctggcaacctgcgcgtcaattaattaattcatcgattgttctcttc

SEQ ID NO: 219461 - DNA, 2341 bp, Zea Mays
caaccacccgcgttccccgctttccgtgcgcatggccgccgcgcgggcgcaaccaccaccgccgtggccggatgtctagaaagcccctcctccccacctgcgggtcctccacccctcccccgctcctcctcctccgccgcttcctccctcgccgccgcgcgacctcctctcccccgccgccctccacccggcggaggaccgccgccatgccaccccgcgccggcgactccgccgcggcggcggctgcggcggcatccttccgtctcgggatggtgcgggtggtctctttccttgtaggcgggctcaacctcgcggtgctgctgctcggactctacattatcgacgccgtgctcccgtcggggtgcggcggggggctcgctttcgcctcggcgcccgctctggctggggtccgcgtgctctccatgatcggcgccgcgcgcgcgcagcacgccacggcggacgccatagctaagcgccacctccacgagagcgacgcatctgtcgcagctgatgccgtagctcgccacgagattagggtgaggtacaaacgctggttgtggtggaccagatttggtatggcagttggtgcattgcagttggttgcagcaatttatctcatgtttgtcattgtaagagatctctcaaatgaaagaagatccacttcctgcttctttgggaagtgttcgaccatggaatccgagaagctttgtgctgcctaggacgtgcaaaatatctaactgtattggaagaagatgaggtttattctgttgcaagactccttggtgatttggttgcatatcgtgcttctgggacaggacatttggagctcttagcagggcttgctctattgcagaagcacgggaatttatctgaattgcagactgaccttgtggaggcatcccatgagcttatgcaagaagctgctttcctccatccatttgcggaagcatgttatacgggaccacttcttgattttggacgaaatcctatcctgtttccctgtgcatgggtttatagacaaggtgtgttaactccatgggcacgcagaagacgccctgcacttgatggtgataattggtggcgaggccatgctgcagctttccttagatttgttaatataccacctaaagcacttctgaaaggacgtgtttgccagagcaagcgtgaagctgcttattttgttgtggttctccatgacaaaagaactgttgtcattggggttcgtggaacagagacaccagaggatctcataactgatggattatgcagagaatgtgcttttactatggaagatttggatggactagtaaatagtgaacaattacctgcaactacaagagagagagttatttcaacatttccacactatggtcatggtggaattgtagagtctgccagggagcttttcatgcaactaaatggagaaaacacatcttctggaagacttgggttcctttccacactgctgggggagggcagtgagtgtcatggatataaagttcgtcttgttgggcattctttaggaggcgctgttgctacagtcctaggaatgatgctatatggcaaatacccaagcgtgcatgtatatgcatatggaccacttccttgtgtggactttgtaatagcggaagcatgttcgcattttgtcacaaccattatttgcaatgatgaattttcctctcgcctttcaatcaattcgattcttaggctacgatctgctgcaataagtgctctttcagataactctccagctgatacagcaatgatacaaaagctcgctcgaagaattttgcatgtgaacaggtatcatgataatggtcctgacgatggcataatccagggctatgctgatcatacaagaacagcagatacaacagtaccgaatgaaagacaaatttctcatcagattccattatgcaatactgaactagacctccacaatacgcaaaatggcttttttaggtataatgggtccagtgcatcaatagatgagcatctgagctatgaaggcataagcagtggccatgatatgcaaataattccacttgatggggctgattctggttttgaagggcaccagacatcttacagagaaataccagtggagcctcctgagatgtttcttgcaggcttaattgttcacatagtgcggcaaagaagaagtctctttcctctttggaaatgctggagcatccaggaaactgaaccaccatacaaagctgttttagcgaaaagggagaacttcagggatatagtggttactccttacatgtttacagatcacttaccatggagctcgtcaccttctctgctggccaaattactagttatgattgtcgtg

SEQ ID NO: 219462 - DNA, 2391 bp, Zea Mays
aaccacccgcgttccccgctttccgtgcgcatggccgccgcgcgggcgcaaccaccaccgccgtggccggatgtctagaaagcccctcctccccacctgcgggtcctccacccctcccccgctcctcctcctccgccgcttcctccctcgccgccgcgcgacctcctctcccccgccgccctccacccggcggaggaccgccgccatgccaccccgcgccggcgactccgccgcggcggcggctgcggcggcatccttccgtctcgggatggtgcgggtggtctctttccttgtaggcgggctcaacctcgcggtgctgctgctcggactctacattatcgacgccgtgctcccgtcggggtgcggcggggggctcgctttcgcctcggcgcccgctctggctggggtccgcgtgctctccatgatcggcgccgcgcgcgcgcagcacgccacggcggacgccatagctaagcgccacctccacgagagcgacgcatctgtcgcagctgatgccgtagctcgccacgagattagggtgaggtacaaacgctggttgtggtggaccagatttggtatggcagttggtgcattgcagttggttgcagcaatttatctcatgtttgtcattgtaagagatctctcaaatgaaagaagatccacttcctgcttctttggtggcgatcattttatgcaacacatgatatggcatggaaagctcattacagggaagtgttcgaccatggaatccgagaagctttgtgctgcctaggacgtgcaaaatatctaactgtattggaagaagatgaggtttattctgttgcaagactccttggtgatttggttgcatatcgtgcttctgggacaggacatttggagctcttagcagggcttgctctattgcagaagcacgggaatttatctgaattgcagactgaccttgtggaggcatcccatgagcttatgcaagaagctgctttcctccatccatttgcggaagcatgttatacgggaccacttcttgattttggacgaaatcctatcctgtttccctgtgcatgggtttatagacaaggtgtgttaactccatgggcacgcagaagacgccctgcacttgatggtgataattggtggcgaggccatgctgcagctttccttagatttgttaatataccacctaaagcacttctgaaaggacgtgtttgccagagcaagcgtgaagctgcttattttgttgtggttctccatgacaaaagaactgttgtcattggggttcgtggaacagagacaccagaggatctcataactgatggattatgcagagaatgtgcttttactatggaagatttggatggactagtaaatagtgaacaattacctgcaactacaagagagagagttatttcaacatttccacactatggtcatggtggaattgtagagtctgccagggagcttttcatgcaactaaatggagaaaacacatcttctggaagacttgggttcctttccacactgctgggggagggcagtgagtgtcatggatataaagttcgtcttgttgggcattctttaggaggcgctgttgctacagtcctaggaatgatgctatatggcaaatacccaagcgtgcatgtatatgcatatggaccacttccttgtgtggactttgtaatagcggaagcatgttcgcattttgtcacaaccattatttgcaatgatgaattttcctctcgcctttcaatcaattcgattcttaggctacgatctgctgcaataagtgctctttcagataactctccagctgatacagcaatgatacaaaagctcgctcgaagaattttgcatgtgaacaggtatcatgataatggtcctgacgatggcataatccagggctatgctgatcatacaagaacagcagatacaacagtaccgaatgaaagacaaatttctcatcagattccattatgcaatactgaactagacctccacaatacgcaaaatggcttttttaggtataatgggtccagtgcatcaatagatgagcatctgagctatgaaggcataagcagtggccatgatatgcaaataattccacttgatggggctgattctggttttgaagggcaccagacatcttacagagaaataccagtggagcctcctgagatgtttcttgcaggcttaattgttcacatagtgcggcaaagaagaagtctctttcctctttggaaatgctggagcatccaggaaactgaaccaccatacaaagctgttttagcgaaaagggagaacttcagggatatagtggttactccttacatgtttacagatcacttaccatggagctcgtcaccttctctgctggccaaattactagttatgattgtcgtg

SEQ ID NO: 219463 - DNA, 1555 bp, Zea Mays
acaagatgtggggtttagctggggctgcaggactgagagagcaagcgtgaagctgcttattttgttgtggttctccatgacaaaagaactgttgtcattggggttcgtggaacagagacaccagaggatctcataactgatggattatgcagagaatgtgcttttactatggaagatttggatggactagtaaatagtgaacaattacctgcaactacaagagagagagttatttcaacatttccacactatggtcatggtggaattgtagagtctgccagggagcttttcatgcaactaaatggagaaaacacatcttctggaagacttgggttcctttccacactgctgggggagggcagtgagtgtcatggatataaagttcgtcttgttgggcattctttaggaggcgctgttgctacagtcctaggaatgatgctatatggcaaatacccaagcgtgcatgtatatgcatatggaccacttccttgtgtggactttgtaatagcggaagcatgttcgcattttgtcacaaccattatttgcaatgatgaattttcctctcgcctttcaatcaattcgattcttaggctacgatctgctgcaataagtgctctttcagataactctccagctgatacagcaatgatacaaaagctcgctcgaagaattttgcatgtgaacaggtatcatgataatggtcctgacgatggcataatccagggctatgctgatcatacaagaacagcagatacaacagtaccgaatgaaagacaaatttctcatcagattccattatgcaatactgaactagacctccacaatacgcaaaatggcttttttaggtataatgggtccagtgcatcaatagatgagcatctgagctatgaaggcataagcagtggccatgatatgcaaataattccacttgatggggctgattctggttttgaagggcaccagacatcttacagagaaataccagtggagcctcctgagatgtttcttgcaggcttaattgttcacatagtgcggcaaagaagaagtctctttcctctttggaaatgctggagcatccaggaaactgaaccaccatacaaagctgttttagcgaaaagggagaacttcagggatatagtggttactccttacatgtttacagatcacttaccatggaggtgccactttgctatgcagaagattgttgaagctcaaacgcctatgagacgtgcgcattccgatccacccgtacaacaacatttggtctgaccaggacaaaactgctgcccatgtacagaattgcgtgaaggacagaaaattatgatgatcacatttagcagcatggtttattgcaggctggaccgctggaggcatatttcagtccttcaggcagccagaatatgtccgtgacagacccaaaatcgtgacgagcttattgacagtcagaggccaccgagacatgatcactggttactgtacaccaaacagtatctaatcagtctactcaccctggcaacctgcgcgtcaattaattaattcatcgattgttctcttc

SEQ ID NO: 219464 - DNA, 1582 bp, Zea Mays
atgctttctgtatctacgaaggatttcctggaaaggcctctagcaggttctcaagtacagttgtgcttgctggaaacaaatatgcccaacagttggactcatattgatcctggtacattccgagtccgtggagcaaactattttagggataagaaaaaagagcttgctccaaattatgctgcatattatccatttggagttgatgtgtacttatcgccacagaaactcaatcatatatctcgatttgttgaacttcctgatattcaactctccagcaagctcccacctcttttggtggtcaatgtacaggtgccattgtatccagcttcattatttcagaatgagactgatggggaagggatgagctttgttttgtactttaggctttctgatggttactcgaaagagcttccaccttcattcattgaaagtattagaaggttgattgacgaccatgtagagaagataaaagcatttccaatggaaacgactataccattccgagagcggctgaagatacttggcagggtggctaatctggaggatcttcctttgagtgcagcggagaggaagctaatgcatgcgtataacgagaagcctgtcctttctagaccacagcatgagttttacctgggtgataactacttcgagatcgacattgacatgcacagatttagctacatctcaaggaaaggttttgcaacatttttggacaggctaaaagcatgtgttctagatgttgggctaactattcagggaaataaagctgaagaactgccggaacaaatcttatgctgtgttaggttgaatgggatagattacaccaaataccagcctcttttgactcacgctgcctgaaataaacgcttacaagaaccagctaaccgtcatttggaattggatgctgagaggtaaccataccaggacccagactcctggagatttcagaccagagccgctgtcgattatcacagcttctgctgaaacgccatcatccgagcttaggtggggcaggtgactcattgacaactggctgctcccgttcgaatccgtggtgctaatgtagtcgtttctttctgaacacggggggaaaaggcggagactgcggtacatgtaagggcatgtttggtttgtggctaaatgtgccacactttgcctaaggttagtcgttcgaattgaataactaaccttaggcagaaaagttaggcaaaatgtggcaattgaggtaaagaaccaaacatgccctaaatctgtaaatcattgctggatagctccggttgcctcccttttactacccaacattctagatttagtaaatataactaattctgactatggtcgagtaggtttaggcgttaaagacctctacaacaatttcactatatccgtacaggaacaggatgtcgtcttggcccaaaatatcgtgtacaacttgcatgatgatgtgttgttaactttggaagctctatatggttcagggctatcgtcccaaattatcgtgtacaagtacaatttttatgatgttgagttcgtaacaatgcgaggttgtcggatggtaagagcaactaaaaaaccatcttta

SEQ ID NO: 219465 - DNA, 1126 bp, Zea Mays
cagagacatcatgcctacgttttcagggttgtagctgaagtcccctttggggtcctgccattctttgaagtaaagagtccggatttaacttcttaggcatatagtcgttcaagaggttgattgacgaccatgtagagaagataaaagcatttccaatggaaacgactataccattccgagagcggctgaagatacttggcagggtggctaatctggaggatcttcctttgagtgcagcggagaggaagctaatgcatgcgtataacgagaagcctgtcctttctagaccacagcatgagttttacctgggtgataactacttcgagatcgacattgacatgcacagatttagctacatctcaaggaaaggttttgcaacatttttggacaggctaaaagcatgtgttctagatgttgggctaactattcagggaaataaagctgaagaactgccggaacaaatcttatgctgtgttaggttgaatgggatagattacaccaaataccagcctcttttgactcacgctgcctgaaataaacgcttacaagaaccagctaaccgtcatttggaattggatgctgagaggtaaccataccaggacccagactcctggagatttcagaccagagccgctgtcgattatcacagcttctgctgaaacgccatcatccgagcttaggtggggcaggtgactcattgacaactggctgctcccgttcgaatccgtggtgctaatgtagtcgtttctttctgaacacggggggaaaaggcggagactgcggtacatgtaaatctgtaaatcattgctggatagctccggttgcctcccttttactacccaacattctagatttagtaaatataactaattctgactatggtcgagtaggtttaggcgttaaagacctctacaacaatttcactatatccgtacaggaacaggatgtcgtcttggcccaaaatatcgtgtacaacttgcatgatgatgtgttgttaactttggaagctctatatggttcagggctatcgtcccaaattatcgtgtacaagtacaatttttatgatgttgagttcgtaacaatgcgaggttgtcggatggtaagagcaactaaaaaaccatcttta

SEQ ID NO: 219466 - DNA, 1470 bp, Zea Mays
cttttcaaaattgaattggaagggattcctcccccatggatccccttgggatacctaatcaccaaatcagctcttagtaagaatattatccttgcacataacattgtttatcgcgacctcggcgggtagattcgccgccgcccacagcccacccggtcgctggggcctccccgtcgtcgccggtcgctcgacattccccgtgccggtccgcgcttccgatccccagcgcttccccgagtcgctgcgtgctcgcgtttccccgagccaagggtcgaaggtcgattcagcgccgtcctcaccggagcttgtccacgcccccttgtcccttcgcgcccgctccttcgccggagaccaccacgctgtccttgagcccgtcttctcgggaaacggcgcttcacgccctgcaagcgggacgaccccgtcccgcatctacggtgaatattcgcctgtgggacgagcccatcccacttctcctcacatccaaccaaacgccagcgagaagaggaccgtcccgtcccgttacggttcgtctctccacccctagttccccaaaccggggcatcgattcatcgaaccctgcccggagacgcgagcaatcatagacaggcatggcgatcgctcggaccggcgtgtacgtcgacgactacctcgagtactcgagcaccctggccggcgacctgcaaaggattctctccaccatgcgcgagctcgatgacagggcacatggcattatgggtcagaccaaagaacagataaagtatattctaggagtatcatcccatgggtatgacaggtcaaacatggatgatgatgagtcggagaggatgaagaaggacattgaagctagccaggacaatgctctgaatctttgcaccgagaaagtcttactggcacgccaagcttatgacctgatagagagccatataaaacgccttgatgaagacttgggccagtttgcagaagatttaaagcatgaagggaagatacctccagatgaacctacagtccttcctccagttccggtggttagcagggatgagaaaaggaggtttggttttagtacacctcaagcatcaaaaaaatttagagagagggaatgggacagggaaaggggtatggactttgatttaatgccccctccaggtagcagcaagaaagcaggtacatctatggatgtggatcaaacaattgatccaaatgaaccgacatactgtatatgccaccagatttcatatggtgacatgattgcttgtgacaatgagaattgtggaggaggtgaatggtttcattacacgtgtgtgggtcttacaccagaaacgagattcaaggggaaatggttttgcccaacgtgcaggaatcttcagtgagaggttctccaaggaaaaaatccaaatgcatggggattagtggtgcactgaagaagctacctagtctctccgtattttattgactgtcgctatggaaggcgtg

SEQ ID NO: 219467 - DNA, 1329 bp, Zea Mays
agaatattatccttgcacataacattgtttatcgcgacctcggcgggtagattcgccgccgcccacagcccacccggtcgctggggcctccccgtcgtcgccggtcgctcgacattccccgtgccggtccgcgcttccgatccccagcgcttccccgagtcgctgcgtgctcgcgtttccccgagccaagggtcgaaggtcgattcagcgccgtcctcaccggagcttgtccacgcccccttgtcccttcgcgcccgctccttcgccggagaccaccacgctgtccttgagcccgtcttctcgggaaacggcgcttcacgccctgcaagcgggacgaccccgtcccgcatctacggtgaatattcgcctgtgggacgagcccatcccacttctcctcacatccaaccaaacgccagcgagaagaggaccgtcccgtcccgttacggttcgtctctccacccctagttccccaaaccggggcatcgattcatcgaaccctgcccggagacgcgagcaatcatagacaggcatggcgatcgctcggaccggcgtgtacgtcgacgactacctcgagtactcgagcaccctggccggcgacctgcaaaggattctctccaccatgcgcgagctcgatgacagggcacatggcattatgggtcagaccaaagaacagataaagtatattctaggagtatcatcccatgggtatgacaggtcaaacatggatgatgatgagtcggagaggatgaagaaggacattgaagctagccaggacaatgctctgaatctttgcaccgagaaagtcttactggcacgccaagcttatgacctgatagagagccatataaaacgccttgatgaagacttgggccagtttgcagaagatttaaagcatgaagggaagatacctccagatgaacctacagtccttcctccagttccggtggttagcagggatgagaaaaggaggtttggttttagtacacctcaagcatcaaaaaaatttagagagagggaatgggacagggaaaggggtatggactttgatttaatgccccctccaggtagcagcaagaaagcaggtacatctatggatgtggatcaaacaattgatccaaatgaaccgacatactgtatatgccaccagatttcatatggtgacatgattgcttgtgacaatgagaattgtggaggaggtgaatggtttcattacacgtgtgtgggtcttacaccagaaacgagattcaaggggaaatggttttgcccaacgtgcaggaatcttcagtgagaggttctccaagaaactcatttttctctcgtaactaatct

SEQ ID NO: 219468 - DNA, 1549 bp, Zea Mays
agaatattatccttgcacataacattgtttatcgcgacctcggcgggtagattcgccgccgcccacagcccacccggtcgctggggcctccccgtcgtcgccggtcgctcgacattccccgtgccggtccgcgcttccgatccccagcgcttccccgagtcgctgcgtgctcgcgtttccccgagccaagggtcgaaggtcgattcagcgccgtcctcaccggagcttgtccacgcccccttgtcccttcgcgcccgctccttcgccggagaccaccacgctgtccttgagcccgtcttctcgggaaacggcgcttcacgccctgcaagcgggacgaccccgtcccgcatctacggtgaatattcgcctgtgggacgagcccatcccacttctcctcacatccaaccaaacgccagcgagaagaggaccgtcccgtcccgttacggttcgtctctccacccctagttccccaaaccggggcatcgattcatcgaaccctgcccggagacgcgagcaatcatagacaggcatggcgatcgctcggaccggcgtgtacgtcgacgactacctcgagtactcgagcaccctggccggcgacctgcaaaggattctctccaccatgcgcgagctcgatgacagggcacatggcattatgggtcagaccaaagaacagataaagtatattctaggagtatcatcccatgggtatgacaggtcaaacatggatgatgatgagtcggagaggatgaagaaggacattgaagctagccaggacaatgctctgaatctttgcaccgagaaagtcttactggcacgccaagcttatgacctgatagagagccatataaaacgccttgatgaagacttgggccagtttgcagaagatttaaagcatgaagggaagatacctccagatgaacctacagtccttcctccagttccggtggttagcagggatgagaaaaggaggtagcagcaagaaagcaggtacatctatggatgtggatcaaacaattgatccaaatgaaccgacatactgtatatgccaccagatttcatatggtgacatgattgcttgtgacaatgagaattgtggaggaggtgaatggtttcattacacgtgtgtgggtcttacaccagaaacgagattcaaggggaaatggttttgcccaacgtgcaggaatcttcagtgagaggttctccaaaaccaaggccattggcgagaatggaacctgctggaatgatatacaaggggtaatcgttttgctcgacatgcatgatcttcatccggaggttgttctgtgtgaagaacttgtcgcaatttggtcgctcggagttgttgcttaaagcgagtttaacattagagactcgcccttcatctcttggctgtctgtctatacttggcactgattttccttgcttggaataacttatggtcagattcacaaacgtttgtagttgtgatatgaaacgctgtgtgttcttttcgacatcgagcaatttagcattatcacgtttggaacatcgctgtcagcatttcatcatgaac

SEQ ID NO: 219469 - DNA, 1032 bp, Zea Mays
acgactgacagtgaaaaaataggaaatgactcgtcaacgcaactaccccaagtcgccgctgagccactctctccgtccgcgaatccgtaaatggaaggggacgaaatgctcagggtgaagctcggcaggcagggccttgaggtgtccaagcttggcttcgggtgcatgggcctcactggagtgtacaacgcccctgttcctgaccaagctgggatcgacataatcaagcacgcgtttgaggccggcatcaccttcttcgacaccgctgatgcctatgggccacacaccaacgaggtcctgctcggaaaggcattgaaacattttcctcgtgagaaggtgcaaattgccaccaaatgtggcattgcaggatttgatgcaagtggcatgcgtgtgaagggcactccagattatgttcgagcttgttgtgaagcaagccttcagcgccttgctactgactacattgatatatactaccaacatcgcattgatcagtcagtgcctatagaggaaactatgggagagctcaagaagttggttgaagaagggaaagtgaggtatgttggcttatcagaggctagtgccgataccattcgacgggcacatgctgtccatccaattactgcggtgcagttggagtggtcactatggaccagagatatagaggaagatataattccagtctgcagggagcttggtattggaatagttccatatagcccacttggccgtggcttctttgctggcagggcagctgtagaacgtgttccatcagaaagtctattgtctaaacatccaagatattctggggaaaacttggagaagaataaagttctgtatacacgacttgaaatgttgtccaagaagtatgggtgcacacctgctcaactcgctctctcctgggttcttcatcaaggagaagatgtggtccccatccctggaacaacaaaagccaagaaccttgacgaaaatatcggtgctgtaaaggcaataatctcctctagctacagaaaacaacgttgcgcagacagtgag

SEQ ID NO: 219470 - DNA, 4026 bp, Zea Mays
acagcgactgcggtgaggcgaccgttgcggtgccgtgcattaaaccaccctgccccccctgtcccccgcccccctctgcccccgctcctcgccgtcggcacccgcacccgcgcggcacggcggcgtccggggtccggtgggctgggctgagtcgacgagcgcttgagctgagccgtcccagtgcgggggcgatcgcgtcgcctccggcctactccaggagcttcaactgatcgggcaatcggttgtcttcgtcccgcgttgaagtagattcggtcaaaaagtcaaaccgacgtgaggggaatttttctggtttggtttggtttggtttggtttggtctggatccgaaatgctgtgctggaaagcggttggtcagtaaatcgccgctgctaaagtttctgctccctgagctcagttggatcggagagttttagttcagtgtgcccatcctaaaacagggcgagttctgccgtgaatttgttggcttgtgttgtttgatcacaactgtattaaaaaaaaaggatcgatctttgcggctacaagagagtgacaacaaggaggcttggtcagctcgttcctttcacctgtttggcgagtgcttgaggaagaagacgacctgctcagctcctcctttggttgctcatcgaatcaaagaagactagggaaatgggggtaatgtcccggcgggttctgcccgcctgcagcagcctttgctacttctgcccatctctgcgggcgcgctctcggcagcctgtcaagcggtacaagaagatcatagcagatatctaccagctgcaaccggatggagagccaaatgatagaaggatcgggaaactctgtgattatgtctcgagaaatccaacacgcataccaaagatcacagagtatcttgaacagagattctataaagatctaaggcatgagaattttacgttggccaaagttgtgccatgcatctataggaaaattctatgttcatgcaaggagctcaggccattgctagccacaagctcattaagcaccattcgcactcttcttgatatgaaagcgcatgatgatctacaagttctgggttgtcttatgcttgttgacttcctgaatggccaggttgatagcacacatatgtttaatttggaaggcctcataccaaaactttgcaaaattggtcacgaattaagagaagatgatgaagggctccgtcttcgatctgcagctcttcaggctcttgcttctatggtccaatacatgggcgaccactcacacatttcaatggaacttgatgaagttgtctcagtgatcataagctgttacgaggctaatcaaacactctcaataaaagaggtagtcagatttcaagatgatgatgatttggtcattaatgggaacttggctgtgttaccagtgtctggacaaaatagtgccaaagtggcatctgatacaatgtctgcatctgaaaatccagcatactgggcaagggtttgcttgcgaaatatggctaatattgcaaaggaggccacaactgtgcggcgtattcttgaccctcttttccgcctttttgacagccacgactattggtctcctgaaagtgggattgccctttccgttctgcaagaaatgcagaaactgatggacaaatcaggtgcagcaattttcacccatggcaacatggtcatttgttgttatctttcactataaagcacatagaccataaaagtattgccaagaattctgtcaagcaaatcaatattgtaaaagttgcttcacatcttgcaaggcatgcaaagttgaaggcatcagtgacgatagcaagtgctatcagtgacttaataaagcacttgcgcaaatgtatgcattttgctattgaagcatctaatgcaaatgctgattgtgacaagtggtacagtgcactttatgtggccttggaggagtgcctagtgcagttgacagaaaaggttggggatgttggtcctattcttgatatggttggggtaatgcttgagaatctctctcatactgctaccatcgcaagaacaacaatttcatctgtttatcgcacatcacaaatagcagcatctgtctacaagtcatcataccatcagaaggcatttcctgaagctttatttcaccagcttctcttagcaatgttgcactcagacaataagacaaggattggttcacatcgtgttctatctaccattgtagcaccttcaatggcgtgtccatggtcggacatcagctttcctatcccaatgaagggtgatgattcacataacttgcatttgttggttctctcagctttctcttctgaggccataatcaatgaaacacggaccaaaaacaagatccaagaatccttgcaagaaaacaacaaatcagaagctatagtggatcctgagaatggatacacacagacagaaccagataaaaggaagtattcaggggggccatgtctaaatgagcattatcgtacagcttttaatgatgaagtatgaaatccagctgccatatgtatacagtatactaccttcttctcttgctttgtgggttttaagtgcccaactgatttttcatcttaatttcgtccatccattcagaacttaaagttcatgaagttgaacgaccaccagattgttctccttctttcatctatttggagtcaagcatctctggatgacaacttacctgcaaattttgaagcaatgggccttgtctacagcattgctttattatgttcaaaaccaaaaagctccagtcatgtgacacgtattcgttgtttccagttggcgttctctctcaggagaaactctcttagccctgaaagtgatttgaagccatctcgtagaaggtgtctgtatacgatggcatcagcgatgctcatcttttcagcaaaaattgctgatctccaccagataattcctcttgtgaaagccgcagcaccagagaaaatggttgatcctcatcttcgcttgatggatgactgccagcttgttaatacctctgcagagtcatctaacagcgagatggtttatggttccgaggaagatgaaagtgatgcactggcttttctttcagccatcaacaagcctgacacagagttaatagaaaccgtgatgtgccacttcagggagaagttcgaaaatttaccagaggttaacgggatagaagagcaacttcttcaagagttttccctggatgattcgtttcctcttggtgctccactattcatggagatgccacactcttgttcaatgtatgcagaaaaggatgaagaatgttttgacgaggacactgttccttctgagctagacgatgacgacatcatctttgagcatagtgggtctcaatctgaccggaaaacgtcaggttccatggcttcgtcagatgttctaactgtcaaccaactaatagaatctgttcatgagaccgcaaggcaagttgccaacgttccagttcccgccaaccctgtaccgtacgaccagatgaagagtcagtgcgaagccctggtcatggagaagcaacagaagatgtctgtcctcttgagcttgaagcattcgaggactgactcacatggttcagccggtgtggatgggcttgaaacgaatgagtcttctctgctgtctgagcctgagttacagtcaacaaggaaggggcgcatgcgccgctgcgattcagcgtccagcgaatctgactgttcgttcaggctgccacctgctagcccatatgacaagttcctgaaggcggctggacggtagcctgatgcggttgcggcagcttggcgcttcagttttcaactctctcaagtctgcatgagagttcagtacaagtgattcatcggcactctctcgttctcggagtccattctttcaagtgtatattatatttacatccctcgacacaaggtgtataaagttctgttactgtttccttcagaataaaccgaagtgtataggcactagcggatgatcatgttcaagacggtatttgttcatttgttgatcgtgaaaagaaaacattttacacaaatcatg

SEQ ID NO: 219471 - DNA, 1596 bp, Zea Mays
tgtagtaccatgatctctatattcctagctaagtcatgtcaaatgaggaatccaaaggaagttgagaaaactgagtacaatgaattctacaagaagacatttaatgagtttctggatccgcttgcttacactcacttcaccactgagggagaggtggaatttcggagtgttctctatgtcccagggatggcgcctcttagtaatgaggagataatgaatccaaagaccaaaaacatccgattgtatgtcaaaagagtgttcatatcagatgattttgatggcgagctgtttcccagatacttgagctttgtgaaaggtgtagttgactcaaatgatctccctctcaatgtttctcgtgagatccttcaagaaagtagaattgtcagaattatgcgtaagagacttgttaggaagacatttgacatgattcaagagattgccgagaaggatggcaaagaggactacaacaaattctgggagagctttggcaagttcatgaagcttggttgcatcgaggacacaggaaaccacaagcgtcttgcaccattgctgagattctactcttccaaaaacgagacagatttaataagtctggaccagtatgtagaaaacatgcctgaaaaccagaaggcgatctattatatcgctactgatagtctccagagcgcgaagactgctcctttcttggaaaagctggttcagaaagatattgaggttctttacctcattgagccaattgatgaggttgccattcagaatttacagacatacaaagagaagaagtttgtagatattagcaaagaggatttggaattgggtgatgaagatgaggacaaggagaaagaaagcaagcaggagtatactcttctatgcgactggataaagcagcagcttggcgataaagtcgccaaggtccagatctcgaagcgactcagctcttctccatgtgttcttgtttctggtaaatttggctggtcagccaacatggaaaggctcatgaaggcacagacccttggtgacacatcaagcctggagttcatgagaggtagacgaatttttgagatcaaccctgaccatcctatcatcaaggacctgaacgctgcttgcaaaaacgagcctgaaagtactgaagccaagagggcggcagagttgctatacgaggctgcgctgatctccagtgggtatactcctgacagtccagcggagctgggaggcaagatctacgagatgatgaccatggccctcggcgggagatgggggaggttggagacagaggaggctgaagtcatcgccagcatcgacgacgcggactcgtctgaaggtgccacgaccacgacagaggtagtcgagccctctgaggtcaggacagagagcgacccgtggaaggattagatagttctgtatgcaaggattatgccctggtgtggtgtatgagcactggatgtaacgaaagtacgaaccagagccaggatagaggaatgcagcgtttgataagaacactggtgttaaaagtgtagatctctggtttgggttgtgctgataaatttttgtaggctataaccatccaatgaaaaatgccctctgcgctttcgtgca

SEQ ID NO: 219472 - DNA, 2746 bp, Zea Mays
ctcccagtccctgtacctccgtataaaccctagtacctcttatccgttcgtcactccccaagcgtcacaccgaatcaccacagtcgagctcgagcaggaacaagccgtgagcgcctgcccccggtgctcaatatctattccacacctcatggcgccggcgctgagcaggaccctggggccgtcgtcggtggccgcgctgcgcccgagcccgtcgtgccggggtctgttacgggccgcgctcgcgccgcagggcaggggcgcctccgcgaggtgcgcggtaggggtgagatgggaggcagccaggcggaggaggatggccggggtgaggtgcgacgccgccgtcgctgagaagcctgccggcgaggaggagacggccggcgagaagtacgagtaccaggctgaggttacccgcttgatggacttaattgtacacagtttatacagccacaaggaagtatttttacgtgagcttgtaagtaacgcgagtgatgcactggataagctgagattcctcagcgtaactgatccttctgtgttggctgatggcggtgagttggagataaggattaaacccgacctagaggcggggacaatcactatcacagatactggcattggaatgactaaagatgagctcaaagactgtcttggaaccattgcacaaagtggcacctcaaagtttttgaaggctctaaaggagaacaaagaccttggtgcagataatggactcattggtcaattcggtgttgggttctattccgctttccttgttgcagagagggttgtggtgtctactaaaagtccaaaggcagataagcagtatgtgtgggaagcagaggctgacagcagctcgtatgttatcaaggaagaaaatgatcctgagaaaatgctttcacgtggaacagaaattactctttatttgagagatgatgacaaatatgagtttgctgaccctaccaggattcaaggcttagttaagaactactcgcagtttgtctcattccccatatatacatggcaggaaaaatcaagaacagttgaggttgaagaggaggaagaatcaaaaggtgaagaggctactgaagaatcaaaaagtgaagaggctactgagggtgaaaagcagaaaaagaagaaaaccataactgagaagtactgggactgggaattggctaatgaaacgaagcccatatggatgaggaatccaaaggaagttgagaaaactgagtacaatgaattctacaagaagacatttaatgagtttctggatccgcttgcttacactcacttcaccactgagggagaggtggaatttcggagtgttctctatgtcccagggatggcgcctcttagtaatgaggagataatgaatccaaagaccaaaaacatccgattgtatgtcaaaagagtgttcatatcagatgattttgatggcgagctgtttcccagatacttgagctttgtgaaaggtgtagttgactcaaatgatctccctctcaatgtttctcgtgagatccttcaagaaagtagaattgtcagaattatgcgtaagagacttgttaggaagacatttgacatgattcaagagattgccgagaaggatggcaaagaggactacaacaaattctgggagagctttggcaagttcatgaagcttggttgcatcgaggacacaggaaaccacaagcgtcttgcaccattgctgagattctactcttccaaaaacgagacagatttaataagtctggaccagtatgtagaaaacatgcctgaaaaccagaaggcgatctattatatcgctactgatagtctccagagcgcgaagactgctcctttcttggaaaagctggttcagaaagatattgaggttctttacctcattgagccaattgatgaggttgccattcagaatttacagacatacaaagagaagaagtttgtagatattagcaaagaggatttggaattgggtgatgaagatgaggacaaggagaaagaaagcaagcaggagtatactcttctatgcgactggataaagcagcagcttggcgataaagtcgccaaggtccagatctcgaagcgactcagctcttctccatgtgttcttgtttctggtaaatttggctggtcagccaacatggaaaggctcatgaaggcacagacccttggtgacacatcaagcctggagttcatgagaggtagacgaatttttgagatcaaccctgaccatcctatcatcaaggacctgaacgctgcttgcaaaaacgagcctgaaagtactgaagccaagagggcggcagagttgctatacgaggctgcgctgatctccagtgggtatactcctgacagtccagcggagctgggaggcaagatctacgagatgatgaccatggccctcggcgggagatgggggaggttggagacagaggaggctgaagtcatcgccagcatcgacgacgcggactcgtctgaaggtgccacgaccacgacagaggtagtcgagccctctgaggtcaggacagagagcgacccgtggaaggattagatagttctgtatgcaaggattatgccctggtgtggtgtatgagcactggatgtaacgaaagtacgaaccagagccaggatagaggaatgcagcgtttgataagaacactggtgttaaaagtgtagatctctggtttgggttgtgctgataaatttttgtaggctataaccatccaatgaaaaatgccctctgcgctttcgtgca

SEQ ID NO: 219473 - DNA, 2735 bp, Zea Mays
ccgcatcgcctccccacccccatgtctcccagtccctgtacctccgtataaaccctagtacctcttatccgttcgtcactccccaagcgtcacaccgaatcaccacagtcgagctcgagcaggaacaagccgtgagcgcctgcccccggtgctcaatatctattccacacctcatggcgccggcgctgagcaggaccctggggccgtcgtcggtggccgcgctgcgcccgagcccgtcgtgccggggtctgttacgggccgcgctcgcgccgcagggcaggggcgcctccgcgaggtgcgcggtaggggtgagatgggaggcagccaggcggaggaggatggccggggtgaggtgcgacgccgccgtcgctgagaagcctgccggcgaggaggagacggccggcgagaagtacgagtaccaggctgcaggttacccgcttgatggacttaattgtacacagtttatacagccacaaggaagtatttttacgtgagcttgtaagtaacgcgagtgatgcactggataagctgagattcctcagcgtaactgatccttctgtgttggctgatggcggtgagttggagataaggattaaacccgacctagaggcggggacaatcactatcacagatactggcattggaatgactaaagatgagctcaaagactgtcttggaaccattgcacaaagtggcacctcaaagtttttgaaggctctaaaggagaacaaagaccttggtgcagataatggactcattggtcaattcggtgttgggttctattccgctttccttgttgcagagagggttgtggtgtctactaaaagtccaaaggcagataagcagtatgtgtgggaagcagaggctgacagcagctcgtatgttatcaaggaagaaaatgatcctgagaaaatgctttcacgtggaacagaaattactctttatttgagagatgatgacaaatatgagtttgctgaccctaccaggattcaaggcttagttaagaactactcgcagtttgtctcattccccatatatacatggcaggaaaaatcaagaacagttgaggttgaagaggaggaagaatcaaaaggtgaagaggctactgaagaatcaaaaagtgaagaggctactgagggtgaaaagcagaaaaagaagaaaaccataactgagaagtactgggactgggaattggctaatgaaacgaagcccatatggatgaggaatccaaaggaagttgagaaaactgagtacaatgaattctacaagaagacatttaatgagtttctggatccgcttgcttacactcacttcaccactgagggatggcgcctcttagtaatgaggagataatgaatccaaagaccaaaaacatccgattgtatgtcaaaagagtgttcatatcagatgattttgatggcgagctgtttcccagatacttgagctttgtgaaaggtgtagttgactcaaatgatctccctctcaatgtttctcgtgagatccttcaagaaagtagaattgtcagaattatgcgtaagagacttgttaggaagacatttgacatgattcaagagattgccgagaaggatggcaaagaggactacaacaaattctgggagagctttggcaagttcatgaagcttggttgcatcgaggacacaggaaaccacaagcgtcttgcaccattgctgagattctactcttccaaaaacgagacagatttaataagtctggaccagtatgtagaaaacatgcctgaaaaccagaaggcgatctattatatcgctactgatagtctccagagcgcgaagactgctcctttcttggaaaagctggttcagaaagatattgaggttctttacctcattgagccaattgatgaggttgccattcagaatttacagacatacaaagagaagaagtttgtagatattagcaaagaggatttggaattgggtgatgaagatgaggacaaggagaaagaaagcaagcaggagtatactcttctatgcgactggataaagcagcagcttggcgataaagtcgccaaggtccagatctcgaagcgactcagctcttctccatgtgttcttgtttctggtaaatttggctggtcagccaacatggaaaggctcatgaaggcacagacccttggtgacacatcaagcctggagttcatgagaggtagacgaatttttgagatcaaccctgaccatcctatcatcaaggacctgaacgctgcttgcaaaaacgagcctgaaagtactgaagccaagagggcggcagagttgctatacgaggctgcgctgatctccagtgggtatactcctgacagtccagcggagctgggaggcaagatctacgagatgatgaccatggccctcggcgggagatgggggaggttggagacagaggaggctgaagtcatcgccagcatcgacgacgcggactcgtctgaaggtgccacgaccacgacagaggtagtcgagccctctgaggtcaggacagagagcgacccgtggaaggattagatagttctgtatgcaaggattatgccctggtgtggtgtatgagcactggatgtaacgaaagtacgaaccagagccaggatagaggaatgcagcgtttgataagaacactggtgttaaaagtgtagatctctggtttgggttgtgctgataaatttttgtaggctataaccatccaatgaaaaatgccctctgcgctttcgtgca

SEQ ID NO: 219474 - DNA, 2839 bp, Zea Mays
gaaaatcctctccggtgtcctgtcctctccccttatccgccaccagcaaggccaaaacccgacacgccttctcaccccaaatccatggcgccaccgggctaaaaaccccaaccgccggtccgccctcgctccatggcgctctccgagctcccgctccaccactccttccgcctctcgtcccgccccagcatccacagcctcctcccgctccgcctcctctcctcttcctcttcctcgtcctccgccgccgcggcttcggcctcctccccttcctccaccggtggcaatcgcgcggcccccagcaccggcgctccgtggctgcagaggtgggcgccctccgacccctcccgtcccgccccagctccggctcccatcccgtccccgaccacgtccatagaccgcatcgtccaccgcctccgcaacctcggcctcgcctccgacgaagacgacccctctgcctccgcctccgcctccgctgccacggccgccgcacccccggacggcaccgaacgcctcggcgacctgctccaccgcggctgggcgcggcccgaccaccagttcgcggccgcgggcttcgacgatgccgtcctcccgtgggagagagacgacgagaccacggggccggtgagggacgaggaggatgggaccaagaggagacgggtcaaggcgcccacgctggccgagctcaccatcgaggacggggagctgcgccggctgcgcaggttggggatgacgcttcgcgaccgcatcaccgtgcccaaggctggagtcaccacggccgtcacggagaagatccatgacgcctggaggaagtcggagctggtccggctcaagttccacgaggacctcgcgcacgacatgaagacagctcatgagctcgtagagcgacgcacaggcggattgatcatatggaggtctggaagtgtaatggtggtttaccgagggagcaattacaaaaggcctctgaaatctcaggctctaaatggtgcctcatcaccagtgaagggcgaagatggtgcattgttcatcccagatgcctccaaccctgttgagagtaatattcaggggacaggtctggctacacagtatgcaaacgtgtccctattgaactcacagaatactgaggacatgacggaggaagagctggagttcaaccagatgcttgatgagctgggtcctcgttttgtggattggtggggaactggtattttaccagtggatgccgacttgttgcctcaaacaatccctggttataaaacaccgtatagagttcttccgactggaatgcgttcgacccttaccaatgcagagctgactaacttgcgaaagttagcgaggaaccttccatgccattttgctctagggagaaaccggaaccatcaaggtctgtcagcagcaattgttaagctctgggagaagagcttggtggtgaaaatagctgtcaaacgtggaatacagaacacaaataataaaataatggcagaagaaataaagaatctaacagggggtaccttgcttcttcgaaataaattttatattgtaatatatcgtggaaaagacttcctcccaacatctgtggcagctgtgttggctgaaagagaggagttgacaaaggatatttacaatatggaggagcagagaagaagggttttgattacacaaccttcggatgatggcttagatggccatgctcttgctggtactcttgctgaatttcaggaggcccaagctcgttggggaagagaagtgactgctaaggagcaagaagaaatgaaagaagcttcttctagatcagaaaagcaaaagctttacaggaaactcgaacacaagctttctattgctcaggcaaaaatacatagagcagaacgcttactatcaaagattgaagcttctttggtacttgccgatccatgtgatgatcaagaaatgattacagatgaggaaaagtctgttttccgtaggattggtttacggcttaaggcatatttgccacttggagttcgtggtgtttttgatggtgtaattgaaaatatgcacttgcattggaagcacagggaagttgttaaactaatttcaaagcagaagaccttgtcattcgttgaagagacggcacggcttcttgcatatgagagtggtggtatactagttgcaattgaaagagttccaaagggttatgcactcattttttaccgtgggaagaactataggagacctattaacataaggccaagaaacctcttaacaaaagctaaggcattgaagcgtgcggttgctatgcaacgccatgaggcccttagtcagcatatagatcaactggaaagcaatataaagcagatgaagttggatttgttgaggactatgaggaacaagatgaggatagctcagattcagaaaatgaatatgacaacgcagtcacctctgttagctatgatgaggatcaagacgattttgacgaatcagctgatgaagatgaatatgatgattacgacgatgaagatgacgagattgacagctagtggtttggaattgtttcttgtgatgtgccgctctgaattagtgattctctggacgttgtacttctgtctctgggacatttcgtggtacgagaaaacaaagttgcttcttgtgttcactagtccttttctattagttaacctcaagggctcaaggtttagtttccaactttccaagttgttccaaccagttccatctcgcgaaggacagtgagacggaggaatggatgttgcaaatcttggccccctagattaatttagtattgctcccaagaagaccattatgcgactgggctactggtaaccactaaccacgtaggagaggc

SEQ ID NO: 219475 - DNA, 2929 bp, Zea Mays
caaaactgcaattgtcattagaatgtaaataattttacacacacatacacggaccgaagaaggggaaaaaaagaaaaagaaaagaggaaaatcctctccggtgtcctgtcctctccccttatccgccaccagcaaggccaaaacccgacacgccttctcaccccaaatccatggcgccaccgggctaaaaaccccaaccgccggtccgccctcgctccatggcgctctccgagctcccgctccaccactccttccgcctctcgtcccgccccagcatccacagcctcctcccgctccgcctcctctcctcttcctcttcctcgtcctccgccgccgcggcttcggcctcctccccttcctccaccggtggcaatcgcgcggcccccagcaccggcgctccgtggctgcagaggtgggcgccctccgacccctcccgtcccgccccagctccggctcccatcccgtccccgaccacgtccatagaccgcatcgtccaccgcctccgcaacctcggcctcgcctccgacgaagacgacccctctgcctccgcctccgcctccgctgccacggccgccgcacccccggacggcaccgaacgcctcggcgacctgctccaccgcggctgggcgcggcccgaccaccagttcgcggccgcgggcttcgacgatgccgtcctcccgtgggagagagacgacgagaccacggggccggtgagggacgaggaggatgggaccaagaggagacgggtcaaggcgcccacgctggccgagctcaccatcgaggacggggagctgcgccggctgcgcaggttggggatgacgcttcgcgaccgcatcaccgtgcccaaggctggagtcaccacggccgtcacggagaagatccatgacgcctggaggaagtcggagctggtccggctcaagttccacgaggacctcgcgcacgacatgaagacagctcatgagctcgtagagcgacgcacaggcggattgatcatatggaggtctggaagtgtaatggtggtttaccgagggagcaattacaaaaggcctctgaaatctcaggctctaaatggtgcctcatcaccagtgaagggcgaagatggtgcattgttcatcccagatgcctccaaccctgttgagagtaatattcaggggacaggtctggctacacagtatgcaaacgtgtccctattgaactcacagaatactgaggacatgacggaggaagagctggagttcaaccagatgcttgatgagctgggtcctcgttttgtggattggtggggaactggtattttaccagtggatgccgacttgttgcctcaaacaatccctggttataaaacaccgtatagagttcttccgactggaatgcgttcgacccttaccaatgcagagctgactaacttgcgaaagttagcgaggaaccttccatgccattttgctctagggagaaaccggaaccatcaaggtctgtcagcagcaattgttaagctctgggagaagagcttggtggtgaaaatagctgtcaaacgtggaatacagaacacaaataataaaataatggcagaagaaataaagaatctaacagggggtaccttgcttcttcgaaataaattttatattgtaatatatcgtggaaaagacttcctcccaacatctgtggcagctgtgttggctgaaagagaggagttgacaaaggatatttacaatatggaggagcagagaagaagggttttgattacacaaccttcggatgatggcttagatggccatgctcttgctggtactcttgctgaatttcaggaggcccaagctcgttggggaagagaagtgactgctaaggagcaagaagaaatgaaagaagcttcttctagatcagaaaagcaaaagctttacaggaaactcgaacacaagctttctattgctcaggcaaaaatacatagagcagaacgcttactatcaaagattgaagcttctttggtacttgccgatccatgtgatgatcaagaaatgattacagatgaggaaaagtctgttttccgtaggattggtttacggcttaaggcatatttgccacttggagttcgtggtgtttttgatggtgtaattgaaaatatgcacttgcattggaagcacagggaagttgttaaactaatttcaaagcagaagaccttgtcattcgttgaagagacggcacggcttcttgcatatgagagtggtggtatactagttgcaattgaaagagttccaaagggttatgcactcattttttaccgtgggaagaactataggagacctattaacataaggccaagaaacctcttaacaaaagctaaggcattgaagcgtgcggttgctatgcaacgccatgaggcccttagtcagcatatagatcaactggaaagcaatataaagcagatgaagttggatttgggtattgaggactatgaggaacaagatgaggatagctcagattcagaaaatgaatatgacaacgcagtcacctctgttagctatgatgaggatcaagacgattttgacgaatcagctgatgaagatgaatatgatgattacgacgatgaagatgacgagattgacagctagtggtttggaattgtttcttgtgatgtgccgctctgaattagtgattctctggacgttgtacttctgtctctgggacatttcgtggtacgagaaaacaaagttgcttcttgtgttcactagtccttttctattagttaacctcaagggctcaaggtttagtttccaactttccaagttgttccaaccagttccatctcgcgaaggacagtgagacggaggaatggatgttgcaaatcttggccccctagattaatttagtattgctcccaagaagaccattatgcgactgggctactggtaaccactaaccacgtaggagaggc

SEQ ID NO: 219476 - DNA, 1144 bp, Zea Mays
ctatggcctcgccgcgggggaccctacaccgtgctccccatcgcctccgtcctctccgtccaccctttccccaatctggaccgcgctgcctgggcctaggcgcaccaccccgggtagagatcttgtgggcgtcgctgctcctcgccaccaccgggacgttcttcctggctagcgctccaatttgtgcctgcttgggacgacgagatgctctaatttctgctttctgatctttttccagattgaaggatttacctgaagggaattatggatcggattgataggtagttgtggaatttcttgaggtagcagtcagctgcatcgtcttcctcgaaggcttatattctcctcatgagagtgctcttcatttgagttggttcagtcaagaattttttgtgccatcaaagaagtagctcatcatggcttgcattagggaacctgcttccattttgcttttttatgaaggatttgagaattgtgcaacagcagtttcagggaagccatttgtgtcatcagatcataagggcagactttgggatagtgccattgtttcgggatagtgccattgtttctggatgagccaaacatgtactcatacttcgggatagtgccattgttttcctacagtgaaggaagcatcatggggacttgcttgatatgctgatattgttcaggtgctatttgcaacggcattctaccagtccctcaagatcaacacaacccatcatgacccaacttctcaagctgaagatattgagagagaaatgctaataagttccttcggtttcttctcttcaatctctctgtgctaaagacattacattctaattctacctgattgaagaagagctgacaattgaggtaccatgtgtatcatatttaactcatgagtcacaaggatcatttttgttagcaatctgttctacaacattcatcagagaaggatgaaaagatattgattgataatgtgtttttcatacttgagtgttggatccaactgtgcttgaacatcagtacagagattgtgtagaaattatttggtacatttgagtttgaaatacagtgaactggaggtaactccaccctaaacttctggagcagcgttacttcatgtggaccaaacattccatgtatttgattactttct

SEQ ID NO: 219477 - DNA, 1233 bp, Zea Mays
ctatggcctcgccgcgggggaccctacaccgtgctccccatcgcctccgtcctctccgtccaccctttccccaatctggaccgcgctgcctgggcctaggcgcaccaccccgggtagagatcttgtgggcgtcgctgctcctcgccaccaccgggacgttcttcctggctagcgctccaatttgtgcctgcttgggacgacgagatgctctaatttctgctttctgatctttttccagattgaaggatttacctgaagggaattatggatcggattgataggtagttgtggaatttcttgaggtagcagtcagctgcatcgtcttcctcgaaggcttatattctcctcatgagagtgctcttcatttgagttggttcagtcaagaattttttgtgccatcaaagaagtagctcatcatggcttgcattagggaacctgcttccattttgcttttttatgaaggatttgagaattgtgcaacagcagtttcagggaagccatttgtgtcatcagactttgggatagtgccattgtttcgggatagtgccattgtttctggatgagccaaacatgtactcatacttcgggatagtgccattgttttcctacagtgaaggaagcatcatggggacttgcttgatatgctgatattgttcaggtgctatttgcaacggcattctaccagtccctcaagatcaacacaacccatcatgacccaacttctcaagctgaagatattgagagagaaatgctaataagttccttcggtttcttctcttcaatctctctgtgctaaagacatttcccaacatcttcgctctctctacgttccagtgccaaagacatttcccaacatctttgctctctctacgttcctccacgaaaggcacttcatgggataccaaacattctaattctacctgattgaagaagagctgacaattgaggtaccatgtgtatcatatttaactcatgagtcacaaggatcatttttgttagcaatctgttctacaacattcatcagagaaggatgaaaagatattgattgataatgtgtttttcatacttgagtgttggatccaactgtgcttgaacatcagtacagagattgtgtagaaattatttggtacatttgagtttgaaatacagtgaactggaggtaactccaccctaaacttctggagcagcgttacttcatgtggaccaaacattccatgtatttgattactttct

SEQ ID NO: 219478 - DNA, 459 bp, Zea Mays
gctaccgcagccacaccccaacatcaaaaccctcccatctcttcccctccgccgccgtctctgctctcaagatcgccatggcgtcagaaaagaagcagtcgaacccgatgcgggagatcaaggtgcagaagctcgtgctcaatatctccgttggagagagtggagatcgactcacccgcgccgccaaggtgttggagcagttgagtgggcagtctccggttttctccaaggcaaggtatactgtgaggtctttcggtattcgtcgtaatgagaagattgcatgctacgttacggtcaggggtgagaaggcaatgcagcttcttgagagtggcctcaaggtgaaggagtatgagcttctgaggaggaacttcagtgatactggctgctttggttttggtattcaggagcacattgatcttggaatcaagtcatgccttgtatgcctacttagctgtgagc

SEQ ID NO: 219479 - DNA, 2079 bp, Zea Mays
ctccccatctcttcactccaaatctaccgaggccaccgcttgggcctatgggaacccctcgcgagttatttgctattatagtactgatttcaataggcttctctcttttagtactttcattttagtcttttctgtaatagtatctacaagttgattcatccttcaaaatagtattctaaccattttcaatcatttttattttctttttttatttctcagaacataagttgaccctatcattaccctcgcagctatacaaataatagaaacacaaataatccaggcagagacgcaggagtgcagacgatgagcaacactgctatcttctgtctggtggttcagaccgtagcaaagggtggcagttggccgcacggtcaccatccagcagcaccggcgtgctgctgcaatgtttttttgtgtgccgtcggtgcgatgctgaatgcgagaagagagaggagtcgagccgacgatggggagcaaggagagaataaaatagagagatgcaatatggtcaatggtgagaaataaaaaaggaaatgattaaaaaaggttggagtactattttaaaggatgaatcaacttataaatattattacagagaagatcaaattgagagtactaaaggagagaagccccacaaaatcaatattataatagcaaaaaactcacccctcgcgccgtcattagctcaggcgacttctcgtgcgcgcatagccctgacagcagccacttccatggtgcaaccgctcatcgttggaggatctacagcttgatatatctgggagatgcatacctgactacatattgccaactaccttagctaagaaacttacctcatcttccatcaagactattgaggaatattgtcaagaattaacttccttggacctttgaaacttgaataggctgcgtgactaagcaatgaggtatcttcatggttgtaggctaataaggaaactaaagcttcaaagaaacacattctgacaccatgatatggatcggggacagcatcgcagcaaacctgaggcgactcctttgaatcagcgctttgcctctttatgccccctttcgctttcggtgcgtaagggcagcaaggctttagctgcggcagatccaccggcggcgccccgagaatcgaagatgccggtgaaggtgttcggatcgccgacgtcggcggaggtcgcccgcgtcctggcctgcctgttcgagaaggacgtcgagttccagctcatccgcgtcgactccttccgcggcaccaagcgcctgccccagtacctcaagctccagccgcacggcgaggcgctcaccttcgaggacggcaacgtcaccctcgtcgagtcgaggaagatcctgcgccacatcgccgacaagtacaagaaccaggggtacagggacctgttcggcccgggcgcgctggagcgggcctccatcgagcagtggctgcagacggaggcgcagagcttcgacgtccccagcgccgacatggtctacagcctcgcctacctgccgcccgacatgcagctcgacggcaggggcgtcggcggcctcccggcggcgacggggacgatgaacccggcgcaccggcagaaggtggaggagatgctgcagctgttcgagaagagccgcaggcagctgggcaagctgctggacatctacgagcagcgccttggcgaggaggccttcctggccggaggcaagttcacgctcgccgacctgtcccacctgcccaacgccgaccgcctcgccggcgacccgcggtccgcacgcctcatggagtcgcgcaggaacgtcagcaagtggtgggacaccgtatcccgccgcgactcttgggtcagggtcaaggagttgcagcgcccgccgtccgcggaggcgcccttctgatgtcgatcgatcgcaaattaaggcggtggcctttgctcaagcctacgtgttcggtttctgcataattttttaataaataaacgccactggcccctctacgtcattggcgattgttcattgtgtaataaatcgttcaagagcatatgatgcttcttgccgtgagattgaactcgtcgcctccatgcttctctattgagc

SEQ ID NO: 219480 - DNA, 2308 bp, Zea Mays
cctccccatctcttcactccaaatctaccgaggccaccgcttgggcctatgggaacccctcgcgagttatttgctattatagtactgatttcaataggcttctctcttttagtactttcattttagtcttttctgtaatagtatctacaagttgattcatccttcaaaatagtattctaaccattttcaatcatttttattttctttttttatttctcagaacataagttgaccctatcattaccctcgcagctatacaaataatagaaacacaaataatccaggcagagacgcaggagtgcagacgatgagcaacactgctatcttctgtctggtggttcagaccgtagcaaagggtggcagttggccgcacggtcaccatccagcagcaccggcgtgctgctgcaatgtttttttgtgtgccgtcggtgcgatgctgaatgcgagaagagagaggagtcgagccgacgatggggagcaaggagagaataaaatagagagatgcaatatggtcaatggtgagaaataaaaaaggaaatgattaaaaaaggttggagtactattttaaaggatgaatcaacttataaatattattacagagaagatcaaattgagagtactaaaggagagaagccccacaaaatcaatattataatagcaaaaaactcacccctcgcgccgtcattagctcaggcgacttctcgtgcgcgcatagccctgacagcagccacttccatggtgcaaccgctcatcgttggaggatctacagcttgatatatctgggagatgcatacctgactacatattgccaactaccttagctaagaaacttacctcatcttccatcaagactattgaggaatattgtcaagaattaacttccttggacctttgaaacttgaataggctgcgtgactaagcaatgaggtatcttcatggttgtaggctaataaggaaactaaagcttcaaagaaacacattctggtattgccccacttcccctgtttttttattggtccaagttttaatacctctttgctaagcagaaataggcgacaaatttttaatgtgtatcattgcatattattgttttccatactcagatgcataatgattgtcatgcatgtattatttagcttctttctagtgtccttaccattttacatagggatgaaaatgggtacctattcggataccagtttttggtcttttttctttgataatgcataaatatgatatagaatctactatgcaaattaatattcttgtttttaacaccgagcttgtaaatctatactactatattaaggctataagggtagcctgcctcctcctggttctgcctcccgtaaatccccaccgtccgtctccctctcccgcggttggctcctgaaatgggttaggacaactcggtgtagaactctagatcgttggctgggcttgggagacaatactcatgccaagctgctagttctgctctttttggttgtgtcgttgtgcagccaggataaatccgtgcagaggcgcagtgtaagagttgtaggggattgatttgtaatgtggagagagctgttagagtggtagcctttattttcgttgggactcctcagtttctctccaagtaaaatatgaaatcatgtctctgtcctacttctgttgcatatctatctccaaggcagattccacagaccacagtgacttcttatttcctcctgtactctcagcttctaacaagttaggttgtaaggcttacgtcttcgatgttaggtctgtgaactttccagacatcgttgccacgttaagattccacatatttatatgaccaaccaacgaagtcacaagaacagatcctaaagtaataactgccacaaaatgaatcttcttataggatatataaagaattttaattgacctaaattatttgatttctctgttgaaatatattgagtttatatatggattacatttagtatttctgcagcacaaatttttacatgtactgctttgcagaaccaaaaggatcatgaagctataatcaaacaactaaaccttgctaggtgagccagacagttactggaaatcagtgctcatcaatgcatgcagacttgtaaagtattatgatggtctgcccatggaatgttttgtaatttacctataagtgtttttagaagtgcttgacaccagttatgccaactacctagcacacctaggtggggtagacagatgtttctaagcagtgattctgttatgaccggcatgcagtacaaaaggaaacagcaggccagggggcatgcggcaggagaaggag

SEQ ID NO: 219481 - DNA, 1284 bp, Zea Mays
ctcctccccatctcttcactccaaatctaccgaggccaccgcttgggcctatgggaacccctcgcgagttatttgctattatagtactgatttcaataggcttctctcttttagtactttcattttagtcttttctgtaatagtatctacaagttgattcatccttcaaaatagtattctaaccattttcaatcatttttattttctttttttatttctcagaacataagttgaccctatcattaccctcgcagctatacaaataatagaaacacaaataatccaggcagagacgcaggagtgcagacgatgagcaacactgctatcttctgtctggtggttcagaccgtagcaaagggtggcagttggccgcacggtcaccatccagcagcaccggcgtgctgctgcaatgtttttttgtgtgccgtcggtgcgatgctgaatgcgagaagagagaggagtcgagccgacgatggggagcaaggagagaataaaatagagagatgcaatatggtcaatggtgagaaataaaaaaggaaatgattaaaaaaggttggagtactattttaaaggatgaatcaacttataaatattattacagagaagatcaaattgagagtactaaaggagagaagccccacaaaatcaatattataatagcaaaaaactcacccctcgcgccgtcattagctcaggcgacttctcgtgcgcgcatagccctgacagcagccacttccatggtgcaaccgctcatcgttggaggatctacagcttgatatatctgggagatgcatacctgactacatattgccaactaccttagctaagaaacttacctcatcttccatcaagactattgaggaatattgtcaagaattaacttccttggacctttgaaacttgaataggctgcgtgactaagcaatgaggtatcttcatggttgtaggctaataaggaaactaaagcttcaaagaaacacattctgaaccaaaaggatcatgaagctataatcaaacaactaaaccttgctaggtgagccagacagttactggaaatcagtgctcatcaatgcatgcagacttgtaaagtattatgatggtctgcccatggaatgttttgtaatttacctataagtgtttttagaagtgcttgacaccagttatgccaactacctagcacacctaggtggggtagacagatgtttctaagcagtgattctgttatgaccggcatgcagtacaaaaggaaacagcaggccagggggcatgcggcaggagaaggag

SEQ ID NO: 219482 - DNA, 1766 bp, Zea Mays
aaccgcttcaccctttgtggcgtgcagcctcctcctctccccactctccccaatcaccatcaaaatgcgggtgggcgaggagcacctccagcaaggcggagatgtgcatgcagtccaccgccgaatctgcgacgtctcgagcggagctcaggcgacttctcgtgcgcgcatagccctgacagcagccacttccatggtgcaaccgctcatcgttggaggatctacagcttgatatatctgggagatgcatacctgactacatattgccaactaccttagctaagaaacttacctcatcttccatcaagactattgaggaatattgtcaagaattaacttccttggacctttgaaacttgaataggctgcgtgactaagcaatgaggtatcttcatggttgtaggctaataaggaaactaaagcttcaaagaaacacattctggtattgccccacttcccctgtttttttattggtccaagttttaatacctctttgctaagcagaaataggcgacaaatttttaatgtgtatcattgcatattattgttttccatactcagatgcataatgattgtcatgcatgtattatttagcttctttctagtgtccttaccattttacatagggatgaaaatgggtacctattcggataccagtttttggtcttttttctttgataatgcataaatatgatatagaatctactatgcaaattaatattcttgtttttaacaccgagcttgtaaatctatactactatattaaggctataagggtagcctgcctcctcctggttctgcctcccgtaaatccccaccgtccgtctccctctcccgcggttggctcctgaaatgggttaggacaactcggtgtagaactctagatcgttggctgggcttgggagacaatactcatgccaagctgctagttctgctctttttggttgtgtcgttgtgcagccaggataaatccgtgcagaggcgcagtgtaagagttgtaggggattgatttgtaatgtggagagagctgttagagtggtagcctttattttcgttgggactcctcagtttctctccaagtaaaatatgaaatcatgtctctgtcctacttctgttgcatatctatctccaaggcagattccacagaccacagtgacttcttatttcctcctgtactctcagcttctaacaagttaggttgtaaggcttacgtcttcgatgttaggtctgtgaactttccagacatcgttgccacgttaagattccacatatttatatgaccaaccaacgaagtcacaagaacagatcctaaagtaataactgccacaaaatgaatcttcttataggatatataaagaattttaattgacctaaattatttgatttctctgttgaaatatattgagtttatatatggattacatttagtatttctgcagcacaaatttttacatgtactgctttgcagaaccaaaaggatcatgaagctataatcaaacaactaaaccttgctaggtgagccagacagttactggaaatcagtgctcatcaatgcatgcagacttgtaaagtattatgatggtctgcccatggaatgttttgtaatttacctataagtgtttttagaagtgcttgacaccagttatgccaactacctagcacacctaggtggggtagacagatgtttctaagcagtgattctgttatgaccggcatgcagtacaaaaggaaacagcaggccagggggcatgcggcaggagaaggag

SEQ ID NO: 219483 - DNA, 2585 bp, Zea Mays
gctcggaccggatgaatggatgactcctgcagtcagccacttcccttcgtcgctcgtcggcatggcgccacgcctctcacagccacctgaggcactgaggcagcgacccctcccccttgcggccttgcctcctccagaatcgcagacagcttccgccgaatgaatcgtccacttgtccgtagaattgtgcgatcctccggcggctaccaatgttacggtgctctcagtcttatgtttgggctgccactcgcctgtcgccattgcccatcaccatctgtatgatgggtgggtccgtcagtggcccgatcgcaacgtccaacctatcagcgctccttcatggatcatggattcagcggttgacacccagggttgattcttcgcagatccaatgagtggcatgtacaattctccgaaggaagcctcgcggcgtcttcaaaaatgttgagacaagatgagagggataggatttgtgactcaagatgatgttctctttgcccatcttactgtgaaggagacattgacttacgcggcactactccgtctcccaagaacaatgacacagcaacaaaagaaagagcgagcgatggacatcatacatgagcttggccttgaaaggtgccaggacacaatgattggaggatcgtttgtacgtggggtttcagggggtgaaaggaaaagagtttgcattggaaatgagattttaatcaatccatctttactgtttctggatgagccaacatctgggctggattcaactacagctctaaggatcgttcagcttctccatgacatagctgaggatgggaagacggtaatcaccacaattcaccaaccatctagcaggctgtttcataagtttgacaagcttattctcctgggcaaaggaagtttgctatactttgggaaggcatctgaagccatgccatacttccagtccattggatgcgccccacttattgcaatgaaccctgcagagtttctactggatctcgccaatggcaacactaccgatgtctcagtcccttcagaattagatgacaaggtgcatatggaaaatcacaatttggagaacaataattccaagattgactacaggccatcagcacaagatgttcatgagtatttggtagatgcctatgagactcgagtggcttttaaggagaagaagaagcttctagcaccactgcctatcagtgatgatctgaaggcaactataacatcatcgaagcgagagtggggcacatcctggtggcagcaatattccatcctcttttgtagagggatcaaggaacgacgacatgattacctgagttggatgagaatcacccaggtcatagctacatcggttatcttaggtttactgtggtggcactctgatcccagcacactaaaaggtctagaggatcaggctggcctgctgtttttcatcgctgtgttttggggcttctttccagtgtttactgcaatctttacattccctcaagagagggcaatgctgaacaaagagcgcgcagtcgacatgtacaagctcagtgcatacttcttggccaggacgacgagtgatctaccacttgaccttttcctcccaatcatattcatggtgatcgtgtacttcatggcaggcctcaaagcaactgccacacatttctttctcagcatgttgaccgtctttctcagcataattgctgctcagggactcggattggcaattggagctactctgttggacatcaagaaggcgacaactctagcttcagttacagtcatgacattcatgctagcaggaggcttctttgtaaagagcgttccaccattcatctcctggctgcgctacctgtccttcaactaccacacgtacaggctcctgctgaaggtgcagtacgaccccgtgccggacatcctgaccaccacgaggcacatggacagcggtggcaccgaggtggcagctctcgtcgccatggtcatcgggtaccgggtgctggcctacctgtccctgagaagggcgaaggccctgggcagctagcgcatcccttcaccgcagtgactgaagcctgagctcgtggagcgggttgggtcattgggtgtgtagggaagtttgtgctatattgcgctgtgaaaagatggaagtctttttttttaacttttctgtctttttcaactaagttctgagcaagtaccaacactgaagaacaaggatctgtagcgagtgtaccagagacaagctgtgctgtaatttttccttcacaacgattgcgtggttaaagtgattgagtataagcgtgagtttagattgccggcatattcttaggatgggtagctctaggacaaattctgttcatactcccaagaacgcgtacatttcatcaatgacattatacgagttcttcgcgatggacagaagcacaggatgaaggcctgatgtcccataggtcagagggaaggtatgatcagtgtttgattcatctacatcacccttatacggtcccatttctgcaatgttcatatgttctaaaattctgggctccatcgatctttccaatctgtgactaaagctcttcttttttttaactgctattaaggtaaac

SEQ ID NO: 219484 - DNA, 2665 bp, Zea Mays
gctcggaccggatgaatggatgactcctgcagtcagccacttcccttcgtcgctcgtcggcatggcgccacgcctctcacagccacctgaggcactgaggcagcgacccctcccccttgcggccttgcctcctccagaatcgcagacagcttccgccgaatgaatcgtccacttgtccgtagaattgtgcgatcctccggcggctaccaatgttacggtgctctcagtcttatgtttgggctgccactcgcctgtcgccattgcccatcaccatctgtatgatgggtgggtccgtcagtggcccgatcgcaacgtccaacctatcagcgctccttcatggatcatggattcagcggttgacacccagggttgattcttcgcagatccaatgagtaagagccactaatcagtgttctcctgattaccagagcagcgtgttgaacgttgccaatcctcgcgtggccgcgtgcctgcaacctgttcgacagatctccgtagccggctctggttagaggctgagccctcgcgcctgttaaaacgataggatttgtgactcaagatgatgttctctttgcccatcttactgtgaaggagacattgacttacgcggcactactccgtctcccaagaacaatgacacagcaacaaaagaaagagcgagcgatggacatcatacatgagcttggccttgaaaggtgccaggacacaatgattggaggatcgtttgtacgtggggtttcagggggtgaaaggaaaagagtttgcattggaaatgagattttaatcaatccatctttactgtttctggatgagccaacatctgggctggattcaactacagctctaaggatcgttcagcttctccatgacatagctgaggatgggaagacggtaatcaccacaattcaccaaccatctagcaggctgtttcataagtttgacaagcttattctcctgggcaaaggaagtttgctatactttgggaaggcatctgaagccatgccatacttccagtccattggatgcgccccacttattgcaatgaaccctgcagagtttctactggatctcgccaatggcaacactaccgatgtctcagtcccttcagaattagatgacaaggtgcatatggaaaatcacaatttggagaacaataattccaagattgactacaggccatcagcacaagatgttcatgagtatttggtagatgcctatgagactcgagtggcttttaaggagaagaagaagcttctagcaccactgcctatcagtgatgatctgaaggcaactataacatcatcgaagcgagagtggggcacatcctggtggcagcaatattccatcctcttttgtagagggatcaaggaacgacgacatgattacctgagttggatgagaatcacccaggtcatagctacatcggttatcttaggtttactgtggtggcactctgatcccagcacactaaaaggtctagaggatcaggctggcctgctgtttttcatcgctgtgttttggggcttctttccagtgtttactgcaatctttacattccctcaagagagggcaatgctgaacaaagagcgcgcagtcgacatgtacaagctcagtgcatacttcttggccaggacgacgagtgatctaccacttgaccttttcctcccaatcatattcatggtgatcgtgtacttcatggcaggcctcaaagcaactgccacacatttctttctcagcatgttgaccgtctttctcagcataattgctgctcagggactcggattggcaattggagctactctgttggacatcaagaaggcgacaactctagcttcagttacagtcatgacattcatgctagcaggaggcttctttgtaaagagcgttccaccattcatctcctggctgcgctacctgtccttcaactaccacacgtacaggctcctgctgaaggtgcagtacgaccccgtgccggacatcctgaccaccacgaggcacatggacagcggtggcaccgaggtggcagctctcgtcgccatggtcatcgggtaccgggtgctggcctacctgtccctgagaagggcgaaggccctgggcagctagcgcatcccttcaccgcagtgactgaagcctgagctcgtggagcgggttgggtcattgggtgtgtagggaagtttgtgctatattgcgctgtgaaaagatggaagtctttttttttaacttttctgtctttttcaactaagttctgagcaagtaccaacactgaagaacaaggatctgtagcgagtgtaccagagacaagctgtgctgtaatttttccttcacaacgattgcgtggttaaagtgattgagtataagcgtgagtttagattgccggcatattcttaggatgggtagctctaggacaaattctgttcatactcccaagaacgcgtacatttcatcaatgacattatacgagttcttcgcgatggacagaagcacaggatgaaggcctgatgtcccataggtcagagggaaggtatgatcagtgtttgattcatctacatcacccttatacggtcccatttctgcaatgttcatatgttctaaaattctgggctccatcgatctttccaatctgtgactaaagctcttcttttttttaactgctattaaggtaaac

SEQ ID NO: 219485 - DNA, 2774 bp, Zea Mays
gctcggaccggatgaatggatgactcctgcagtcagccacttcccttcgtcgctcgtcggcatggcgccacgcctctcacagccacctgaggcactgaggcagcgacccctcccccttgcggccttgcctcctccagaatcgcagacagcttccgccgaatgaatcgtccacttgtccgtagaattgtgcgatcctccggcggctaccaatgttacggtgctctcagtcttatgtttgggctgccactcgcctgtcgccattgcccatcaccatctgtatgatgggtgggtccgtcagtggcccgatcgcaacgtccaacctatcagcgctccttcatggatcatggattcagcggttgacacccagggttgattcttcgcagatccaatgagtaagagccactaatcagtgttctcctgattaccagagcagcgtgttgaacgttgccaatcctcgcgtggccgcgtgcctgcaacctgttcgacagatctccgtagccggctctggttagaggctgagccctcgcgcctgttaaaacggtccttgcttggggagacaccaagaaaggacatcattttagtagatccactaattgttaactactccatagtttatttttgcaacttctggttggacaaattaataaggataggatttgtgactcaagatgatgttctctttgcccatcttactgtgaaggagacattgacttacgcggcactactccgtctcccaagaacaatgacacagcaacaaaagaaagagcgagcgatggacatcatacatgagcttggccttgaaaggtgccaggacacaatgattggaggatcgtttgtacgtggggtttcagggggtgaaaggaaaagagtttgcattggaaatgagattttaatcaatccatctttactgtttctggatgagccaacatctgggctggattcaactacagctctaaggatcgttcagcttctccatgacatagctgaggatgggaagacggtaatcaccacaattcaccaaccatctagcaggctgtttcataagtttgacaagcttattctcctgggcaaaggaagtttgctatactttgggaaggcatctgaagccatgccatacttccagtccattggatgcgccccacttattgcaatgaaccctgcagagtttctactggatctcgccaatggcaacactaccgatgtctcagtcccttcagaattagatgacaaggtgcatatggaaaatcacaatttggagaacaataattccaagattgactacaggccatcagcacaagatgttcatgagtatttggtagatgcctatgagactcgagtggcttttaaggagaagaagaagcttctagcaccactgcctatcagtgatgatctgaaggcaactataacatcatcgaagcgagagtggggcacatcctggtggcagcaatattccatcctcttttgtagagggatcaaggaacgacgacatgattacctgagttggatgagaatcacccaggtcatagctacatcggttatcttaggtttactgtggtggcactctgatcccagcacactaaaaggtctagaggatcaggctggcctgctgtttttcatcgctgtgttttggggcttctttccagtgtttactgcaatctttacattccctcaagagagggcaatgctgaacaaagagcgcgcagtcgacatgtacaagctcagtgcatacttcttggccaggacgacgagtgatctaccacttgaccttttcctcccaatcatattcatggtgatcgtgtacttcatggcaggcctcaaagcaactgccacacatttctttctcagcatgttgaccgtctttctcagcataattgctgctcagggactcggattggcaattggagctactctgttggacatcaagaaggcgacaactctagcttcagttacagtcatgacattcatgctagcaggaggcttctttgtaaagagcgttccaccattcatctcctggctgcgctacctgtccttcaactaccacacgtacaggctcctgctgaaggtgcagtacgaccccgtgccggacatcctgaccaccacgaggcacatggacagcggtggcaccgaggtggcagctctcgtcgccatggtcatcgggtaccgggtgctggcctacctgtccctgagaagggcgaaggccctgggcagctagcgcatcccttcaccgcagtgactgaagcctgagctcgtggagcgggttgggtcattgggtgtgtagggaagtttgtgctatattgcgctgtgaaaagatggaagtctttttttttaacttttctgtctttttcaactaagttctgagcaagtaccaacactgaagaacaaggatctgtagcgagtgtaccagagacaagctgtgctgtaatttttccttcacaacgattgcgtggttaaagtgattgagtataagcgtgagtttagattgccggcatattcttaggatgggtagctctaggacaaattctgttcatactcccaagaacgcgtacatttcatcaatgacattatacgagttcttcgcgatggacagaagcacaggatgaaggcctgatgtcccataggtcagagggaaggtatgatcagtgtttgattcatctacatcacccttatacggtcccatttctgcaatgttcatatgttctaaaattctgggctccatcgatctttccaatctgtgactaaagctcttcttttttttaactgctattaaggtaaac

SEQ ID NO: 219486 - DNA, 3800 bp, Zea Mays
agcacgtctccagccagctaggtaggcgaggtgacgatggagtcgacaatggagaagccggcggtgatggacgcggcgcgcggcggcggaggggtcgggcgggccaagtcggaccacctggcgccgtcgctgtcgctgagccggacggcgtcggcggagacggtgctgggcacggcggcggacgcggccaagcccgccgggttcgggaggaagcggcgctccgcgtcggtcggcggcggcaacaacaacagccacatccgcaagtcccggagcgcgcagctgaagctggacgtggaggacctcgtcagcagcggcgccgcgctcagccgcgcctccagcgccagcctcggcttctccttcaccttcaccggcttcaccccgccgctccagcacatgtgctccgccgacccgccttcattcagcgacgacgagaacccagtggacatcgaagccggcacacggcgcaagaaactggtgaccgagccgaccctgccgatatacctcaagcggaaaagcttcgtatctaagcggcggcgtgcgtggcagtttgcggaggtgaagtacagggtggcggggaagggctcgccgcgggagatactgggagggatatccgggtcggcgtcccccggcgaggtgctggcgctgatgggcccgtccggcagcggcaagacgacgctgctgagcatcctgggcgggagggccgccgccggcggcgccgtcgacggctgcatctcctacaacgacgagcccttcagcaagtccctcaagcgcagtcctctgagctctggcccagcagaaggactgggccaaaactttggtatactgggctatggtgtgagttcttgttttacggcccaagacgcttacacgggtctgctgttcatgggctataagcagcgtgttgaacgttgccaatcctcgcgtggccgcgtgcctgcaacctgttcgacagatctccgtagccggctctggttagaggctgagccctcgcgcctgttaaaacgtaagtctttgtgttcagatgtcaacgtcgctgaaaagtctgattctcggaaccatcattcctacagatcatgatgctcctcgtgagccttgtcactggttacaaggcgtcaaccggtcaagggctgcctccctgtctacttctgtccagtcgagtcgttctagctgtagctgttgataaggccctgatttactagtcttcactcttcagcagggtccttgcttggggagacaccaagaaaggacatcattttagtagatccactaattgttaactactccatagtttatttttgcaacttctggttggacaaattaataaggtaaaaccagcatagtttatttttgcaacttctggttggacaaattaataaggtaaaaccagcacgtaatttgcaatttgggacgcgagatgtaacatctcataattatcaggtggcatgtacaattctccgaaggaagcctcgcggcgtcttcaaaaatgttgagacaagatgagagggtaatgtgttatattgataaatgacatgaaacaattttggggccttttatgttctctgtagggtgttcaagttgaggcattgagagagtcaatggatgtgtcaagtttcttttctccaaaagggaatgaacctggaagtttgtggcaacacatagacaatctctcctttagataggatttgtgactcaagatgatgttctctttgcccatcttactgtgaaggagacattgacttacgcggcactactccgtctcccaagaacaatgacacagcaacaaaagaaagagcgagcgatggacatcatacatgagcttggccttgaaaggtgccaggacacaatgattggaggatcgtttgtacgtggggtttcagggggtgaaaggaaaagagtttgcattggaaatgagattttaatcaatccatctttactgtttctggatgagccaacatctgggctggattcaactacagctctaaggatcgttcagcttctccatgacatagctgaggatgggaagacggtaatcaccacaattcaccaaccatctagcaggctgtttcataagtttgacaagcttattctcctgggcaaaggaagtttgctatactttgggaaggcatctgaagccatgccatacttccagtccattggatgcgccccacttattgcaatgaaccctgcagagtttctactggatctcgccaatggcaacactaccgatgtctcagtcccttcagaattagatgacaaggtgcatatggaaaatcacaatttggagaacaataattccaagattgactacaggccatcagcacaagatgttcatgagtatttggtagatgcctatgagactcgagtggcttttaaggagaagaagaagcttctagcaccactgcctatcagtgatgatctgaaggcaactataacatcatcgaagcgagagtggggcacatcctggtggcagcaatattccatcctcttttgtagagggatcaaggaacgacgacatgattacctgagttggatgagaatcacccaggtcatagctacatcggttatcttaggtttactgtggtggcactctgatcccagcacactaaaaggtctagaggatcaggctggcctgctgtttttcatcgctgtgttttggggcttctttccagtgtttactgcaatctttacattccctcaagagagggcaatgctgaacaaagagcgcgcagtcgacatgtacaagctcagtgcatacttcttggccaggacgacgagtgatctaccacttgaccttttcctcccaatcatattcatggtgatcgtgtacttcatggcaggcctcaaagcaactgccacacatttctttctcagcatgttgaccgtctttctcagcataattgctgctcagggactcggattggcaattggagctactctgttggacatcaagaaggcgacaactctagcttcagttacagtcatgacattcatgctagcaggaggcttctttgtaaagagcgttccaccattcatctcctggctgcgctacctgtccttcaactaccacacgtacaggctcctgctgaaggtgcagtacgaccccgtgccggacatcctgaccaccacgaggcacatggacagcggtggcaccgaggtggcagctctcgtcgccatggtcatcgggtaccgggtgctggcctacctgtccctgagaagggcgaaggccctgggcagctagcgcatcccttcaccgcagtgactgaagcctgagctcgtggagcgggttgggtcattgggtgtgtagggaagtttgtgctatattgcgctgtgaaaagatggaagtctttttttttaacttttctgtctttttcaactaagttctgagcaagtaccaacactgaagaacaaggatctgtagcgagtgtaccagagacaagctgtgctgtaatttttccttcacaacgattgcgtggttaaagtgattgagtataagcgtgagtttagattgccggcatattcttaggatgggtagctctaggacaaattctgttcatactcccaagaacgcgtacatttcatcaatgacattatacgagttcttcgcgatggacagaagcacaggatgaaggcctgatgtcccataggtcagagggaaggtatgatcagtgtttgattcatctacatcacccttatacggtcccatttctgcaatgttcatatgttctaaaattctgggctccatcgatctttccaatctgtgactaaagctcttcttttttttaactgctattaaggtaaac

SEQ ID NO: 219487 - DNA, 2953 bp, Zea Mays
gcgcggcgggtccgtccgtcgctggcagacgtatatatcgcccgcccgtgtaacagctacagttttcctttagctgtatgtagccgtgcgcgcgcgagcacgtctccagccagctaggtaggcgaggtgacgatggagtcgacaatggagaagccggcggtgatggacgcggcgcgcggcggcggaggggtcgggcgggccaagtcggaccacctggcgccgtcgctgtcgctgagccggacggcgtcggcggagacggtgctgggcacggcggcggacgcggccaagcccgccgggttcgggaggaagcggcgctccgcgtcggtcggcggcggcaacaacaacagccacatccgcaagtcccggagcgcgcagctgaagctggacgtggaggacctcgtcagcagcggcgccgcgctcagccgcgcctccagcgccagcctcggcttctccttcaccttcaccggcttcaccccgccgctccagcacatgtgctccgccgacccgccttcattcagcgacgacgagaacctggacatcgaagccggcacacggcgcaagaaactggtgaccgagccgaccctgccgatatacctcaagtttgcggaggtgaagtacagggtggcggggaagggctcgccgcgggagatactgggagggatatccgggtcggcgtcccccggcgaggtgctggcgctgatgggcccgtccggcagcggcaagacgacgctgctgagcatcctgggcgggagggccgccgccggcggcgccgtcgacggctgcatctcctacaacgacgagcccttcagcaagtccctcaagcgcaggataggatttgtgactcaagatgatgttctctttgcccatcttactgtgaaggagacattgacttacgcggcactactccgtctcccaagaacaatgacacagcaacaaaagaaagagcgagcgatggacatcatacatgagcttggccttgaaaggtgccaggacacaatgattggaggatcgtttgtacgtggggtttcagggggtgaaaggaaaagagtttgcattggaaatgagattttaatcaatccatctttactgtttctggatgagccaacatctgggctggattcaactacagctctaaggatcgttcagcttctccatgacatagctgaggatgggaagacggtaatcaccacaattcaccaaccatctagcaggctgtttcataagtttgacaagcttattctcctgggcaaaggaagtttgctatactttgggaaggcatctgaagccatgccatacttccagtccattggatgcgccccacttattgcaatgaaccctgcagagtttctactggatctcgccaatggcaacactaccgatgtctcagtcccttcagaattagatgacaaggtgcatatggaaaatcacaatttggagaacaataattccaagattgactacaggccatcagcacaagatgttcatgagtatttggtagatgcctatgagactcgagtggcttttaaggagaagaagaagcttctagcaccactgcctatcagtgatgatctgaaggcaactataacatcatcgaagcgagagtggggcacatcctggtggcagcaatattccatcctcttttgtagagggatcaaggaacgacgacatgattacctgagttggatgagaatcacccaggtcatagctacatcggttatcttaggtttactgtggtggcactctgatcccagcacactaaaaggtctagaggatcaggctggcctgctgtttttcatcgctgtgttttggggcttctttccagtgtttactgcaatctttacattccctcaagagagggcaatgctgaacaaagagcgcgcagtcgacatgtacaagctcagtgcatacttcttggccaggacgacgagtgatctaccacttgaccttttcctcccaatcatattcatggtgatcgtgtacttcatggcaggcctcaaagcaactgccacacatttctttctcagcatgttgaccgtctttctcagcataattgctgctcagggactcggattggcaattggagctactctgttggacatcaagaaggcgacaactctagcttcagttacagtcatgacattcatgctagcaggaggcttctttgtaaagagcgttccaccattcatctcctggctgcgctacctgtccttcaactaccacacgtacaggctcctgctgaaggtgcagtacgaccccgtgccggacatcctgaccaccacgaggcacatggacagcggtggcaccgaggtggcagctctcgtcgccatggtcatcgggtaccgggtgctggcctacctgtccctgagaagggcgaaggccctgggcagctagcgcatcccttcaccgcagtgactgaagcctgagctcgtggagcgggttgggtcattgggtgtgtagggaagtttgtgctatattgcgctgtgaaaagatggaagtctttttttttaacttttctgtctttttcaactaagttctgagcaagtaccaacactgaagaacaaggatctgtagcgagtgtaccagagacaagctgtgctgtaatttttccttcacaacgattgcgtggttaaagtgattgagtataagcgtgagtttagattgccggcatattcttaggatgggtagctctaggacaaattctgttcatactcccaagaacgcgtacatttcatcaatgacattatacgagttcttcgcgatggacagaagcacaggatgaaggcctgatgtcccataggtcagagggaaggtatgatcagtgtttgattcatctacatcacccttatacggtcccatttctgcaatgttcatatgttctaaaattctgggctccatcgatctttccaatctgtgactaaagctcttcttttttttaactgctattaaggtaaac

SEQ ID NO: 219488 - DNA, 2042 bp, Zea Mays
atgcccgacaacacccaacccatgcagtacggtatcgaagaagaagaagtcccatacactgatgaacgcatcacgtcgttatgctcttcagttcagctacttttggagcaaggtggtaattttgtggtgtctgcgcccaacatggcccatttatgccaccgtttcactgtgggctgcttcgtagccacggcacaaatggtcacgcaggcccaacccgaattcatcgatctgggccacggcccagcgccatcaggattcgtgaatcaccgaatcaggagttcaggacaggaatcgtgctgcggatgctccgtccgtgcagtggaggccgcggcatgtcagtttggcttcactaccaagcctctggcctcaagcctgcctcggccttcagcccagccgtgcccagcaccttcggacgccaattcacaacttcgttgttccttccgcagctccgagctccggaatcgagcaaagcacccgagcctgcgccgcgtcaagccgtcaaagctcccccgcttcataccattccctcccccgatccctcgcctcagccctcagctccgcccctcggtttccgaagcgccaccgccgacgtggcctccctcggctccaatggcgttgccctacctggaggccgtgctttgctttatgattttcatgtacatatttgagacatatcttgacatccgtcagcatagagccctcaagctgccaactttgccaaaacccctgctgggagtaattagtgacgaaaagtttgaacgctctagagcttatagcctcgacaaaagctatttccattttgttcatgaggctgtgactattttaatggatactacaatactatactatagagttcttccctggttttggaagaaatctggagagttagttaccagtgttgggctgagtgctgagaatgagataatacacacccttgctttcttagctggttccatggtttggtcgcagattacagacttgccgttctctctctattcaacttttgttatagaggctcgacatggttttaacaagcaaactatatggctcttcattagggatatgatcaaaggaattttactatccatgatattggggccaccaatcgtggctgctatcatctacatagtacagcttcctgaaggagtcctcagggaaaaaatagagaagctggcagcttccctcaagtttcctttgaaaaagcttttcgtggtagatgggtctaccagatcaagccacagtaatgcctacatgtatggttttttcaagaacaagcgcatagtactctatgacacattgattcagcagtgtagcaatgaggatgagatagtttctgttatagcacatgaacttggacactggaaactcaatcatactgtctattcctttgtagctgtccagctgcttatgtttcttcaatttggaggatatactctagtaaggagctccaaagatctatttggaagttttggcttcaaggaccagccagtaataattggattgatcattttccagcacaccataatacccatccaacaccttctgagcttttgcctgaaccttgtcagcagagcatttgaatttcaggctgatgcctttgccaagaaccttggatatgcccctcagctccgagcagcccttgttaaactacaggaggagaacttgtctgcgatgaacaccgatccttggtattcggcatatcactactcccacccaccactcgtcgagaggctgcaagctcttgaagattcagacagcaaaaaagaagattagtcgatccttgtatgaggtttacatatggatttttccctgccacatgcacaccgattcagtgcttggatggtgagggttttgacataggagtgttgtcaaagctttagagtgcatctttcggtcaggtgtaacagcctttcggtcattgagacatataagcgaattagctattaaaaaaaacagaactgttgcatctttctgagttgtgcaattgttcacgtgtcacgtcacgtttcgagcagcagagagacgcctctgagcagcactca

SEQ ID NO: 219489 - DNA, 325 bp, Zea Mays
caccaatgggcaatggcctcgcgccttctcgctccccgcaccctatcctctcctctcagctcccttcccggctgcgagcaatgctcctacctggctacctccatgccgcgcgcggctgaaggagaaactgggcaacgagccgtcatacaagcagctggcgcaatcgctgcggataccagctcctgagctgcgagcgaggatgcgcgagtcgtttcttgcgagggagatgctggcgatgagcaacacccgtctggtgatatccattgcccagaagtacgacaacctcggcgtcgagctgccagaccttattcaggtgatggcataa

SEQ ID NO: 219490 - DNA, 502 bp, Zea Mays
caagaacatattttctgcatgtgctcggaagttctgatcatgggtgagcccatcaaagacaccagtccgctcgcgatcgccccgtgtgacgtcatactgaattcggctcatctgaagccgtcgtccagggcagcaaatttctgggcaacaaagccctagtcgtgtggccttagagactgccgcatcgcggataagtaattgtcgttgagcagagttctcgttggttaaagtccagtctagtaggaggcgcagagacccgtctgtatggtcgctgggagatctatcttgacctcctttttctgttctttttggtcttagttatcgtggttggattctatagcagccttgacaggcattcgaacaacaatgtttatggttatcctatccgctttggactcttaagcatgttttcccagtctttaaatattaagagatagtttggtaactatattttttcgagggattcatattttttcaaaggaaaataaactaatttctattg

SEQ ID NO: 219491 - DNA, 904 bp, Zea Mays
aaacccacaagaaacaagggtggtagattgccgtatctgtggtgatcctaactcagtgcttcgttttgcttttatcgagtttgctgatgacgttgctgcacaagcagcactagcacttggtggaaccgtgcttggcttttatcctgtcaaggttctgccatcaaagacagcaattttacctgtgaaccctaaatttcttcctcacactgatgatgagaaagaaatggtatccaggactgtgtattgtactaacattgacaagaagatcgcagaagatgaagtgaagcaattctttgagggaacatgtggtgaagtttctcgtctgaggctacttggtgattatgtgcactccacatgcatcgcttttgttgagtttgtccaagcagatagtgctattctcgctctgaactgcagtggcattgttcttggaacgcttcctgttagggtgagcccatcaaagacaccagtccgctcgcgatcgccccgtgtgacgtcatactgaattcggctcatctgaagccgtcgtccagggcagcaaatttctgggcaacaaagccctagtcgtgtggccttagagactgccgcatcgcggataagtaattgtcgttgagcagagttctcgttggttaaagtccagtctagtaggaggcgcagagacccgtctgtatggtcgctgggagatctatcttgacctcctttttctgttctttttggtcttagttatcgtggttggattctatagcagccttgacaggcattcgaacaacaatgtttatggttatcctatccgctttggactcttaagcatgttttcccagtctttaaatattaagagatagtttggtaactatattttttcgagggattcatattttttcaaaggaaaataaactaatttctattg

SEQ ID NO: 219492 - DNA, 1073 bp, Zea Mays
gagtccgattcggtgtggatagtctccggagaaggaacggtttcatccaggggaggagaaggatgatgggtgcccggcctcgtcgagctgacagggaggatagtgtgcggcggacagtctatgtctctgacgttgatcagcatgtaactgaacagaaacttgctgaagttttttcaacctgtggacaggtggtagattgccgtatctgtggtgatcctaactcagtgcttcgttttgcttttatcgagtttgctgatgacgttgctgcacaagcagcactagcacttggtggaaccgtgcttggcttttatcctgtcaaggttctgccatcaaagacagcaattttacctgtgaaccctaaatttcttcctcacactgatgatgagaaagaaatggtatccaggactgtgtattgtactaacattgacaagaagatcgcagaagatgaagtgaagcaattctttgagggaacatgtggtgaagtttctcgtctgaggctacttggtgattatgtgcactccacatgcatcgcttttgttgagtttgtccaagcagatagtgctattctcgctctgaactgcagtggcattgttcttggaacgcttcctgttagggtgagcccatcaaagacaccagtccgctcgcgatcgccccgtgtgacgtcatactgaattcggctcatctgaagccgtcgtccagggcagcaaatttctgggcaacaaagccctagtcgtgtggccttagagactgccgcatcgcggataagtaattgtcgttgagcagagttctcgttggttaaagtccagtctagtaggaggcgcagagacccgtctgtatggtcgctgggagatctatcttgacctcctttttctgttctttttggtcttagttatcgtggttggattctatagcagccttgacaggcattcgaacaacaatgtttatggttatcctatccgctttggactcttaagcatgttttcccagtctttaaatattaagagatagtttggtaactatattttttcgagggattcatattttttcaaaggaaaataaactaatttctattg

SEQ ID NO: 219493 - DNA, 6953 bp, Zea Mays
ctttctcagccttatcttcagtcttctagccgattctaccatcttcaattcatccaattagatcaaccaccgctcagtcctcctctcttatccatttgacgcttgctccgtggaactctcacgcacgtctctccgtcaagtccctgggccagcgctgctaggccccgttgatccctcatctccctcatgtccggagccctgcttctttttttcccagccctggtgctcgcttgctgctccccatggccgctaaaatcccctgccctctcatggccgctgacccatggcaagctctgccgtcgatctgcgcagctgtcccggcatcgtcgcgcagcgagctccgccctggatttgcgcagccccaatacacgccgtcgatctgcgcagccgcggccacgacagctccctcgcatcgtgtattccgcctcatcgcactcgtcgtgctcgacaaaatgtcgcagcatgctgcaccttgaactgtgcagtcccgattgcgttgtcgtcaccccggaataaaatccctggaaatttggtggagaagaaggttcagttcaacactccctacgtgttcgatgatatgctcaaaccgctggtcgtcgtcgttcttgcaaaaaaaaatcaagtcggatcaggatgtggtacgctagttgatcacgtgatgcggaaatcgagctgagtcgaccacgagatgctgttaagcgtgggcttcttcgcaaggagatactgatgataaacctgaagatggataatctgaacgagtgccaacacaaaaggctggtcaccaagtgatcgtcatctaacaacactcacttagtgtttatcccaggcaagccccggtgcatttgccacctcccttgtgtttacaaaattttatcacttatatgctgcattaggtgataggagttgagtgattaaacacttgatacattaccatccttgaaaggttgattaccacactttgtcacccgttttataaaagctagagatgcttagtcttgctgatagattaagaaacatatttttgatctatgactcatgtttttacaaaaaaagaaaatgggcttgggataatgaaggcatcaagacgttgataaattcattatccaggtatggcccctctgtcaggcgccaaaattttgaaatagtttaaaatgggaccagacgttgagcaggaaaggtcgcccgtctgtgtcgattaaggaccgtaccgattgttggcctgatgatctaggaccttttaactggccatatacctcgtcatgggtaagcctgaacccggctattccatacgtgaaaagacaaccgcacactgggcgtgggagatggtgggagtagcagttgccctcctggcaagaggctggatggtagggtaatgtgctcccgggtagcgcggaccggttcatgtagtggaggatccgtgggaatggttgacatatgcaagtgttaagtgctacatatgtcgtgtggttggagatccccagctgggtattaatcgattcggatcgccgttacttctcggatatgaagattggatcgctgcccttcatcgtagataacaagcgaaacaaaattttgattttaaaagaaagttagtataggacaagtgaatgctctagattaggcaaatctagattcaaaaaaagtacttaacttgtgatgtaaaattttggcataaggatccactactagtaagcttttctgcaaaaatgagcttttgaaatttgataagctttaccttgattcccgacaaaccaacatacccttgagagtcttttctttagtcgggtaagtcttgctgagtaattgcgtgctgagtaattgcgtactcagggttttattccctattgtttttcaggttgtaattttgttctgttgtggatggtgctaagtgccggtgggctcggccttcttatataagtatatcccttctatagtttctttaatgaggattgtcacttaagctagcatgtatttcaaatttacaaatattctataacattttaaaatgtaattcttttgaaacactttcttttgtaatcactccgatgaggtataataaaatcttgataaacttgtaatcattttataataaagagtttatttccgctgcaagtgtttgtatgtgagttatgtttacttaatcctgcgatcttggcggtaagtggtttatccggggtccttgggacactcggacagatcctgttaagttatttggtgcatatgcatagctgtttgaggtccttgggataaggacaggtgcatgtgggcctaataacttgggaggttctgccacactcttgttataagcttcgtcatctgaaaggaagttaccctgaaggtaagagatgatctcggttctccagtcttcactataaacaggagatatattgaggactgctctttcaaggagttcaaccgagggtgcttttattgtttcaaaaaatacttccgaaggtaagggcagcccctgtgatgctgacttggctagcaaatcagcatgttcattttctcctcgaggaatattttttacagaaaacccttcaaaggaagcttcaatccttcggaccgtatctaaatacttctcaagcttcgggtctcttgccttacaactcttgtcaatatgaccagagataacctgggaatcagttttaagaaccgcccttctgattcccattgcctttaactttcgaagacccaaaagtaaagcttcgtactcagcaatgttatttgtgcagctaaaatcgagtcttgctgcgtaacaagttttaactttggagggtgcgaccaacacagcggctgctcctgccccgaaggttccccaagaaccatagcagaatattgtccatgcttcgacatctttactcgcttcttcttcctgagcccctggcgtccagtcagcaatgaagtcagctagcgcctgggactgaatcgaagatctgtgcacataatcaatgcagaattcattgagttccgcagcccactttccaacccttccagtagcttctctatttctcataatgtccttcaatggttgtgaagaagggacaattatattgtatgcttgaaaataatgccgaagctttctggaagccatcaaaacaacatacaacaccttctccaattctgtataatttttctttgataaactaagaacttcagatacaaagtatattggagcttgctttttgacttgcccttcaagcttttcttggacaagtgccgcacttaccgctgagtgcgaggctgccacatataacaacagagaagcccctggcgttggtggagttaacgtcgttaagtctatcaaatattgcttcagctcttcgaaggctctctgctgaactggaccccattgaaaaacttcggacgatttcagcacttcgaagaatggtaaatttctctctgctgatctagatatgaatttgttgagagatgccaatcttcctgtcaatcgttgagcccccttctttgtgcttggtggttccattcgaagaatagcttcgattttatttggattagcctcaatcccttttgttgaaactaggcaaccaagaaatttccccttctttactccgaaaacacacttttctggattcaattttagatcggcctatctaaaattagcgaaagtctcctacagatcagcaatgtgattttcttacttcgtgcttttacaatgatatcatcaacataagttagcacatttctgcctatctgagaatgaagaacctttgctgtcattctgctgaagcttcctccagcattttgagcccctcaggcatccgaaggtaacaatatgttccgctaggggttatgaagctggtttttggctcatcctccttcttcatccaaatctgatgatagcctgaataacagtccaagagactcataagttctgatgaagctgttgcatcaactagggagtctatccttggcaatgggaactcatccttcggacaagcctcgttgagatcagtgaaatcaatacacatcctccatttgtcgttggccttttttaccataacagtgttagccagtcattctggatatttcacttctctgatgactccggcactgaggagtctttttacttcatttcgagcaccttcggtcttgtcatcagacatcttccgaagcctctgctttctgggcctaaaggatggatcaacattgagcgagtgttcaataacatccctgttgacgccacaaagatcgttagccgaccatgcaaagacatctttattgttgaacaagaatcttatcagggttttctcttgttcctgagacaattgagatcccagcagcaccttctgctctgcgatatcttcgcataaaagcatgggtttcggctgatcggccgaagcagccttctcccttctatgcttgtactgctcacaagcttcggcttcatctatattgtggattgcctttgaatcagtccaattcccctcggcctttctggcagcttcctgactcccatgaatagcaataggtccctgatccgaaggtatctttatgcaaagatatgctggatgaagaattgcttcgaaatcattgagtgttccgcgaccaatgatagcattgtaaggatactccatgtcaacaatgtcaaacacaacttgctcagtccttgtgttgttgacgaatccgaaggtcactggcatggtaatcttaccaagtgctacaatctgtctccctccgaagccacaaagagggtgcgtagcatcatgaatcttgtcttcgggctcttgcatttgtctaaaggccttagcaaatatgatatccgttgcactgcctgtatcaaccaagacattgtggaccagaaatcctttgatcacacaagagataaccatagcatcattatgtgggtaatccttgagctgaagatcctcttgagagaagataattgggatgtgagaccatcttgacttgatgaagggtccttgtacccctacatgttgtactcttctttgcgcctccttcttctgcttcttgttagccggctctgagcatgaaccacctgttatcgggagaatcagctttggagccgaagcagttacagcttggttcttgaacgaagccattagctcaaaaagtggaagtgagttcatcggaggtgggcgctaatgttggggacttgttctcaagtgctatgaattaggaacaaggcaacatagaatgtcagatgttaaagcccttcgtccgctgaagcattatttccccaaggatttaatgaacttcggacgaaggttgtggataatatatcacgaaggttgcaccttcgtgatcaaagataaaacaatgcaaaatgaaatataaaatataaaatataaaacgttacataatagcaagaataaataaattcaattattttgtaatgtgaacttagatatcaaaacataatgtttaggcacatttgtaccttcgccttggcagaaaataataattccagagtaatacgtcagcagttacaagattgcgtgaacaggaaaggagtactgttcacctatttataggcacagaacgcagcctgtaagaaattacaatcatgccccttacagaagatcacaattataactcagactcttatggactaaaaagtaattccatctttaagttggttcggtccttcgtctttagacatgctatagtgtcgaagctttatgagcggtagcttcggtatctcatataaacagatttgtcgaaggtgttttcttcctccaggaccttcggcgacgaagcatgatcccaacaggttacaagaactctaaagggtgtagtgtaatcattcgtattaaatcttataacttttaagatctttgatgatacctcgaaactaaatctctttgtattaatgcttttgtaacactgttttctcccgacagcttctcaaactagcagatgacgattgcttagccatgctggatcttcttcaatcactgcttatagatcattactttaggtctagctcaagcatatgaattggattttgtgtgtcagaccagcacctttcttttttgctctcaacttattttttctcgaaaacacgcaggagaactgcgcctcattatattaataagaaaaagaaaccagggtctaaaggaagacctaatagaaaagaccccttacggggccagaaacatgcatataggaagaaatccatctaggaaaacaaaggaaaaacccacacactgccagggaagtccctatggctcagctaagggggctgccaggtaagaaatgccttttgccctcgctatttcccatcgatgcatctcctcaagcaggtatttcttattctaaattgttgagttggagaatattttccaatccagtcattgctgcagttacatatatttggcttgaatgctctaaattattgaccttgtttttcttattctaaattcttttaaaatattgatgcacacagttagcttcttactactgaagaaatatgtctatagcatgtattgattcattgtccttttgtacaactactaatatatctactttgccatccaagctcggaggtgagaaggtagtttatgatgctaccaagaaaatcttctcaagctccagtggtctagccgaagatattctattcttattcacagattggttgtcactactgggagagattgtcaatattgaaacaatgcctaccgcaacttgcttgagactaaattgctttgttgttgctgttgaatcctctgctactccaagcttctttgatgtcgggtgtaacgttgtaactggctatcgttgttggccgaacatttggctagcgtggatgatatatattgcaatgtgaatccaataagcaggagagtgatcaatgtatgtaatcgttgtacactaacatttgtcgaatattttgtatatcgtttcaaggcacctaaatattttctaaagatttgtataagtttgtagtttttgtgatatatagaagtccg

SEQ ID NO: 219494 - DNA, 6888 bp, Zea Mays
ctttctcagccttatcttcagtcttctagccgattctaccatcttcaattcatccaattagatcaaccaccgctcagtcctcctctcttatccatttgacgcttgctccgtggaactctcacgcacgtctctccgtcaagtccctgggccagcgctgctaggccccgttgatccctcatctccctcatgtccggagccctgcttctttttttcccagccctggtgctcgcttgctgctccccatggccgctaaaatcccctgccctctcatggccgctgacccatggcaagctctgccgtcgatctgcgcagctgtcccggcatcgtcgcgcagcgagctccgccctggatttgcgcagccccaatacacgccgtcgatctgcgcagccgcggccacgacagctccctcgcatcgtgtattccgcctcatcgcactcgtcgtgctcgacaaaatgtcgcagcatgctgcaccttgaactgtgcagtcccgattgcgttgtcgtcaccccggaataaaatccctggaaatttggtggagaagaaggttcagttcaacactccctacgtgttcgatgatatgctcaaaccgctggtcgtcgtcgttcttgcaaaaaaaaatcaagtcggatcaggatgtggtacgctagttgatcacgtgatgcggaaatcgagctgagtcgaccacgagatgctgttaagcgtgggcttcttcgcaaggagatactgatgataaacctgaagatggataatctgaacgagtgccaacacaaaaggctggtcaccaagtgatcgtcatctaacaacactcacttagtgtttatcccaggcaagccccggtgcatttgccacctcccttgtgtttacaaaattttatcacttatatgctgcattaggtgataggagttgagtgattaaacacttgatacattaccatccttgaaaggttgattaccacactttgtcacccgttttataaaagctagagatgcttagtcttgctgatagattaagaaacatatttttgatctatgactcatgtttttacaaaaaaagaaaatgggcttgggataatgaaggcatcaagacgttgataaattcattatccaggtatggcccctctgtcaggcgccaaaattttgaaatagtttaaaatgggaccagacgttgagcaggaaaggtcgcccgtctgtgtcgattaaggaccgtaccgattgttggcctgatgatctaggaccttttaactggccatatacctcgtcatgggtaagcctgaacccggctattccatacgtgaaaagacaaccgcacactgggcgtgggagatggtgggagtagcagttgccctcctggcaagaggctggatggtagggtaatgtgctcccgggtagcgcggaccggttcatgtagtggaggatccgtgggaatggttgacatatgcaagtgttaagtgctacatatgtcgtgtggttggagatccccagctgggtattaatcgattcggatcgccgttacttctcggatatgaagattggatcgctgcccttcatcgtagataacaagcgaaacaaaattttgattttaaaagaaagttagtataggacaagtgaatgctctagattaggcaaatctagattcaaaaaaagtacttaacttgtgatgtaaaattttggcataaggatccactactagtaagcttttctgcaaaaatgagcttttgaaatttgataagctttaccttgattcccgacaaaccaacatacccttgagagtcttttctttagtcgggtaagtcttgctgagtaattgcgtgctgagtaattgcgtactcagggttttattccctattgtttttcaggttgtaattttgttctgttgtggatggtgctaagtgccggtgggctcggccttcttatataagtatatcccttctatagtttctttaatgaggattgtcacttaagctagcatgtatttcaaatttacaaatattctataacattttaaaatgtaattcttttgaaacactttcttttgtaatcactccgatgaggtataataaaatcttgataaacttgtaatcattttataataaagagtttatttccgctgcaagtgtttgtatgtgagttatgtttacttaatcctgcgatcttggcggtaagtggtttatccggggtccttgggacactcggacagatcctgttaagttatttggtgcatatgcatagctgtttgaggtccttgggataaggacaggtgcatgtgggcctaataacttgggaggttctgccacactcttgttataagcttcgtcatctgaaaggaagttaccctgaaggtaagagatgatctcggttctccagtcttcactataaacaggagatatattgaggactgctctttcaaggagttcaaccgagggtgcttttattgtttcaaaaaatacttccgaaggtaagggcagcccctgtgatgctgacttggctagcaaatcagcatgttcattttctcctcgaggaatattttttacagaaaacccttcaaaggaagcttcaatccttcggaccgtatctaaatacttctcaagcttcgggtctcttgccttacaactcttgtcaatatgaccagagataacctgggaatcagttttaagaaccgcccttctgattcccattgcctttaactttcgaagacccaaaagtaaagcttcgtactcagcaatgttatttgtgcagctaaaatcgagtcttgctgcgtaacaagttttaactttggagggtgcgaccaacacagcggctgctcctgccccgaaggttccccaagaaccatagcagaatattgtccatgcttcgacatctttactcgcttcttcttcctgagcccctggcgtccagtcagcaatgaagtcagctagcgcctgggactgaatcgaagatctgtgcacataatcaatgcagaattcattgagttccgcagcccactttccaacccttccagtagcttctctatttctcataatgtccttcaatggttgtgaagaagggacaattatattgtatgcttgaaaataatgccgaagctttctggaagccatcaaaacaacatacaacaccttctccaattctgtataatttttctttgataaactaagaacttcagatacaaagtatattggagcttgctttttgacttgcccttcaagcttttcttggacaagtgccgcacttaccgctgagtgcgaggctgccacatataacaacagagaagcccctggcgttggtggagttaacgtcgttaagtctatcaaatattgcttcagctcttcgaaggctctctgctgaactggaccccattgaaaaacttcggacgatttcagcacttcgaagaatggtaaatttctctctgctgatctagatatgaatttgttgagagatgccaatcttcctgtcaatcgttgagcccccttctttgtgcttggtggttccattcgaagaatagcttcgattttatttggattagcctcaatcccttttgttgaaactaggcaaccaagaaatttccccttctttactccgaaaacacacttttctggattcaattttagatcggcctatctaaaattagcgaaagtctcctacagatcagcaatgtgattttcttacttcgtgcttttacaatgatatcatcaacataagttagcacatttctgcctatctgagaatgaagaacctttgctgtcattctgctgaagcttcctccagcattttgagcccctcaggcatccgaaggtaacaatatgttccgctaggggttatgaagctggtttttggctcatcctccttcttcatccaaatctgatgatagcctgaataacagtccaagagactcataagttctgatgaagctgttgcatcaactagggagtctatccttggcaatgggaactcatccttcggacaagcctcgttgagatcagtgaaatcaatacacatcctccatttgtcgttggccttttttaccataacagtgttagccagtcattctggatatttcacttctctgatgactccggcactgaggagtctttttacttcatttcgagcaccttcggtcttgtcatcagacatcttccgaagcctctgctttctgggcctaaaggatggatcaacattgagcgagtgttcaataacatccctgttgacgccacaaagatcgttagccgaccatgcaaagacatctttattgttgaacaagaatcttatcagggttttctcttgttcctgagacaattgagatcccagcagcaccttctgctctgcgatatcttcgcataaaagcatgggtttcggctgatcggccgaagcagccttctcccttctatgcttgtactgctcacaagcttcggcttcatctatattgtggattgcctttgaatcagtccaattcccctcggcctttctggcagcttcctgactcccatgaatagcaataggtccctgatccgaaggtatctttatgcaaagatatgctggatgaagaattgcttcgaaatcattgagtgttccgcgaccaatgatagcattgtaaggatactccatgtcaacaatgtcaaacacaacttgctcagtccttgtgttgttgacgaatccgaaggtcactggcatggtaatcttaccaagtgctacaatctgtctccctccgaagccacaaagagggtgcgtagcatcatgaatcttgtcttcgggctcttgcatttgtctaaaggccttagcaaatatgatatccgttgcactgcctgtatcaaccaagacattgtggaccagaaatcctttgatcacacaagagataaccatagcatcattatgtgggtaatccttgagctgaagatcctcttgagagaagataattgggatgtgagaccatcttgacttgatgaagggtccttgtacccctacatgttgtactcttctttgcgcctccttcttctgcttcttgttagccggctctgagcatgaaccacctgttatcgggagaatcagctttggagccgaagcagttacagcttggttcttgaacgaagccattagctcaaaaagtggaagtgagttcatcggaggtgggcgctaatgttggggacttgttctcaagtgctatgaattaggaacaaggcaacatagaatgtcagatgttaaagcccttcgtccgctgaagcattatttccccaaggatttaatgaacttcggacgaaggttgtggataatatatcacgaaggttgcaccttcgtgatcaaagataaaacaatgcaaaatgaaatataaaatataaaatataaaacgttacataatagcaagaataaataaattcaattattttgtaatgtgaacttagatatcaaaacataatgtttaggcacatttgtaccttcgccttggcagaaaataataattccagagtaatacgtcagcagttacaagattgcgtgaacaggaaaggagtactgttcacctatttataggcacagaacgcagcctgtaagaaattacaatcatgccccttacagaagatcacaattataactcagactcttatggactaaaaagtaattccatctttaagttggttcggtccttcgtctttagacatgctatagtgtcgaagctttatgagcggtagcttcggtatctcatataaacagatttgtcgaaggtgttttcttcctccaggaccttcggcgacgaagcatgatcccaacaggttacaagaactctaaagggtgtagtgtaatcattcgtattaaatcttataacttttaagatctttgatgatacctcgaaactaaatctctttgtattaatgcttttgtaacactgttttctcccgacagcttctcaaactagcagatgacgattgcttagccatgctggatcttcttcaatcactgcttatagatcattactttaggtctagctcaagcatatgaattggattttgtgtgtcagaccagcacctttcttttttgctctcaacttattttttctcgaaaacacgcaggagaactgcgcctcattatattaataagaaaaagaaaccagggtctaaaggaagacctaatagaaaagaccccttacggggccagaaacatgcatataggaagaaatccatctaggaaaacaaaggaaaaacccacacactgccagggaagtccctatggctcagctaagggggctgccaggtaagaaatgccttttgccctcgctatttcccatcgatgcatctcctcaagcaggtatttcttattctaaattgttgagttggagaatattttccaatccagtcattgctgcagttacatatatttggcttgaatgctctaaattattgaccttgtttttcttattctaaattcttttaaaatattgatgcacacagttagcttcttactactgaagaaatatgtctatagcatgtattgattcattgtccttttgtacaactactaatatatctactttgccatccaagctcggaggtgagaaggtagtttatgatgctaccaagaaaatcttctcaagctccagtggtctagccgaagatattctattcttattcacagattggttgtcactactgggagagattgtcaatattgaaacaatgcttctttgatgtcgggtgtaacgttgtaactggctatcgttgttggccgaacatttggctagcgtggatgatatatattgcaatgtgaatccaataagcaggagagtgatcaatgtatgtaatcgttgtacactaacatttgtcgaatattttgtatatcgtttcaaggcacctaaatattttctaaagatttgtataagtttgtagtttttgtgatatatagaagtccg

SEQ ID NO: 219495 - DNA, 759 bp, Zea Mays
ataacataatgcttgttcgagtgtgaatgacatcgttgacaagtacagtacacattctaagaatctggggaaatcacatcagcagccttctattgatttgaatgtagagcagagcaaatacagcggcttgaacgagcaacttgctgaagaaactaatggacttagacagatgagaggtgaagaccttgagggattgagtgtagaggaattgcaccgaatggaaaggaaacttgaagcaggactgcatagagtgattagtacaaaggaccagctattcatgcaacaaatcggcgaattactgcaaaagaaaatatcctcactgaagacgggcagtcgtctgaatctgtaatgactgcattgcattcaggaagctcgctcgactgtgatgatggttccgatatttccttgaagttgtcgttgccttgaaaggaaggaccatcgcatcgcatgttatctgcatgagtggggctgacaccagtgcttctaagaagacaaagactgggatagtcccattcgcggcattatattggtttaaccagatgtgctgtccttgtgcatgtctgtacttcaaagtggctaacgcgaaatttgtatatataatagtgtatgcgctgcgttatcttcgttctaaaaatctgtattgtttcgttgctggcgctatattgttggtgtattatatatatgcacttaactgttatctatactattctattaaaaatataatatagacatctgatgctaccacggcttcgcgctgac

SEQ ID NO: 219496 - DNA, 810 bp, Zea Mays
tgggccgctataacataatgcttgttcgagtgtgaatgacatcgttgacaagtacagtacacattctaagaatctggggaaatcacatcagcagccttctattgatttgaatgtagagcagagcaaatacagcggcttgaacgagcaacttgctgaagaaactaatggacttagacagatgagaggtgaagaccttgagggattgagtgtagaggaattgcaccgaatggaaaggaaacttgaagcaggactgcatagagtgattagtacaaaggaccagctattcatgcaacaaatcggcgaattactgcaaaagggcacacagctagaagatgagaacaggcgtctaaaagaacaaaaaatatcctcactgaagacgggcagtcgtctgaatctgtaatgactgcattgcattcaggaagctcgctcgactgtgatgatggttccgatatttccttgaagttgtcgttgccttgaaaggaaggaccatcgcatcgcatgttatctgcatgagtggggctgacaccagtgcttctaagaagacaaagactgggatagtcccattcgcggcattatattggtttaaccagatgtgctgtccttgtgcatgtctgtacttcaaagtggctaacgcgaaatttgtatatataatagtgtatgcgctgcgttatcttcgttctaaaaatctgtattgtttcgttgctggcgctatattgttggtgtattatatatatgcacttaactgttatctatactattctattaaaaatataatatagacatctgatgctaccacggcttcgcgctgac

SEQ ID NO: 219497 - DNA, 865 bp, Zea Mays
cctcgcctcgctttcatttgccgtcgcttcggtgtgaatgacatcgttgacaagtacagtacacattctaagaatctggggaaatcacatcagcagccttctattgatttgaatgtagagcagagcaaatacagcggcttgaacgagcaacttgctgaagaaactaatggacttagacagatgagaggtgaagaccttgagggattgagtgtagaggaattgcaccgaatggaaaggaaacttgaagcaggactgcatagagtgattagtacaaaggaccagctattcatgcaacaaatcggcgaattactgcaaaagggcacacagctagaagatgagaacaggcgtctaaaagaacaaatgcctcaggtgctaacggctggcacaattaatggtggttgctgctgctgcagaaaatatcctcactgaagacgggcagtcgtctgaatctgtaatgactgcattgcattcaggaagctcgctcgactgtgatgatggttccgatatttccttgaagttgtcgttgccttgaaaggaaggaccatcgcatcgcatgttatctgcatgagtggggctgacaccagtgcttctaagaagacaaagactgggatagtcccattcgcggcattatattggtttaaccagatgtgctgtccttgtgcatgtctgtacttcaaagtggctaacgcgaaatttgtatatataatagtgtatgcgctgcgttatcttcgttctaaaaatctgtattgtttcgttgctggcgctatattgttggtgtattatatatatgcacttaactgttatctatactattctattaaaaatataatatagacatctgatgctaccacggcttcgcgctgac

SEQ ID NO: 219498 - DNA, 774 bp, Zea Mays
ctcgcctcgcctcgctttcatttgccgtcgcttcggtgtgaatgacatcgttgacaagtacagtacacattctaagaatctggggaaatcacatcagcagccttctattgatttgaatgtagagcagagcaaatacagcggcttgaacgagcaacttgctgaagaaactaatggacttagacagatgagaggtgaagaccttgagggattgagtgtagaggaattgcaccgaatggaaaggaaacttgaagcaggactgcatagagtgattagtacaaaggaccagctattcatgcaacaaatcggcgaattactgcaaaagaaaatatcctcactgaagacgggcagtcgtctgaatctgtaatgactgcattgcattcaggaagctcgctcgactgtgatgatggttccgatatttccttgaagttgtcgttgccttgaaaggaaggaccatcgcatcgcatgttatctgcatgagtggggctgacaccagtgcttctaagaagacaaagactgggatagtcccattcgcggcattatattggtttaaccagatgtgctgtccttgtgcatgtctgtacttcaaagtggctaacgcgaaatttgtatatataatagtgtatgcgctgcgttatcttcgttctaaaaatctgtattgtttcgttgctggcgctatattgttggtgtattatatatatgcacttaactgttatctatactattctattaaaaatataatatagacatctgatgctaccacggcttcgcgctgac

SEQ ID NO: 219499 - DNA, 1153 bp, Zea Mays
ggaaacaggaaaggagacccgcgcgcgccccatcgcctcgcctcgcctcgcctcgctttcatttgccgtcgcttcggctggagagccattcgtgggcgtaggacgagagagaggatcggcggcggcggcgtgtgggagatggcgcgcgagaggcgggagatacggcggatagagagcgcggcggcgcggcaggtgaccttctccaagcgccggcgcgggctgttcaagaaggcggaggagctcgccgtgctgtgcgacgccgacgtcgcgctcgtcgtgttctccgccaccggcaggctctcgcagttcgcgagctccagtgtgaatgacatcgttgacaagtacagtacacattctaagaatctggggaaatcacatcagcagccttctattgatttgaatgtagagcagagcaaatacagcggcttgaacgagcaacttgctgaagaaactaatggacttagacagatgagaggtgaagaccttgagggattgagtgtagaggaattgcaccgaatggaaaggaaacttgaagcaggactgcatagagtgattagtacaaaggaccagctattcatgcaacaaatcggcgaattactgcaaaagggcacacagctagaagatgagaacaggcgtctaaaagaacaaatgcctcaggtgctaacggctggcacaattaatggtggttgctgctgctgcagaaaatatcctcactgaagacgggcagtcgtctgaatctgtaatgactgcattgcattcaggaagctcgctcgactgtgatgatggttccgatatttccttgaagttgtcgttgccttgaaaggaaggaccatcgcatcgcatgttatctgcatgagtggggctgacaccagtgcttctaagaagacaaagactgggatagtcccattcgcggcattatattggtttaaccagatgtgctgtccttgtgcatgtctgtacttcaaagtggctaacgcgaaatttgtatatataatagtgtatgcgctgcgttatcttcgttctaaaaatctgtattgtttcgttgctggcgctatattgttggtgtattatatatatgcacttaactgttatctatactattctattaaaaatataatatagacatctgatgctaccacggcttcgcgctgac

SEQ ID NO: 219500 - DNA, 2592 bp, Zea Mays
cgccgcctacacacgcctagcccgctccccaagaaagagcccccgcacacaggctgggaggggagcgaaagcgaaacgtattaaactcgcgtacatcatcaaccgcatgcgctgatgcgcactgccactgccccggagaaattcaaatcccaagccccacaagcaaattaccccagcatcaaatcagcggccggccggccggcagctctcggtcgatccactgcggtttccagtcccgaataatcccaattcccaatcgattcgaagcttccttccttcgaggagagggggaggtggaaggcgcgggggaagctctgcttagggttcggaggtggccggcgccgccgcggggcggggacggcagggggatggatccggagcagacgttcctgcgggtgcacgcgcgcttatcggggacgctttcccagctgctcacgccgcggatccgcctcgtcctcgagtacctctacctcgccggcgccgtcgcgctcttctgcctgctcgtcgtcatgcacacgaacttcgtgcagcagcctggttgctcaagtgaattttctggaattgaatttggagaagcacaacttgtccaaatcaagattatcagtgggggattatggtccagcagaggtgcttcttacatcatggatctccagaacctgggacgttcagctgagaaaattttagaggttaatggtgataagttcaacattttggcatctaaattttggtcaacctgggttggccctggagctaggaggagcttaccagatttgaaggcagccggagagggttctgtacaccaccctttatctgctaaggagtcatttaaagcagcagtgacatttttgttcagaaaatggtaccttcgtgctgtttcattctggaagaacataaagcaactttcagaaaataccctccagttaatgatcaaattggaacgatttcctacatattattaaggatcttcaactaccaagcatggatcatcttatttcgacaatagtgcaatggtttgagaggagaagtaaagcatttgagcctacttatttatatggcgtggaaaagggttatttcttgctttctgaaggtgctaaaactcgtcatggtgtccgaacaatcaatatcacaatttctgctcgaaatccttgctttggaaacaggtggcagcaacttttgataaacagcattgttggatatgatactatacttacaaacagcttggtgaattctcctggtcatggctatttatacaactttcagacgaaggagctctatgatcttagttatgggcatgaaccaccagaaggtcctacaagatttggagattactttgtgacaaaatgtggtgtccttctaatgtcactctttgtctttttcacaaccaccatgtctgtttcatttactttgagagaaacacaatcccgcatgcttagattcacagtgcagcttcaacaccatgcacgccaccacctgccaacctttcagttgatattcgtgcatgtcatcgaatcattggtttttgtgccgattatgattgggattctcttttttctatttgagttctatgatgatcaattgcttgcgtttcttgttttgactcttgtatggttatgcgagctattcacgatgatcagtgtgcggacatccatatcgatgcagttctttccacgcttcttcttgctgtattttttggttttccatatctacttcttctcatatacctatggcttctcatatctggctttctctgctacggcagcattcatgcagcacctgattttatatttttggaaccgttttgaggtgccagctctccagagattcatgcgaagtcgagcacacattcaccagcaaacagatgccctattggttcaggatgagtctaccaggagccagcaagagggtcaacagaatggaatttctgagccagctgccaacaatgctctccagtatcaagagcaaaaccctcagcgagctggaagtacccctgcaggctcaggctccctcaacccatttgggtcccttttgctgtggttgctgggaggcggtgcttctgatggcatagtttctttcttctctatgttcagagatgttcgtgatcatggtcaagattacaccgatccacctcgaaatggaaatgatcaggtgacatagaatcacggggatgaaagtgggccaattactgaactcgagtgcttgggcggcagtagtctctttctaatatgatataatgccagcacctcccgtcaaaaggataatgacgaatattggtggcaactatacagactggtgtcgctggagatgccatgttagtgttatctgtttctcacttttttagttagtaggtaagggtgaaggttgtatctatattcattacatgtgcacattccctaccgtctgaatgggagcgcccgtcccagtcctgtacagaaatgtcaactcacagcagattgtgcacattctttttgtactcccatgggcgggtgctggcctggaacatgcagtgtgtgcaccactgtcactgaattggacagttaatggtttggatacatcgttgcatgtactgttccaacttccaaattctgaattctg

SEQ ID NO: 219501 - DNA, 2701 bp, Zea Mays
cgccgcctacacacgcctagcccgctccccaagaaagagcccccgcacacaggctgggaggggagcgaaagcgaaacgtattaaactcgcgtacatcatcaaccgcatgcgctgatgcgcactgccactgccccggagaaattcaaatcccaagccccacaagcaaattaccccagcatcaaatcagcggccggccggccggcagctctcggtcgatccactgcggtttccagtcccgaataatcccaattcccaatcgattcgaagcttccttccttcgaggagagggggaggtggaaggcgcgggggaagctctgcttagggttcggaggtggccggcgccgccgcggggcggggacggcagggggatggatccggagcagacgttcctgcgggtgcacgcgcgcttatcggggacgctttcccagctgctcacgccgcggatccgcctcgtcctcgagtacctctacctcgccggcgccgtcgcgctcttctgcctgctcgtcgtcatgcacacgaacttcgtgcagcagcctggttgctcaagtgaattttctggaattgaatttggagaagcacaacttgtccaaatcaagattatcagtgggggattatggtccagcagaggtgcttcttacatcatggatctccagaacctgggacgttcagctgagaaaattttagaggttaatggtgataagttcaacattttggcatctaaattttggtcaacctgggttggccctggagctaggaggagcttaccagatttgaaggcagccggagagggttctgtacaccaccctttatctgctaaggagtcatttaaagcagcagtgacatttttgttcagaaaatggtaccttcgtgctgtttcattctggaagaacataaagcaactttcagaaaataccctccagttaatggtcagatcaaattggaacgatttcctacatattattaaggatcttcaactaccaagcatggatcatcttatttcgacaatagtgcaatggtttgagaggagaagtaaagcatttgagcctacttatttatatggcgtggaaaagggttatttcttgctttctgaaggtgctaaaactcgtcatggtgtccgaacaatcaatatcacaatttctgctcgaaatccttgctttggaaacaggtggcagcaacttttgataaacagcattgttggatatgatactatacttacaaacagcttggtgaattctcctggtcatggctatttatacaactttcagacgaaggagctctatgatcttagttatgggcatgaaccaccagaaggtcctacaagatttggagattactttgtgacaaaatgtggtgtccttctaatgtcactctttgtctttttcacaaccaccatgtctgtttcatttactttgagagaaacacaatcccgcatgcttagattcacagtgcagcttcaacaccatgcacgccaccacctgccaacctttcagttgatattcgtgcatgtcatcgaatcattggtttttgtgccgattatgattgggattctcttttttctatttgagttctatgatgatcaattgcttgcgtttcttgttttgactcttgtatggttatgcgagctattcacgatgatcagtgtgcggacatccatatcgatgcagttctttccacgcttcttcttgctgtattttttggttttccatatctacttcttctcatatacctatggcttctcatatctggctttctctgctacggcagcattcatgcagcacctgattttatatttttggaaccgttttgagctctccagagattcatgcgaagtcgagcacacattcaccagcaaacaggtgtccacattacatcctcaactatctacacttctaccttacacattgctagggtaaatgtgagggaccctggtacaataaacgatggcctcggtgctgctcgtgaagcagatgccctattggttcaggatgagtctaccaggagccagcaagagggtcaacagaatggaatttctgagccagctgccaacaatgctctccagtatcaagagcaaaaccctcagcgagctggaagtacccctgcaggctcaggctccctcaacccatttgggtcccttttgctgtggttgctgggaggcggtgcttctgatggcatagtttctttcttctctatgttcagagatgttcgtgatcatggtcaagattacaccgatccacctcgaaatggaaatgatcaggtgacatagaatcacggggatgaaagtgggccaattactgaactcgagtgcttgggcggcagtagtctctttctaatatgatataatgccagcacctcccgtcaaaaggataatgacgaatattggtggcaactatacagactggtgtcgctggagatgccatgttagtgttatctgtttctcacttttttagttagtaggtaagggtgaaggttgtatctatattcattacatgtgcacattccctaccgtctgaatgggagcgcccgtcccagtcctgtacagaaatgtcaactcacagcagattgtgcacattctttttgtactcccatgggcgggtgctggcctggaacatgcagtgtgtgcaccactgtcactgaattggacagttaatggtttggatacatcgttgcatgtactgttccaacttccaaattctgaattctg

SEQ ID NO: 219502 - DNA, 2580 bp, Zea Mays
cgccgcctacacacgcctagcccgctccccaagaaagagcccccgcacacaggctgggaggggagcgaaagcgaaacgtattaaactcgcgtacatcatcaaccgcatgcgctgatgcgcactgccactgccccggagaaattcaaatcccaagccccacaagcaaattaccccagcatcaaatcagcggccggccggccggcagctctcggtcgatccactgcggtttccagtcccgaataatcccaattcccaatcgattcgaagcttccttccttcgaggagagggggaggtggaaggcgcgggggaagctctgcttagggttcggaggtggccggcgccgccgcggggcggggacggcagggggatggatccggagcagacgttcctgcgggtgcacgcgcgcttatcggggacgctttcccagctgctcacgccgcggatccgcctcgtcctcgagtacctctacctcgccggcgccgtcgcgctcttctgcctgctcgtcgtcatgcacacgaacttcgtgcagcagcctggttgctcaagtgaattttctggaattgaatttggagaagcacaacttgtccaaatcaagattatcagtgggggattatggtccagcagaggtgcttcttacatcatggatctccagaacctgggacgttcagctgagaaaattttagaggttaatggtgataagttcaacattttggcatctaaattttggtcaacctgggttggccctggagctaggaggagcttaccagatttgaaggcagccggagagggttctgtacaccaccctttatctgctaaggagtcatttaaagcagcagtgacatttttgttcagaaaatggtaccttcgtgctgtttcattctggaagaacataaagcaactttcagaaaataccctccagttaatggtcagatcaaattggaacgatttcctacatattattaaggatcttcaactaccaagcatggatcatcttatttcgacaatagtgcaatggtttgagaggagaagtaaagcatttgagcctacttatttatatggcgtggaaaagggttatttcttgctttctgaaggtgctaaaactcgtcatggtgtccgaacaatcaatatcacaatttctgctcgaaatccttgctttggaaacaggtggcagcaacttttgataaacagcattgttggatatgatactatacttacaaacagcttggtgaattctcctggtcatggctatttatacaactttcagacgaaggagctctatgatcttagttatgggcatgaaccaccagaaggtcctacaagatttggagattactttgtgacaaaatgtggtgtccttctaatgtcactctttgtctttttcacaaccaccatgtctgtttcatttactttgagagaaacacaatcccgcatgcttagattcacagtgcagcttcaacaccatgcacgccaccacctgccaacctttcagttgatattcgtgcatgtcatcgaatcattggtttttgtgccgattatgattgggattctcttttttctatttgagttctatgatgatcaattgcttgcgtttcttgttttgactcttgtatggttatgcgagctattcacgatgatcagtgtgcggacatccatatcgatgcagttctttccacgcttcttcttgctgtattttttggttttccatatctacttcttctcatatacctatggcttctcatatctggctttctctgctacggcagcattcatgcagcacctgattttatatttttggaaccgttttgaggtgccagctctccagagattcatgcgaagtcgagcacacattcaccagcaaacaggatgagtctaccaggagccagcaagagggtcaacagaatggaatttctgagccagctgccaacaatgctctccagtatcaagagcaaaaccctcagcgagctggaagtacccctgcaggctcaggctccctcaacccatttgggtcccttttgctgtggttgctgggaggcggtgcttctgatggcatagtttctttcttctctatgttcagagatgttcgtgatcatggtcaagattacaccgatccacctcgaaatggaaatgatcaggtgacatagaatcacggggatgaaagtgggccaattactgaactcgagtgcttgggcggcagtagtctctttctaatatgatataatgccagcacctcccgtcaaaaggataatgacgaatattggtggcaactatacagactggtgtcgctggagatgccatgttagtgttatctgtttctcacttttttagttagtaggtaagggtgaaggttgtatctatattcattacatgtgcacattccctaccgtctgaatgggagcgcccgtcccagtcctgtacagaaatgtcaactcacagcagattgtgcacattctttttgtactcccatgggcgggtgctggcctggaacatgcagtgtgtgcaccactgtcactgaattggacagttaatggtttggatacatcgttgcatgtactgttccaacttccaaattctgaattctg

SEQ ID NO: 219503 - DNA, 2597 bp, Zea Mays
cgccgcctacacacgcctagcccgctccccaagaaagagcccccgcacacaggctgggaggggagcgaaagcgaaacgtattaaactcgcgtacatcatcaaccgcatgcgctgatgcgcactgccactgccccggagaaattcaaatcccaagccccacaagcaaattaccccagcatcaaatcagcggccggccggccggcagctctcggtcgatccactgcggtttccagtcccgaataatcccaattcccaatcgattcgaagcttccttccttcgaggagagggggaggtggaaggcgcgggggaagctctgcttagggttcggaggtggccggcgccgccgcggggcggggacggcagggggatggatccggagcagacgttcctgcgggtgcacgcgcgcttatcggggacgctttcccagctgctcacgccgcggatccgcctcgtcctcgagtacctctacctcgccggcgccgtcgcgctcttctgcctgctcgtcgtcatgcacacgaacttcgtgcagcagcctggttgctcaagtgaattttctggaattgaatttggagaagcacaacttgtccaaatcaagattatcagtgggggattatggtccagcagaggtgcttcttacatcatggatctccagaacctgggacgttcagctgagaaaattttagaggttaatggtgataagttcaacattttggcatctaaattttggtcaacctgggttggccctggagctaggaggagcttaccagatttgaaggcagccggagagggttctgtacaccaccctttatctgctaaggagtcatttaaagcagcagtgacatttttgttcagaaaatggtaccttcgtgctgtttcattctggaagaacataaagcaactttcagaaaataccctccagttaatggtcagatcaaattggaacgatttcctacatattattaaggatcttcaactaccaagcatggatcatcttatttcgacaatagtgcaatggtttgagaggagaagtaaagcatttgagcctacttatttatatggcgtggaaaagggttatttcttgctttctgaaggtgctaaaactcgtcatggtgtccgaacaatcaatatcacaatttctgctcgaaatccttgctttggaaacaggtggcagcaacttttgataaacagcattgttggatatgatactatacttacaaacagcttggtgaattctcctggtcatggctatttatacaactttcagacgaaggagctctatgatcttagttatgggcatgaaccaccagaaggtcctacaagatttggagattactttgtgacaaaatgtggtgtccttctaatgtcactctttgtctttttcacaaccaccatgtctgtttcatttactttgagagaaacacaatcccgcatgcttagattcacagtgcagcttcaacaccatgcacgccaccacctgccaacctttcagttgatattcgtgcatgtcatcgaatcattggtttttgtgccgattatgattgggattctcttttttctatttgagttctatgatgatcaattgcttgcgtttcttgttttgactcttgtatggttatgcgagctattcacgatgatcagtgtgcggacatccatatcgatgcagttctttccacgcttcttcttgctgtattttttggttttccatatctacttcttctcatatacctatggcttctcatatctggctttctctgctacggcagcattcatgcagcacctgattttatatttttggaaccgttttgaggtgccagctctccagagattcatgcgaagtcgagcacacattcaccagcaaacagatgccctattggttcaggatgagtctaccaggagccagcaagagggtcaacagaatggaatttctgagccagctgccaacaatgctctccagtatcaagagcaaaaccctcagcgagctggaagtacccctgcaggctcaggctccctcaacccatttgggtcccttttgctgtggttgctgggaggcggtgcttctgatggcatagtttctttcttctctatgttcagagatgttcgtgatcatggtcaagattacaccgatccacctcgaaatggaaatgatcaggtgacatagaatcacggggatgaaagtgggccaattactgaactcgagtgcttgggcggcagtagtctctttctaatatgatataatgccagcacctcccgtcaaaaggataatgacgaatattggtggcaactatacagactggtgtcgctggagatgccatgttagtgttatctgtttctcacttttttagttagtaggtaagggtgaaggttgtatctatattcattacatgtgcacattccctaccgtctgaatgggagcgcccgtcccagtcctgtacagaaatgtcaactcacagcagattgtgcacattctttttgtactcccatgggcgggtgctggcctggaacatgcagtgtgtgcaccactgtcactgaattggacagttaatggtttggatacatcgttgcatgtactgttccaacttccaaattctgaattctg

SEQ ID NO: 219504 - DNA, 860 bp, Zea Mays
aaggagaaagagaggaagacgagagctagaagcgaaggagaaaagcagttcttcagctaggagggcacaggaaggaggagatggcgtcaaagaggattcagaaggagctcaaggatctgcagaaggaccctcccacctcgtgcagtgcaggtcctgttggtgaagacatgttccactggcaggcaacaataatgggtccatctgatagcccatattctggtggagttttcctagttacaatccattttcctcctgattatcctttcaaaccaccaaaggtggcatttcgcactaaggtgttccatccaaacatcaacagcaacgggagcatttgcctcgacatcttgaaggaccagtggagtccggcactaaccatctccaaggtgctgctgtccatctgttccctgctgactgatccgaaccccgacgaccctttggtccccgagatagctcacatgtacaagacggaccggcacaagtacgagaacaccgcgaggacctggacccagaggtatgccatgtagtattttctctacctggcctttggggtcgctgctgcgttgtgttgccgggacctggacgtgcctccatgtattcgttctatccttcctgtataatgatgaaccgaattgggtttgcagtacagtgccgcgtgtggtgctgaatgctgctgtattgtgtcacttggaagctgtaattctcagtgtcaaaaaaaactggtacttggaaccattttgcgtcggatggcgctgcaggccagtccatgcttgcgtccttcttcccttcaccagtcatcgtgttggaagaaacataacgttctgtctcttgagtaactggtacgaaacaataatgatcgttgg

SEQ ID NO: 219505 - DNA, 1078 bp, Zea Mays
  misc_feature (1077)..(1078): n is a, c, g, or t
cacacccaaacccgtggcgcggggcagccggcagggcgcgccttcgccaccacaattccacaaagagacctcgcgccccaccagtctaatctcccgcgggcgggcagataacggctcgcggtacggaaagggcgagagagggggagcggagagcaccagtccaccgagaggcgcggagcaggagggcacacatggaactggaggaggcggtgccgccggccgcgatggtgggggaggacaacgcggcggcgccgacccaagactttgggctccccgctgagctgatagccgtgctgccatcggacccgttcgctcagctggacgtagcgcgcaagatcacctccatcgcgctctcgcaccgcctcggcctcctcgaggccgaagcagcgcgcctgcgctcgcagctcgccgaacgcgacgccgaggccgaggacctccgggagcacgtcgagcagctcgacgccgcgctcgccgtcgccaccggccgcctccgccacgccgaggaggaaaaggacgcactgcagcgggacaactctgagctgtccaacaccgttaggaagttgaacagagatgtcgccaagttggaagttttcaagaagacacttgtgcagtcactccaggaagatgacagcagtgataatactgctcccagggaaagagctgcagcagcttcaaatttctcctctgcaccatcagatgaagattctgcattttcgacttccaaatcatcacaggtttcagaaaccgcaagttcagtttcagaggaaaataaccaagttgacccagatgcacctaggcggccaccccggccacatgtatttttgcaatcatacaacagcacaccgaggatgactcccccagactcacctccaaggcgttttgcatcggcttttctggtcagcatagctctccatttgacgctccaagtcaaacaggacgaacaagagttgatggaaaggagttctttcgtcaggtcagaaatagattatcttatgagcagtttggtgcattcctggctaatgtgaaggagctgaacgcacataggcagaccagagaggataccttaagacaagcttnn

SEQ ID NO: 219506 - DNA, 1139 bp, Zea Mays
  misc_feature (1138)..(1139): n is a, c, g, or t
cacacccaaacccgtggcgcggggcagccggcagggcgcgccttcgccaccacaattccacaaagagacctcgcgccccaccagtctaatctcccgcgggcgggcagataacggctcgcggtacggaaagggcgagagagggggagcggagagcaccagtccaccgagaggcgcggagcaggagggcacacatggaactggaggaggcggtgccgccggccgcgatggtgggggaggacaacgcggcggcgccgacccaagactttgggctccccgctgagctgatagccgtgctgccatcggacccgttcgctcagctggacgtagcgcgcaagatcacctccatcgcgctctcgcaccgcctcggcctcctcgaggccgaagcagcgcgcctgcgctcgcagctcgccgaacgcgacgccgaggccgaggacctccgggagcacgtcgagcagctcgacgccgcgctcgccgtcgccaccggccgcctccgccacgccgaggaggaaaaggacgcactgcagcgggacaactctgagctgtccaacaccgttaggaagttgaacagagatgtcgccaagttggaagttttcaagaagacacttgtgcagtcactccaggaagatgacagcagtgataatactgctcccagggaaagagctgcagcagcttcaaatttctcctctgcaccatcagatgaagattctgcattttcgacttccaaatcatcacaggtttcagaaaccgcaagttcagtttcagaggaaaataaccaagttgacccagatgcacctaggcggccaccccggccacatgtatttttgcaatcatacaacagcacaccgaggatgactcccccagactcacctccaaggcgttttgcatcggtatcaccgccaaggcgacattcaatctctgttacatcgatgaatatgtttaatgacaggtcctcaggcttttctggtcagcatagctctccatttgacgctccaagtcaaacaggacgaacaagagttgatggaaaggagttctttcgtcaggtcagattatcttatgagcagtttggtgcattcctggctaatgtgaaggagctgaacgcacataggcagaccagagaggataccttaagacaagcttnn

SEQ ID NO: 219507 - DNA, 1543 bp, Zea Mays
cagagaagaattcagtagaatcgattcgattcaccaaattaatagagagcaattaaaccgccatgtaattgtatcgtaagtataaccttgattgttattactcgcacatggcagagacaattcgacgcagaagaagaatttagaatccacgacatgcaagagctcgacaagacgtaccggccaccatggatcgggggcagtctaggccagccagagtgcatgatatgaagaaagaaaattaagcaaaagtacatgcatacgcgagagcagcgaggtagcagcgcaataaccagaagaagacgacgacggcgacgtacgatacgaggaccaagcaagcaaagcatgtggcagccatgccatctcatcgcggcgacggtggttcacttgatgaactcgatggcccaggcgttggcgtagatgtaggtggccttgaacccggagaagccggcgccctttgcgagctcgcggaactcgcgctcgtaccgctccttgccgccggggttgtgcgcgagcatgatcatgtcgacgtggaagacgccctgcgccttgggggtggcctccgtgttgaccggcagcacgcactcgacgacgatgaccttgccattttccggcagcgcgtcgtagcagttcttgagcagcgtggcgcagtgcgcgtcgctccagtcgtggaggatccacttcatgaggatggcgtcgccggcgggcacggacgcgaacatgtccccgcccacgtggcgcacgccggggaacggcggcgcctcggagatgacgtgcggcaggtcgaagttgaccccggagatgtgcgggtggcgggacgtgatggcgtgcagcgtggcgcccacgccgccgcccacgtccaccagcgtcgacacgccctcgaagcccgtgtagaagtccagcagcttcttggtgatgatcaccgagtggttcttcatgccctcgttgaacacgcggttgaagcgcgagtccgtgccgtggtactcgaacgccgtcatcccgtacgccttgttgaacgggatgccgccgtccagcaccgcgtccttgagatagtacctgctctccatgaggaccttgtcctggttcatgagcgcgagggcggccatggacacgccgtcctcgttgggggtgagccacttgcagacgggcgcggcggagtagcggcgctcgtaccggccgtcccggtcctccatctggcaccggacgacgtcgtaggaggcgagcaggcggagcatgcggtccaccatggccgccgcggcggcggggtcgccgggcgccgcgggcatccgcgccaccacctcctcgggcgccagcgccgccttgccgccgccggcctccttctgcagcacctccagcaggcccagctcgatggcgttcttcagcgtcatgggcaggatggacgacgacgccagctgcatcgcgtacatgcacgcctcctcgtccaccaccgcggccacgtcgccggcggtggagcccatggctattacgattagcgctgccggcctttctctgctgggctcgaggagcgcgctagctgctgatggcg

SEQ ID NO: 219508 - DNA, 4065 bp, Zea Mays
gagccgtagaggcattggatccacgtgcggattcacgcgcgcaaccggaaactggtactccgacccaccaaaagcagcgaccattagttcccccctcctttttattaattccctggtttaaaccaagcagcaaattcttgccgtagaaattagaactcccaacagaaataggtgcgtcatcgcgttcttgtaatctagtaaaagtcttccatttttctgtgatccttccccttctcccgcatcgatcgtctctcaagaacagagggtagaatcacaggtagaaagaaacaagaactgaattagccagtggtaattccggcctggcagctgaatcgtgactcaattcctgacgaatttctcgtggattccgtggagaaaaagtgtgacctttccgatgcagtacaaccaccgcagccgcttgccgccgccgccgctgccgttcggccgcggagggcatcctcgcggccccaagcagccatgctacgctccgcttcctccgccaccgtttcctccggcgccgccgccgccgccgccgtcgctagagcgcaagtacgaggtgcttatggaggccggtcgcctcgccaccgagtatctggtcgcccagggcgtgctccccccggccgctctgcagcgcggcgccggcatctctggcgcgtggcctgatcatcctcttcctccgccaccgcagctgcaacagcaggaaccccgggggggttatggccggaggcggtacaaagatgaatacaacaataatcctaggcgagccaatgacactagtagtagcaccagtagcagagatgattgcagccgtggcagctacaatggaagagggaagatgaagtatgggaaatacaggagggggtatttggattcagggagggacagggagaaggagaggagaaggccatttccaaatggccggcgctacgaggaggataaggatgaagatggggcacctgggtttcggagggagcgacacggcaatcgggggagtgatgaggtgaggcctcatgatacagaggcactgagggaagggacaccattgacagcgaaggctgtagaagggttctgcatggaggatgcaacgtcaaagattatgagctctttcaaagatactattaaggattctaatgatgcgccaaaggtgccggaggagactgaggaaggcgaggtggaggatgacagggagacgcagaattcagaaactgaggtagtgaagcaagggatagataccgatgtaaatcatgcttcttgttatgttattacagagtcaaatcccaaccagttatcagatggtaagattcaagatgagattcctgacgaggaagctgaagatgacaaaaaagttatggatgaggctactttggatcacaacacttgtgatggtgaggtgacaaatatggaagttgagatgcacgttggtaaggagagtttgattgactattgtaacttcacgagaaccccaacaaggcctaggtcagcacgtgcacacagaaatgcagcatctatcccaggagaacctgcagtagttgaaacatttgatttagtttcttctggtcaagcttcacatatggtaagcgctgaatctgctgagagattttttactaaaattgtgtcagaaaacacagaagataaattttgccaagaaaacactagctctggtgatgtccgtgctccaccaaaggagctgatgcttcttcaagaaaatggaataacagttgtgactgaaaacatggcagaagataatgttgatgcagaaccacatgtggtcgtccagcaatataaggaagaaactaacctatctccgttaacagatgccctcgagaagagcttgaggcaggaaatcacattatctccatttgcagcttctcacaaggatagcttgatgcaagagggtggcttgatgcaagaagttgatttatctccgttgacagctaatcacagggagagcttcactgaagaaaccgaattgccaccatcaacagcttctcacaaggacagcttgattgagggaactgacttaactcagacaatatcttcttataataataacttgaaattgcaatttaaggaaggaacacaggtatgcgatattgatatgctgccacaagatgtgaacctcattgagttgcccgatcaaaggaaaatcattggtcgtgatgttggtgctaaagctgtcaccggaatggaagaaggaaagctggatcaatctagctcactaaatctatcggatgttgacctagttggtggtacagaggttgccgctatacacaataatccagtgttggtccagctgtctgcagctggatcttccacagagtcaaataataaacagcaacaagatcctgaaacttttacaggtgccaatgccagtcctacagatgatttatgccagcttccattagataataaggatgttcaggtagttaatatagaatgtggcacaccagttgaagttggtggatttggtttgtcaaaatcaatacacaataatccagtgttggtccagatgtctgtagctggatcttctgcagagttaattaataaacagcaagaagatcctgaaacttttacaggtgccaatgctaatcctacagatgatttatgccagcttccattagacaataaggatgttcaagtaattgacatagaatgtggcacaccagttgaagttggtggatttgatttgtcaaagtcaaatgtcatggcatttcagctaaaagttatacaatttgattcaaccagaaataagatggtatgctctagcatggatagcatcatggaccctggcgatggaatacatacggatgttattcctgttgttcaagatggctacagccttgcattttcagattttctcagttctgatataccatgctacccgtcaatgcaatcagatcttcatgctggaataagtgccaacgactcagagggtattaccgttatggatgatcctatatatgggtctctcgctgatattggtttcatggacatgtgggggcagcccactcaagactacgacaaattcttctaggctgccgccgaaggcccaagttcatgaatttgacaaggaaaattagttgagttagctcagtacaggcgacaataaatagatcgggttatatcagataaattagttgagtttagcagcaagatcggccgggccaatgcagcccgcctctccgacttgtcctcggacagaaggtttggattggatggagccacccgttggcccgtgaccgtcctggccgcggcgcaaggtcgcagccgccatgcccaataaggccttagttcggtttgagatggattaaagagatccacctctaaccgaacaagccgacatggaggaaagtcctaagccgacatggcgacacagccgcaggatttacggtgcctcgtctcatctgccaccgtcttcgtccggccctagcccctagcacagcacgtagccggacttgtgtccaccaaagcatcagttgtaattagttgcagtccatgataattcttaatcccgttgttagcccgactgtggagataatttgcaatagttgaccacctgatttgttcatgacagcagtttaaaactggattaacgtagacataggcgctactagatgacggacatgcgtaaaaggtgcgttttgcagtacttgttgcctatgaatcccgtgaaaacagacatcgcttttttctcgcgacaaaagaatcaagagatgtcacctttcagtactgtttcattatgttgagttcaattttatttcggtgtaatcatgagtttcagtgtcactcgaatcagacaaccagagtggcagcggactgcactggggagagggagccgcgccaaacggcgatgcgcaaacaagcgctcttcgcgtatggggattcgcagctctacatgtttaaagatcatgtttaaaggatctttgttcggttctaccccaatccatatggattgagtgggtttcaatcctagagtcaaaatttgttctcatccatatcaatcctcttcaatttatatggattgaaaaaaccgaacaagtactaaggtgggtgtggttataaatc

SEQ ID NO: 219509 - DNA, 3433 bp, Zea Mays
attggatccacgtgcggattcacgcgcgcaaccggaaactggtactccgacccaccaaaagcagcgaccattagttcccccctcctttttattaattccctggtttaaaccaagcagcaaattcttgccgtagaaattagaactcccaacagaaataggtgcgtcatcgcgttcttgtaatctagtaaaagtcttccatttttctgtgatccttccccttctcccgcatcgatcgtctctcaagaacagagggtagaatcacaggtagaaagaaacaagaactgaattagccagtggtaattccggcctggcagctgaatcgtgactcaattcctgacgaatttctcgtggattccgtggagaaaaagtgtgacctttccgatgcagtacaaccaccgcagccgcttgccgccgccgccgctgccgttcggccgcggagggcatcctcgcggccccaagcagccatgctacgctccgcttcctccgccaccgtttcctccggcgccgccgccgccgccgccgtcgctagagcgcaagtacgaggtgcttatggaggccggtcgcctcgccaccgagtatctggtcgcccagggcgtgctccccccggccgctctgcagcgcggcgccggcatctctggcgcgtggcctgatcatcctcttcctccgccaccgcagctgcaacagcaggaaccccgggggggttatggccggaggcggtacaaagatgaatacaacaataatcctaggcgagccaatgacactagtagtagcaccagtagcagagatgattgcagccgtggcagctacaatggaagagggaagatgaagtatgggaaatacaggagggggtatttggattcagggagggacagggagaaggagaggagaaggccatttccaaatggccggcgctacgaggaggataaggatgaagatggggcacctgggtttcggagggagcgacacggcaatcgggggagtgatgaggtgaggcctcatgatacagaggcactgagggaagggacaccattgacagcgaaggctgtagaagggttctgcatggaggatgcaacgtcaaagattatgagctctttcaaagatactattaaggattctaatgatgcgccaaaggtgccggaggagactgaggaaggcgaggtggaggatgacagggagacgcagaattcagaaactgaggtagtgaagcaagggatagataccgatgtaaatcatgcttcttgttatgttattacagagtcaaatcccaaccagttatcagatggtaagattcaagatgagattcctgacgaggaagctgaagatgacaaaaaagttatggatgaggctactttggatcacaacacttgtgatggtgaggtgacaaatatggaagttgagatgcacgttggtaaggagagtttgattgactattgtaacttcacgagaaccccaacaaggcctaggtcagcacgtgcacacagaaatgcagcatctatcccaggagaacctgcagtagttgaaacatttgatttagtttcttctggtcaagcttcacatatggtaagcgctgaatctgctgagagattttttactaaaattgtgtcagaaaacacagaagataaattttgccaagaaaacactagctctggtgatgtccgtgctccaccaaaggagctgatgcttcttcaagaaaatggaataacagttgtgactgaaaacatggcagaagataatgttgatgcagaaccacatgtggtcgtccagcaatataaggaagaaactaacctatctccgttaacagatgccctcgagaagagcttgaggcaggaaatcacattatctccatttgcagcttctcacaaggatagcttgatgcaagagggtggcttgatgcaagaagttgatttatctccgttgacagctaatcacagggagagcttcactgaagaaaccgaattgccaccatcaacagcttctcacaaggacagcttgattgagggaactgacttaactcagacaatatcttcttataataataacttgaaattgcaatttaaggaaggaacacaggtatgcgatattgatatgctgccacaagatgtgaacctcattgagttgcccgatcaaaggaaaatcattggtcgtgatgttggtgctaaagctgtcaccggaatggaagaaggaaagctggatcaatctagctcactaaatctatcggatgttgacctagttggtggtacagaggttgccgctatacacaataatccagtgttggtccagctgtctgcagctggatcttccacagagtcaaataataaacagcaacaagatcctgaaacttttacaggtgccaatgccagtcctacagatgatttatgccagcttccattagataataaggatgttcaggtagttaatatagaatgtggcacaccagttgaagttggtggatttggtttgtcaaaatcaatacacaataatccagtgttggtccagatgtctgtagctggatcttctgcagagttaattaataaacagcaagaagatcctgaaacttttacaggtgccaatgctaatcctacagatgatttatgccagcttccattagacaataaggatgttcaagtaattgacatagaatgtggcacaccagttgaagttggtggatttgatttgtcaaagtcaaaaaataagatggtatgctctagcatggatagcatcatggaccctggcgatggaatacatacggatgttattcctgttgttcaagatggctacagccttgcattttcagattttctcagttctgatataccatgctacccgtcaatgcaatcagatcttcatgctggaataagtgccaacgactcagagacgcgtgccaccaagtgcatcctctcccccgagcagtcgagcaccctacaaccacctgtgccgttgctcctgcaggcgctgaaacggttgcagccagaagggatggcccggcgggccacccagcagccaccagaacgtgaccagcttttgtaggctcacttgccccaggtggagcagcagatgctccgccatgcctgcgcctgcagccggacggtttgtcagcagcaccagcgagctgttgtgtctctggccgcgatagaagagaagccaaggaaccgagaggaaatgggcctgcagaccaagactagaattgaggacgacttaatacgtgctgaatgaatatacgagcggcaacgagcgcacactaccggacggaggaagaagaaggagatgacaggtaggccaaggaagaagactgaaagacctgctaccggatttgtttcgaaccgttttggacctaatagagacccgagcagcgattaagactttaagagacacattttaaaactttatggaccgggttgacacaccggcgcaagttaagggaccggaaatgcac

SEQ ID NO: 219510 - DNA, 5531 bp, Zea Mays
catctctacgtcagccaacgacagcttgctctcgcccctgccttctcctctcctctgggtgttcccggcggtttcttcgccgctcaagccgcctccactctccctgccgcgctagcaactacgtttcggacttccccgctcgactttcgacctcccctgccgccaacaccgcccaaccgccgtcctccaccaccctcggccggcggcgccccgccttgccggaggcggagcagacgacgcgtggcagccgattccgcgatggatgcatccactgccggcgatggagacacgaatactttgaagaggccatgcaaaacatcgcctccagaaggcgaaacagacaagtataaacggcagaagagggaatgccaggatttctctcccagaaggtaccagcttgatgtctatgaggttgctacgaggcacaacacaattgcgatgcttgacacgggagctgggaagacaatgattgctgtcatgctcatcaagcattttgggaagatcaacaaagcaaacaatgatcgaaagctcatcatattccttgcaccaactgttcaactcgtcacacagcaatgcgaggttattaagagctacactgattttgaggtggagcattatcatggtgcaaagggtgttgatcaatggaaggctcatagctggcaacagcaactcttaaagtatcaggttatggtcatgacaccacaggtgttgctagacgctttacgccaagctttcttgatcttggacatggttagtctcatgatatttgatgaatgccatcacgcaactggtaaccacccatatactaggataatgaaggagttctatcatggatcagagcataagccaaatgtgttcggtatgacagcctctcctatcataagaaaaggggtctcctctgatttggattgcaaaaatcagctatctgagctggaaaatattttagattccaagatacactctgtggtggatagagaagagatagaactttgtgttccttctgcaaaagaagtgaatagatactatgagccaagaactgtttcttttgacgatttaagtgaagaactggaaattttgtgttccaagtatgatgggctgatcatacaattgcataacagatcgaccaatcagtacaaagatgctgatgaaataacaaaagaatcacggaaacgtctctcaaattctttagcaaagatttgctattgcctagaagatgctggtcttctttgtgctagtgaggctactaaaatctgcattgaaaggggccagagaaaaggttggctgaaggggggcagtgacaccactgatcagcaaagtggtcaaaatggacctatcctgtttgcagaaatttcaatgcttcatatggagttttttcaggaagtgttggatataatcggcaaacgcgtccaacagcaacaaggaattgatgcccttctgaactcagagcgtggatgtgtggaagcaaaaaatatgggctatatttcaccaaagctctatgagctcatgcaagtatttctctctttcagtgaccctgataacgttagatgccttgtttttgtggatcgaaagattagtgctagagtcattgagcggacgatgaagaaaataggccaactctcctgtttcagagtctcttttctaactggagggagttcttcagtggatgcactcacccctaaaatgcaaaaggatacactggattcgttccgctctggaaaggtcaacttactgtttactacagatgttgcagaagagggtatacatattccagactgctcgtgtgtaataagatttgatttgccgagaactacccgcagctatgtccaatcacgtggacgagcccgacagagggactctcagtacatactaatgattgaacagggaaatgtgaaacaagatgatttgatatctgggattatgagaagtaaggcctcgatgactgggattgcttcaaaccgagagcctgaggattcacaccccagtttcttacccactgaagaaataaatgaataccatataagcaaaacaggagccaaaataactactgattctagcatcagtgttctcaaccagtactgtgataagctcccgaaggacaagtactacaccccaaggcccaagtttcagttcactcattacggtgatggttatgagtgtactgtaacactaccatccagtgccatgtttcaacttttggtaggtcaaaaagcaagaaacatgcagaaagcaaagcagcttgtttgccttgatgcatgtaagaggctgcatcagctcggagcacttgatgaccatctttctccatcagttgaagagccgcctccggaaatttcaagcaagtctagtatctcgacacctggtgcaggtttaggtacaaccaaacggaaagaactgcatggtacaaccaaagttctttccatgtctggctcttggggttcagatagaagtgtgactaaacttcaaggctacaagttgaattttgtttgtgatcaagttggtcaaaaatactctgcctttgtccttttaattgatgctagtatagcaaaagaagctgctactttagatattgatctatatttgcatgacaagatggtaaaagcttcagtttccccttgtggacctcttgagttggatgcttggcagatggaacaaacaaaactatttcaagcacttctctttaatagtttgtttggaaaactgttcattggatcaaaagcatcaaaaaccccaagggagttcattctcaagaaagatgatgtgttcctttggaacaaagaaaatatgtatttgcttttacctgtggattctactctggattctcataaaagtgtttgcatcaactggagtgtaattgatgtagtggctacagctgttggattcatgagaagcatttattcagatggcaaatgtaacctaactgataaacttaattatgaaaaaaatggtgaagatcttattcatttggccaacaagtcatgcaagggtaatgatcttaaaaatatggtggttctagcaattcacactggaaagatctatactattgttgttgtatctgatttatgtgccaatagtaaatttgatggtacaactgacaagaaagaagcaaaattccggacatttgcagaatattttgagaagaagtatagtatatttctttgtcatcctttacaaccattgctagtgttgaaacccacccataatcctcacaatcttctttcctcaaagaatagagatgaagacaatgttgtggaaaataaaaatagggcgaacagccttgttcacatgcctccagagttgctgattccccttgatttacctattgatgttttgagagtattctacttgtttccatctctgatgcatcgtcttgagtcactaatgctagccagccaactaagaagtgaaattgcatacagagattctgatatatcaagcttcgtgattttggaagctatgacaacacttagatgctgtgaggacttctctatggagcgattagagttattgggggactctgttcttaagtatgcagtgagtgcccatcttttcatgacatttcttaataagcatgagggacagttatcgtccagaaggcaagaaacaatatgtaatgccacactttataggcttggtattgaacgcaggatacagggttacatacgtgatgctgcatttgatcctcgtcgatggcttgctcctggacagctgtccagacgtccttgtccttgtgaatgcccagtaaattctgaggttgtaactgaggatattcataggattgatgacaagtctataattataggcaaggcgtgtgacaagggacacagatggatatgttcgaaaaccatctctgattgtgttgaggctctaattggggcctattatgtcgaagggggattaaaagcagcttttgctgttctcaaatggttccagattgagactgaaatcgaggaagagttaattatggaagctctgtcgagtgcttcagtgcgaaactatcttccaaaagttgatgtagttgaattgcttgaagcaaaactaggctacacttttcaaatgaaaggtttgttaatagaggctctcacccactcatcacagcaagaatctggagcaacatactgctaccaacgcttggagttccttggtgatgcagtcttggatattttaataactcgccatctgttccttagtcataaagacacagatgagggggagctgacagatttacggtctgcatcagtaaataatgagaattttgcacaagttgcggtaaagcacaatctccatcagtttctacaacattcttcggggttcttacaagaccaaattactgaatatgtgaatagtcttgaaagttcgtccatggacagagccagccttttatccagtggaccatgtagggggccaaaagttttaggtgatattgtagaaagtatagcaggtgctattcttattgacagcaaacttgatttggatttagtttggcgggtttttaaacctcttctttcaccaattgtcacacctgagaatttggagttgccccgattcagagaacttaatgagtggtctgacaagaatgggtactttattggaattaagtgtgaaaatcgaggagacagcacaatggctatccttaacttacaactcaaggatttgcttcttgtgaggcaaggttgtgggaagaataaagtagatgcgaaagcacatgcagcttccttattgcttagggatctagaggaaaaaggacttataattccaaggaatgcaagcagagtggaacaacttgaaaagaattctggtactgtaaaacattgcaacaacgtgcttgatgttatggacacacaaaacgtagcaccacctaggcaaaaggaagtagctgtgttaagtaccaccactcctggctctgttcttgataagccattggttgtgaaggttaagttgagcaaaggaggacctcgtatatcattgtacgagtcgtgtaaaaagcttcagtggccaatgccgacctttgaattcgtgaaggtcgaaccaagcgtgtgctcctcttcctgtggttcgtcacaaaaggttgcgccccaaggattcgcatttgcttcgacaataacgttgcatataccgaacggcgatgtcatcagcctcacaggagatgggcgtgcggataagaagagctcacaggattctgctgcgttgctcatgctctatgagctgcagcggcaacgtagattccaagttcaagaagtatgaggaatcacctcgtggttccatcaccaaagatgcaatgttaccgccaccggcgattattgcttgggcatcttggagtaatgtcaccgccaaatcagtctttagtcgtcagccgcacgggggtgtaagaaaataatgtacttcattctgattctaaattataagacaccccgaattatgtaatctaattatcataatgtcctataatttgaaatggagcggtgttggttactctcgttcccgtctgatggattcagacatttcatctgtacacattaggttctggtgcatgttaa

SEQ ID NO: 219511 - DNA, 5555 bp, Zea Mays
catctctacgtcagccaacgacagcttgctctcgcccctgccttctcctctcctctgggtgttcccggcggtttcttcgccgctcaagccgcctccactctccctgccgcgctagcaactacgtttcggacttccccgctcgactttcgacctcccctgccgccaacaccgcccaaccgccgtcctccaccaccctcggccggcggcgccccgccttgccggaggcggagcagacgacgcgtggcagccgattccgcgatggatgcatccactgccggcgatggagacacgaatactttgaagaggccatgcaaaacatcgcctccagaaggcgaaacagacaagtataaacggcagaagagggaatgccaggatttctctcccagaaggtaccagcttgatgtctatgaggttgctacgaggcacaacacaattgcgatgcttgacacgggagctgggaagacaatgattgctgtcatgctcatcaagcattttgggaagatcaacaaagcaaacaatgatcgaaagctcatcatattccttgcaccaactgttcaactcgtcacacagcaatgcgaggttattaagagctacactgattttgaggtggagcattatcatggtgcaaagggtgttgatcaatggaaggctcatagctggcaacagcaactcttaaagtatcaggttatggtcatgacaccacaggtgttgctagacgctttacgccaagctttcttgatcttggacatggttagtctcatgatatttgatgaatgccatcacgcaactggtaaccacccatatactaggataatgaaggagttctatcatggatcagagcataagccaaatgtgttcggtatgacagcctctcctatcataagaaaaggggtctcctctgatttggattgcaaaaatcagctatctgagctggaaaatattttagattccaagatacactctgtggtggatagagaagagatagaactttgtgttccttctgcaaaagaagtgaatagatactatgagccaagaactgtttcttttgacgatttaagtgaagaactggaaattttgtgttccaagtatgatgggctgatcatacaattgcataacagatcgaccaatcagtacaaagatgctgatgaaataacaaaagaatcacggaaacgtctctcaaattctttagcaaagatttgctattgcctagaagatgctggtcttctttgtgctagtgaggctactaaaatctgcattgaaaggggccagagaaaaggttggctgaaggggggcagtgacaccactgatcagcaaagtggtcaaaatggacctatcctgtttgcagaaatttcaatgcttcatatggagttttttcaggaagtgttggatataatcggcaaacgcgtccaacagcaacaaggaattgatgcccttctgaactcagagcgtggatgtgtggaagcaaaaaatatgggctatatttcaccaaagctctatgagctcatgcaagtatttctctctttcagtgaccctgataacgttagatgccttgtttttgtggatcgaaagattagtgctagagtcattgagcggacgatgaagaaaataggccaactctcctgtttcagagtctcttttctaactggagggagttcttcagtggatgcactcacccctaaaatgcaaaaggatacactggattcgttccgctctggaaaggtcaacttactgtttactacagatgttgcagaagagggtatacatattccagactgctcgtgtgtaataagatttgatttgccgagaactacccgcagctatgtccaatcacgtggacgagcccgacagagggactctcagtacatactaatgattgaacagggaaatgtgaaacaagatgatttgatatctgggattatgagaagtaaggcctcgatgactgggattgcttcaaaccgagagcctgaggattcacaccccagtttcttacccactgaagaaataaatgaataccatataagcaaaacaggagccaaaataactactgattctagcatcagtgttctcaaccagtactgtgataagctcccgaaggacaagtactacaccccaaggcccaagtttcagttcactcattacggtgatggttatgagtgtactgtaacactaccatccagtgccatgtttcaacttttggtaggtcaaaaagcaagaaacatgcagaaagcaaagcagcttgtttgccttgatgcatgtaagaggctgcatcagctcggagcacttgatgaccatctttctccatcagttgaagagccgcctccggaaatttcaagcaagtctagtatctcgacacctggtgcaggtttaggtacaaccaaacggaaagaactgcatggtacaaccaaagttctttccatgtctggctcttggggttcagatagaagtgtgactaaacttcaaggctacaagttgaattttgtttgtgatcaagttggtcaaaaatactctgcctttgtccttttaattgatgctagtatagcaaaagaagctgctactttagatattgatctatatttgcatgacaagatggtaaaagcttcagtttccccttgtggacctcttgagttggatgcttggcagatggaacaaacaaaactatttcaagcacttctctttaatagtttgtttggaaaactgttcattggatcaaaagcatcaaaaaccccaagggagttcattctcaagaaagatgatgtgttcctttggaacaaagaaaatatgtatttgcttttacctgtggattctactctggattctcataaaagtgtttgcatcaactggagtgtaattgatgtagtggctacagctgttggattcatgagaagcatttattcagatggcaaatgtaacctaactgataaacttaattatgaaaaaaatggtgaagatcttattcatttggccaacaagtcatgcaagggtaatgatcttaaaaatatggtggttctagcaattcacactggaaagatctatactattgttgttgtatctgatttatgtgccaatagtaaatttgatggtacaactgacaagaaagaagcaaaattccggacatttgcagaatattttgagaagaagtatagtatatttctttgtcatcctttacaaccattgctagtgttgaaacccacccataatcctcacaatcttctttcctcaaagaatagagatgaagacaatgttgtggaaaataaaaatagggcgaacagccttgttcacatgcctccagagttgctgattccccttgatttacctattgatgttttgagagtattctacttgtttccatctctgatgcatcgtcttgagtcactaatgctagccagccaactaagaagtgaaattgcatacagagattctgatatatcaagcttcgtgattttggaagctatgacaacacttagatgctgtgaggacttctctatggagcgattagagttattgggggactctgttcttaagtatgcagtgagtgcccatcttttcatgacatttcttaataagcatgagggacagttatcgtccagaaggcaagaaacaatatgtaatgccacactttataggcttggtattgaacgcaggatacagggttacatacgtgatgctgcatttgatcctcgtcgatggcttgctcctggacagctgtccagacgtccttgtccttgtgaatgcccagtaaattctgaggttgtaactgaggatattcataggattgatgacaagtctataattataggcaaggcgtgtgacaagggacacagatggatatgttcgaaaaccatctctgattgtgttgaggctctaattggggcctattatgtcgaagggggattaaaagcagcttttgctgttctcaaatggttccagattgagactgaaatcgaggaagagttaattatggaagctctgtcgagtgcttcagtgcgaaactatcttccaaaagttgatgtagttgaattgcttgaagcaaaactaggctacacttttcaaatgaaaggtttgttaatagaggctctcacccactcatcacagcaagaatctggagcaacatactgctaccaacgcttggagttccttggtgatgcagtcttggatattttaataactcgccatctgttccttagtcataaagacacagatgagggggagctgacagatttacggtctgcatcagtaaataatgagaattttgcacaagttgcggtaaagcacaatctccatcagtttctacaacattcttcggggttcttacaagaccaaattactgaatatgtgaatagtcttgaaagttcgtccatggacagagccagccttttatccagtggaccatgtagggggccaaaagttttaggtgatattgtagaaagtatagcaggtgctattcttattgacagcaaacttgatttggatttagtttggcgggtttttaaacctcttctttcaccaattgtcacacctgagaatttggagttgccccgattcagagaacttaatgagtggtctgacaagaatgggtactttattggaattaagtgtgaaaatcgaggagacagcacaatggctatccttaacttacaactcaaggatttgcttcttgtgaggcaaggttgtgggaagaataaagtagatgcgaaagcacatgcagcttccttattgcttagggatctagagcatgtattcttgttgtgttagcaggaaaaaggacttataattccaaggaatgcaagcagagtggaacaacttgaaaagaattctggtactgtaaaacattgcaacaacgtgcttgatgttatggacacacaaaacgtagcaccacctaggcaaaaggaagtagctgtgttaagtaccaccactcctggctctgttcttgataagccattggttgtgaaggttaagttgagcaaaggaggacctcgtatatcattgtacgagtcgtgtaaaaagcttcagtggccaatgccgacctttgaattcgtgaaggtcgaaccaagcgtgtgctcctcttcctgtggttcgtcacaaaaggttgcgccccaaggattcgcatttgcttcgacaataacgttgcatataccgaacggcgatgtcatcagcctcacaggagatgggcgtgcggataagaagagctcacaggattctgctgcgttgctcatgctctatgagctgcagcggcaacgtagattccaagttcaagaagtatgaggaatcacctcgtggttccatcaccaaagatgcaatgttaccgccaccggcgattattgcttgggcatcttggagtaatgtcaccgccaaatcagtctttagtcgtcagccgcacgggggtgtaagaaaataatgtacttcattctgattctaaattataagacaccccgaattatgtaatctaattatcataatgtcctataatttgaaatggagcggtgttggttactctcgttcccgtctgatggattcagacatttcatctgtacacattaggttctggtgcatgttaa

SEQ ID NO: 219512 - DNA, 5461 bp, Zea Mays
catctctacgtcagccaacgacagcttgctctcgcccctgccttctcctctcctctgggtgttcccggcggtttcttcgccgctcaagccgcctccactctccctgccgcgctagcaactacgtttcggacttccccgctcgactttcgacctcccctgccgccaacaccgcccaaccgccgtcctccaccaccctcggccggcggcgccccgccttgccggaggcggagcagacgacgcgtggcagccgattccgcgatggatgcatccactgccggcgatggagacacgaatactttgaagaggccatgcaaaacatcgcctccagaaggcgaaacagacaagtataaacggcagaagagggaatgccaggatttctctcccagaaggtaccagcttgatgtctatgaggttgctacgaggcacaacacaattgcgatgcttgacacgggagctgggaagacaatgattgctgtcatgctcatcaagcattttgggaagatcaacaaagcaaacaatgatcgaaagctcatcatattccttgcaccaactgttcaactcgtcacacagcaatgcgaggttattaagagctacactgattttgaggtggagcattatcatggtgcaaagggtgttgatcaatggaaggctcatagctggcaacagcaactcttaaagtatcaggttatggtcatgacaccacaggtgttgctagacgctttacgccaagctttcttgatcttggacatggttagtctcatgatatttgatgaatgccatcacgcaactggtaaccacccatatactaggataatgaaggagttctatcatggatcagagcataagccaaatgtgttcggtatgacagcctctcctatcataagaaaaggggtctcctctgatttggattgcaaaaatcagctatctgagctggaaaatattttagattccaagatacactctgtggtggatagagaagagatagaactttgtgttccttctgcaaaagaagtgaatagatactatgagccaagaactgtttcttttgacgatttaagtgaagaactggaaattttgtgttccaagtatgatgggctgatcatacaattgcataacagatcgaccaatcagtacaaagatgctgatgaaataacaaaagaatcacggaaacgtctctcaaattctttagcaaagatttgctattgcctagaagatgctggtcttctttgtgctagtgaggctactaaaatctgcattgaaaggggccagagaaaaggttggctgaaggggggcagtgacaccactgatcagcaaagtggtcaaaatggacctatcctgtttgcagaaatttcaatgcttcatatggagttttttcaggaagtgttggatataatcggcaaacgcgtccaacagcaacaaggaattgatgcccttctgaactcagagcgtggatgtgtggaagcaaaaaatatgggctatatttcaccaaagctctatgagctcatgcaagtatttctctctttcagtgaccctgataacgttagatgccttgtttttgtggatcgaaagattagtgctagagtcattgagcggacgatgaagaaaataggccaactctcctgtttcagagtctcttttctaactggagggagttcttcagtggatgcactcacccctaaaatgcaaaaggatacactggattcgttccgctctggaaaggtcaacttactgtttactacagatgttgcagaagagggtatacatattccagactgctcgtgtgtaataagatttgatttgccgagaactacccgcagctatgtccaatcacgtggacgagcccgacagagggactctcagtacatactaatgattgaacagggaaatgtgaaacaagatgatttgatatctgggattatgagaagtaaggcctcgatgactgggattgcttcaaaccgagagcctgaggattcacaccccagtttcttacccactgaagaaataaatgaataccatataagcaaaacaggagccaaaataactactgattctagcatcagtgttctcaaccagtactgtgataagctcccgaaggacaagtactacaccccaaggcccaagtttcagttcactcattacggtgatggttatgagtgtactgtaacactaccatccagtgccatgtttcaacttttggtaggtcaaaaagcaagaaacatgcagaaagcaaagcagcttgtttgccttgatgcatgtaagaggctgcatcagctcggagcacttgatgaccatctttctccatcagttgaagagccgcctccggaaatttcaagcaagtctagtatctcgacacctggtgcaggtttaggtacaaccaaacggaaagaactgcatggtacaaccaaagttctttccatgtctggctcttggggttcagatagaagtgtgactaaacttcaaggctacaagttgaattttgtttgtgatcaagttggtcaaaaatactctgcctttgtccttttaattgatgctagtatagcaaaagaagctgctactttagatattgatctatatttgcatgacaagatggtaaaagcttcagtttccccttgtggacctcttgagttggatgcttggcagatggaacaaacaaaactatttcaagcacttctctttaatagtttgtttggaaaactgttcattggatcaaaagcatcaaaaaccccaagggagttcattctcaagaaagatgatgtgttcctttggaacaaagaaaatatgtatttgcttttacctgtggattctactctggattctcataaaagtgtttgcatcaactggagtgtaattgatgtagtggctacagctgttggattcatgagaagcatttattcagatggcaaatgtaacctaactgataaacttaattatgaaaaaaatggtgaagatcttattcatttggccaacaagtcatgcaagggtaatgatcttaaaaatatggtggttctagcaattcacactggaaagatctatactattgttgttgtatctgatttatgtgccaatagtaaatttgatggtacaactgacaagaaagaagcaaaattccggacatttgcagaatattttgagaagaagtatagtatatttctttgtcatcctttacaaccattgctagtgttgaaacccacccataatcctcacaatcttctttcctcaaagaatagagatgaagacaatgttgtggaaaataaaaatagggcgaacagccttgttcacatgcctccagagttgctgattccccttgatttacctattgatgttttgagagtattctacttgtttccatctctgatgcatcgtcttgagtcactaatgctagccagccaactaagaagtgaaattgcatacagagattctgatatatcaagcttcgtgattttggaagctatgacaacacttagatgctgtgaggacttctctatggagcgattagagttattgggggactctgttcttaagtatgcagtgagtgcccatcttttcatgacatttcttaataagcatgagggacagttatcgtccagaaggcaagaaacaatatgtaatgccacactttataggcttggtattgaacgcaggatacagggttacatacgtgatgctgcatttgatcctcgtcgatggcttgctcctggacagctgtccagacgtccttgtccttgtgaatgcccagtaaattctgaggttgtaactgaggatattcataggattgatgacaagtctataattataggcaaggcgtgtgacaagggacacagatggatatgttcgaaaaccatctctgattgtgttgaggctctaattggggcctattatgtcgaagggggattaaaagcagcttttgctgttctcaaatggttccagattgagactgaaatcgaggaagagttaattatggaagctctgtcgagtgcttcagtgcgaaactatcttccaaaagttgatgtagttgaattgcttgaagcaaaactaggctacacttttcaaatgaaaggtttgttaatagaggctctcacccactcatcacagcaagaatctggagcaacatactgctaccaacgcttggagttccttggtgatgcagtcttggatattttaataactcgccatctgttccttagtcataaagacacagatgagggggagctgacagatttacggtctgcatcagtaaataatgagaattttgcacaagttgcggtaaagcacaatctccatcagtttctacaacattcttcggggttcttacaagaccaaattactgaatatgtgaatagtcttgaaagttcgtccatggacagagccagccttttatccagtggaccatgtagggggccaaaatttggcgggtttttaaacctcttctttcaccaattgtcacacctgagaatttggagttgccccgattcagagaacttaatgagtggtctgacaagaatgggtactttattggaattaagtgtgaaaatcgaggagacagcacaatggctatccttaacttacaactcaaggatttgcttcttgtgaggcaaggttgtgggaagaataaagtagatgcgaaagcacatgcagcttccttattgcttagggatctagaggaaaaaggacttataattccaaggaatgcaagcagagtggaacaacttgaaaagaattctggtactgtaaaacattgcaacaacgtgcttgatgttatggacacacaaaacgtagcaccacctaggcaaaaggaagtagctgtgttaagtaccaccactcctggctctgttcttgataagccattggttgtgaaggttaagttgagcaaaggaggacctcgtatatcattgtacgagtcgtgtaaaaagcttcagtggccaatgccgacctttgaattcgtgaaggtcgaaccaagcgtgtgctcctcttcctgtggttcgtcacaaaaggttgcgccccaaggattcgcatttgcttcgacaataacgttgcatataccgaacggcgatgtcatcagcctcacaggagatgggcgtgcggataagaagagctcacaggattctgctgcgttgctcatgctctatgagctgcagcggcaacgtagattccaagttcaagaagtatgaggaatcacctcgtggttccatcaccaaagatgcaatgttaccgccaccggcgattattgcttgggcatcttggagtaatgtcaccgccaaatcagtctttagtcgtcagccgcacgggggtgtaagaaaataatgtacttcattctgattctaaattataagacaccccgaattatgtaatctaattatcataatgtcctataatttgaaatggagcggtgttggttactctcgttcccgtctgatggattcagacatttcatctgtacacattaggttctggtgcatgttaa

SEQ ID NO: 219513 - DNA, 5557 bp, Zea Mays
atctctacgtcagccaacgacagcttgctctcgcccctgccttctcctctcctctgggtgttcccggcggtttcttcgccgctcaagccgcctccactctccctgccgcgctagcaactacgtttcggacttccccgctcgactttcgacctcccctgccgccaacaccgcccaaccgccgtcctccaccaccctcggccggcggcgccccgccttgccggaggcggagcagacgacgcgtggcagccgattccgcgatggatgcatccactgccggcgatggagacacgaatactttgaagaggccatgcaaaacatcgcctccagaaggcgaaacagacaagtataaacggcagaagagggaatgccaggatttctctcccagaaggtaccagcttgatgtctatgaggttgctacgaggcacaacacaattgcgatgcttgacacgggagctgggaagacaatgattgctgtcatgctcatcaagcattttgggaagatcaacaaagcaaacaatgatcgaaagctcatcatattccttgcaccaactgttcaactcgtcacacagcaatgcgaggttattaagagctacactgattttgaggtggagcattatcatggtgcaaagggtgttgatcaatggaaggctcatagctggcaacagcaactcttaaagtatcaggttatggtcatgacaccacaggtgttgctagacgctttacgccaagctttcttgatcttggacatggttagtctcatgatatttgatgaatgccatcacgcaactggtaaccacccatatactaggataatgaagtttctgttattttgcccgtttgaacaggagttctatcatggatcagagcataagccaaatgtgttcggtatgacagcctctcctatcataagaaaaggggtctcctctgatttggattgcaaaaatcagctatctgagctggaaaatattttagattccaagatacactctgtggtggatagagaagagatagaactttgtgttccttctgcaaaagaagtgaatagatactatgagccaagaactgtttcttttgacgatttaagtgaagaactggaaattttgtgttccaagtatgatgggctgatcatacaattgcataacagatcgaccaatcagtacaaagatgctgatgaaataacaaaagaatcacggaaacgtctctcaaattctttagcaaagatttgctattgcctagaagatgctggtcttctttgtgctagtgaggctactaaaatctgcattgaaaggggccagagaaaaggttggctgaaggggggcagtgacaccactgatcagcaaagtggtcaaaatggacctatcctgtttgcagaaatttcaatgcttcatatggagttttttcaggaagtgttggatataatcggcaaacgcgtccaacagcaacaaggaattgatgcccttctgaactcagagcgtggatgtgtggaagcaaaaaatatgggctatatttcaccaaagctctatgagctcatgcaagtatttctctctttcagtgaccctgataacgttagatgccttgtttttgtggatcgaaagattagtgctagagtcattgagcggacgatgaagaaaataggccaactctcctgtttcagagtctcttttctaactggagggagttcttcagtggatgcactcacccctaaaatgcaaaaggatacactggattcgttccgctctggaaaggtcaacttactgtttactacagatgttgcagaagagggtatacatattccagactgctcgtgtgtaataagatttgatttgccgagaactacccgcagctatgtccaatcacgtggacgagcccgacagagggactctcagtacatactaatgattgaacagggaaatgtgaaacaagatgatttgatatctgggattatgagaagtaaggcctcgatgactgggattgcttcaaaccgagagcctgaggattcacaccccagtttcttacccactgaagaaataaatgaataccatataagcaaaacaggagccaaaataactactgattctagcatcagtgttctcaaccagtactgtgataagctcccgaaggacaagtactacaccccaaggcccaagtttcagttcactcattacggtgatggttatgagtgtactgtaacactaccatccagtgccatgtttcaacttttggtaggtcaaaaagcaagaaacatgcagaaagcaaagcagcttgtttgccttgatgcatgtaagaggctgcatcagctcggagcacttgatgaccatctttctccatcagttgaagagccgcctccggaaatttcaagcaagtctagtatctcgacacctggtgcaggtttaggtacaaccaaacggaaagaactgcatggtacaaccaaagttctttccatgtctggctcttggggttcagatagaagtgtgactaaacttcaaggctacaagttgaattttgtttgtgatcaagttggtcaaaaatactctgcctttgtccttttaattgatgctagtatagcaaaagaagctgctactttagatattgatctatatttgcatgacaagatggtaaaagcttcagtttccccttgtggacctcttgagttggatgcttggcagatggaacaaacaaaactatttcaagcacttctctttaatagtttgtttggaaaactgttcattggatcaaaagcatcaaaaaccccaagggagttcattctcaagaaagatgatgtgttcctttggaacaaagaaaatatgtatttgcttttacctgtggattctactctggattctcataaaagtgtttgcatcaactggagtgtaattgatgtagtggctacagctgttggattcatgagaagcatttattcagatggcaaatgtaacctaactgataaacttaattatgaaaaaaatggtgaagatcttattcatttggccaacaagtcatgcaagggtaatgatcttaaaaatatggtggttctagcaattcacactggaaagatctatactattgttgttgtatctgatttatgtgccaatagtaaatttgatggtacaactgacaagaaagaagcaaaattccggacatttgcagaatattttgagaagaagtatagtatatttctttgtcatcctttacaaccattgctagtgttgaaacccacccataatcctcacaatcttctttcctcaaagaatagagatgaagacaatgttgtggaaaataaaaatagggcgaacagccttgttcacatgcctccagagttgctgattccccttgatttacctattgatgttttgagagtattctacttgtttccatctctgatgcatcgtcttgagtcactaatgctagccagccaactaagaagtgaaattgcatacagagattctgatatatcaagcttcgtgattttggaagctatgacaacacttagatgctgtgaggacttctctatggagcgattagagttattgggggactctgttcttaagtatgcagtgagtgcccatcttttcatgacatttcttaataagcatgagggacagttatcgtccagaaggcaagaaacaatatgtaatgccacactttataggcttggtattgaacgcaggatacagggttacatacgtgatgctgcatttgatcctcgtcgatggcttgctcctggacagctgtccagacgtccttgtccttgtgaatgcccagtaaattctgaggttgtaactgaggatattcataggattgatgacaagtctataattataggcaaggcgtgtgacaagggacacagatggatatgttcgaaaaccatctctgattgtgttgaggctctaattggggcctattatgtcgaagggggattaaaagcagcttttgctgttctcaaatggttccagattgagactgaaatcgaggaagagttaattatggaagctctgtcgagtgcttcagtgcgaaactatcttccaaaagttgatgtagttgaattgcttgaagcaaaactaggctacacttttcaaatgaaaggtttgttaatagaggctctcacccactcatcacagcaagaatctggagcaacatactgctaccaacgcttggagttccttggtgatgcagtcttggatattttaataactcgccatctgttccttagtcataaagacacagatgagggggagctgacagatttacggtctgcatcagtaaataatgagaattttgcacaagttgcggtaaagcacaatctccatcagtttctacaacattcttcggggttcttacaagaccaaattactgaatatgtgaatagtcttgaaagttcgtccatggacagagccagccttttatccagtggaccatgtagggggccaaaagttttaggtgatattgtagaaagtatagcaggtgctattcttattgacagcaaacttgatttggatttagtttggcgggtttttaaacctcttctttcaccaattgtcacacctgagaatttggagttgccccgattcagagaacttaatgagtggtctgacaagaatgggtactttattggaattaagtgtgaaaatcgaggagacagcacaatggctatccttaacttacaactcaaggatttgcttcttgtgaggcaaggttgtgggaagaataaagtagatgcgaaagcacatgcagcttccttattgcttagggatctagaggaaaaaggacttataattccaaggaatgcaagcagagtggaacaacttgaaaagaattctggtactgtaaaacattgcaacaacgtgcttgatgttatggacacacaaaacgtagcaccacctaggcaaaaggaagtagctgtgttaagtaccaccactcctggctctgttcttgataagccattggttgtgaaggttaagttgagcaaaggaggacctcgtatatcattgtacgagtcgtgtaaaaagcttcagtggccaatgccgacctttgaattcgtgaaggtcgaaccaagcgtgtgctcctcttcctgtggttcgtcacaaaaggttgcgccccaaggattcgcatttgcttcgacaataacgttgcatataccgaacggcgatgtcatcagcctcacaggagatgggcgtgcggataagaagagctcacaggattctgctgcgttgctcatgctctatgagctgcagcggcaacgtagattccaagttcaagaagtatgaggaatcacctcgtggttccatcaccaaagatgcaatgttaccgccaccggcgattattgcttgggcatcttggagtaatgtcaccgccaaatcagtctttagtcgtcagccgcacgggggtgtaagaaaataatgtacttcattctgattctaaattataagacaccccgaattatgtaatctaattatcataatgtcctataatttgaaatggagcggtgttggttactctcgttcccgtctgatggattcagacatttcatctgtacacattaggttctggtgcatgttaa

SEQ ID NO: 219514 - DNA, 5494 bp, Zea Mays
atctctacgtcagccaacgacagcttgctctcgcccctgccttctcctctcctctgggtgttcccggcggtttcttcgccgctcaagccgcctccactctccctgccgcgctagcaactacgtttcggacttccccgctcgactttcgacctcccctgccgccaacaccgcccaaccgccgtcctccaccaccctcggccggcggcgccccgccttgccggaggcggagcagacgacgcgtggcagccgattccgcgatggatgcatccactgccggcgatggagacacgaatactttgaagaggccatgcaaaacatcgcctccagaaggcgaaacagacaagtataaacggcagaagagggaatgccaggatttctctcccagaaggtaccagcttgatgtctatgaggttgctacgaggcacaacacaattgcgatgcttgacacgggagctgggaagacaatgattgctgtcatgctcatcaagcattttgggaagatcaacaaagcaaacaatgatcgaaagctcatcatattccttgcaccaactgttcaactcgtcacacagcaatgcgaggttattaagagctacactgattttgaggtggagcattatcatggtgcaaagggtgttgatcaatggaaggctcatagctggcaacagcaactcttaaagtatcaggttatggtcatgacaccacaggtgttgctagacgctttacgccaagctttcttgatcttggacatggttagtctcatgatatttgatgaatgccatcacgcaactggtaaccacccatatactaggataatgaaggagttctatcatggatcagagcataagccaaatgtgttcggtatgacagcctctcctatcataagaaaaggggtctcctctgatttggattgcaaaaatcagctatctgagctggaaaatattttagattccaagatacactctgtggtggatagagaagagatagaactttgtgttccttctgcaaaagaagtgaatagatactatgagccaagaactgtttcttttgacgatttaagtgaagaactggaaattttgtgttccaagtatgatgggctgatcatacaattgcataacagatcgaccaatcagtacaaagatgctgatgaaataacaaaagaatcacggaaacgtctctcaaattctttagcaaagatttgctattgcctagaagatgctggtcttctttgtgctagtgaggctactaaaatctgcattgaaaggggccagagaaaaggttggctgaaggggggcagtgacaccactgatcagcaaagtggtcaaaatggacctatcctgtttgcagaaatttcaatgcttcatatggagttttttcaggaagtgttggatataatcggcaaacgcgtccaacagcaacaaggaattgatgcccttctgaactcagagcgtggatgtgtggaagcaaaaaatatgggctatatttcaccaaagctctatgagctcatgcaagtatttctctctttcagtgaccctgataacgttagatgccttgtttttgtggatcgaaagattagtgctagagtcattgagcggacgatgaagaaaataggccaactctcctgtttcagagtctcttttctaactggagggagttcttcagtggatgcactcacccctaaaatgcaaaaggatacactggattcgttccgctctggaaaggtcaacttactgtttactacagatgttgcagaagagggtatacatattccagactgctcgtgtgtaataagatttgatttgccgagaactacccgcagctatgtccaatcacgtggacgagcccgacagagggactctcagtacatactaatgattgaacagggaaatgtgaaacaagatgatttgatatctgggattatgagaagtaaggcctcgatgactgggattgcttcaaaccgagagcctgaggattcacaccccagtttcttacccactgaagaaataaatgaataccatataagcaaaacaggagccaaaataactactgattctagcatcagtgttctcaaccagtactgtgataagctcccgaaggacaagtactacaccccaaggcccaagtttcagttcactcattacggtgatggttatgagtgtactgtaacactaccatccagtgccatgtttcaacttttggtaggtcaaaaagcaagaaacatgcagaaagcaaagcagcttgtttgccttgatgcatgtaagaggctgcatcagctcggagcacttgatgaccatctttctccatcagttgaagagccgcctccggaaatttcaagtacaaccaaacggaaagaactgcatggtacaaccaaagttctttccatgtctggctcttggggttcagatagaagtgtgactaaacttcaaggctacaagttgaattttgtttgtgatcaagttggtcaaaaatactctgcctttgtccttttaattgatgctagtatagcaaaagaagctgctactttagatattgatctatatttgcatgacaagatggtaaaagcttcagtttccccttgtggacctcttgagttggatgcttggcagatggaacaaacaaaactatttcaagcacttctctttaatagtttgtttggaaaactgttcattggatcaaaagcatcaaaaaccccaagggagttcattctcaagaaagatgatgtgttcctttggaacaaagaaaatatgtatttgcttttacctgtggattctactctggattctcataaaagtgtttgcatcaactggagtgtaattgatgtagtggctacagctgttggattcatgagaagcatttattcagatggcaaatgtaacctaactgataaacttaattatgaaaaaaatggtgaagatcttattcatttggccaacaagtcatgcaagggtaatgatcttaaaaatatggtggttctagcaattcacactggaaagatctatactattgttgttgtatctgatttatgtgccaatagtaaatttgatggtacaactgacaagaaagaagcaaaattccggacatttgcagaatattttgagaagaagtatagtatatttctttgtcatcctttacaaccattgctagtgttgaaacccacccataatcctcacaatcttctttcctcaaagaatagagatgaagacaatgttgtggaaaataaaaatagggcgaacagccttgttcacatgcctccagagttgctgattccccttgatttacctattgatgttttgagagtattctacttgtttccatctctgatgcatcgtcttgagtcactaatgctagccagccaactaagaagtgaaattgcatacagagattctgatatatcaagcttcgtgattttggaagctatgacaacacttagatgctgtgaggacttctctatggagcgattagagttattgggggactctgttcttaagtatgcagtgagtgcccatcttttcatgacatttcttaataagcatgagggacagttatcgtccagaaggcaagaaacaatatgtaatgccacactttataggcttggtattgaacgcaggatacagggttacatacgtgatgctgcatttgatcctcgtcgatggcttgctcctggacagctgtccagacgtccttgtccttgtgaatgcccagtaaattctgaggttgtaactgaggatattcataggattgatgacaagtctataattataggcaaggcgtgtgacaagggacacagatggatatgttcgaaaaccatctctgattgtgttgaggctctaattggggcctattatgtcgaagggggattaaaagcagcttttgctgttctcaaatggttccagattgagactgaaatcgaggaagagttaattatggaagctctgtcgagtgcttcagtgcgaaactatcttccaaaagttgatgtagttgaattgcttgaagcaaaactaggctacacttttcaaatgaaaggtttgttaatagaggctctcacccactcatcacagcaagaatctggagcaacatactgctaccaacgcttggagttccttggtgatgcagtcttggatattttaataactcgccatctgttccttagtcataaagacacagatgagggggagctgacagatttacggtctgcatcagtaaataatgagaattttgcacaagttgcggtaaagcacaatctccatcagtttctacaacattcttcggggttcttacaagaccaaattactgaatatgtgaatagtcttgaaagttcgtccatggacagagccagccttttatccagtggaccatgtagggggccaaaagttttaggtgatattgtagaaagtatagcaggtgctattcttattgacagcaaacttgatttggatttagtttggcgggtttttaaacctcttctttcaccaattgtcacacctgagaatttggagttgccccgattcagagaacttaatgagtggtctgacaagaatgggtactttattggaattaagtgtgaaaatcgaggagacagcacaatggctatccttaacttacaactcaaggatttgcttcttgtgaggcaaggttgtgggaagaataaagtagatgcgaaagcacatgcagcttccttattgcttagggatctagaggaaaaaggacttataattccaaggaatgcaagcagagtggaacaacttgaaaagaattctggtactgtaaaacattgcaacaacgtgcttgatgttatggacacacaaaacgtagcaccacctaggcaaaaggaagtagctgtgttaagtaccaccactcctggctctgttcttgataagccattggttgtgaaggttaagttgagcaaaggaggacctcgtatatcattgtacgagtcgtgtaaaaagcttcagtggccaatgccgacctttgaattcgtgaaggtcgaaccaagcgtgtgctcctcttcctgtggttcgtcacaaaaggttgcgccccaaggattcgcatttgcttcgacaataacgttgcatataccgaacggcgatgtcatcagcctcacaggagatgggcgtgcggataagaagagctcacaggattctgctgcgttgctcatgctctatgagctgcagcggcaacgtagattccaagttcaagaagtatgaggaatcacctcgtggttccatcaccaaagatgcaatgttaccgccaccggcgattattgcttgggcatcttggagtaatgtcaccgccaaatcagtctttagtcgtcagccgcacgggggtgtaagaaaataatgtacttcattctgattctaaattataagacaccccgaattatgtaatctaattatcataatgtcctataatttgaaatggagcggtgttggttactctcgttcccgtctgatggattcagacatttcatctgtacacattaggttctggtgcatgttaa

SEQ ID NO: 219515 - DNA, 5508 bp, Zea Mays
atctctacgtcagccaacgacagcttgctctcgcccctgccttctcctctcctctgggtgttcccggcggtttcttcgccgctcaagccgcctccactctccctgccgcgctagcaactacgtttcggacttccccgctcgactttcgacctcccctgccgccaacaccgcccaaccgccgtcctccaccaccctcggccggcggcgccccgccttgccggaggcggagcagacgacgcgtggcagccgattccgcgatggatgcatccactgccggcgatggagacacgaatactttgaagaggccatgcaaaacatcgcctccagaaggcgaaacagacaagtataaacggcagaagagggaatgccaggatttctctcccagaaggtaccagcttgatgtctatgaggttgctacgaggcacaacacaattgcgatgcttgacacgggagctgggaagacaatgattgctgtcatgctcatcaagcattttgggaagatcaacaaagcaaacaatgatcgaaagctcatcatattccttgcaccaactgttcaactcgtcacacagcaatgcgaggttattaagagctacactgattttgaggtggagcattatcatggtgcaaagggtgttgatcaatggaaggctcatagctggcaacagcaactcttaaagtatcaggttatggtcatgacaccacaggtgttgctagacgctttacgccaagctttcttgatcttggacatggttagtctcatgatatttgatgaatgccatcacgcaactggtaaccacccatatactaggataatgaaggagttctatcatggatcagagcataagccaaatgtgttcggtatgacagcctctcctatcataagaaaaggggtctcctctgatttggattgcaaaaatcagctatctgagctggaaaatattttagattccaagatacactctgtggtggatagagaagagatagaactttgtgttccttctgcaaaagaagtgaatagatactatgagccaagaactgtttcttttgacgatttaagtgaagaactggaaattttgtgttccaagtatgatgggctgatcatacaattgcataacagatcgaccaatcagtacaaagatgctgatgaaataacaaaagaatcacggaaacgtctctcaaattctttagcaaagatttgctattgcctagaagatgctggtcttctttgtgctagtgaggctactaaaatctgcattgaaaggggccagagaaaaggttggctgaaggggggcagtgacaccactgatcagcaaagtggtcaaaatggacctatcctgtttgcagaaatttcaatgcttcatatggagttttttcaggaagtgttggatataatcggcaaacgcgtccaacagcaacaaggaattgatgcccttctgaactcagagcgtggatgtgtggaagcaaaaaatatgggctatatttcaccaaagctctatgagctcatgcaagtatttctctctttcagtgaccctgataacgttagatgccttgtttttgtggatcgaaagattagtgctagagtcattgagcggacgatgaagaaaataggccaactctcctgtttcagagtctcttttctaactggagggagttcttcagtggatgcactcacccctaaaatgcaaaaggatacactggattcgttccgctctggaaagatgttgcagaagagggtatacatattccagactgctcgtgtgtaataagatttgatttgccgagaactacccgcagctatgtccaatcacgtggacgagcccgacagagggactctcagtacatactaatgattgaacagggaaatgtgaaacaagatgatttgatatctgggattatgagaagtaaggcctcgatgactgggattgcttcaaaccgagagcctgaggattcacaccccagtttcttacccactgaagaaataaatgaataccatataagcaaaacaggagccaaaataactactgattctagcatcagtgttctcaaccagtactgtgataagctcccgaaggacaagtactacaccccaaggcccaagtttcagttcactcattacggtgatggttatgagtgtactgtaacactaccatccagtgccatgtttcaacttttggtaggtcaaaaagcaagaaacatgcagaaagcaaagcagcttgtttgccttgatgcatgtaagaggctgcatcagctcggagcacttgatgaccatctttctccatcagttgaagagccgcctccggaaatttcaagcaagtctagtatctcgacacctggtgcaggtttaggtacaaccaaacggaaagaactgcatggtacaaccaaagttctttccatgtctggctcttggggttcagatagaagtgtgactaaacttcaaggctacaagttgaattttgtttgtgatcaagttggtcaaaaatactctgcctttgtccttttaattgatgctagtatagcaaaagaagctgctactttagatattgatctatatttgcatgacaagatggtaaaagcttcagtttccccttgtggacctcttgagttggatgcttggcagatggaacaaacaaaactatttcaagcacttctctttaatagtttgtttggaaaactgttcattggatcaaaagcatcaaaaaccccaagggagttcattctcaagaaagatgatgtgttcctttggaacaaagaaaatatgtatttgcttttacctgtggattctactctggattctcataaaagtgtttgcatcaactggagtgtaattgatgtagtggctacagctgttggattcatgagaagcatttattcagatggcaaatgtaacctaactgataaacttaattatgaaaaaaatggtgaagatcttattcatttggccaacaagtcatgcaagggtaatgatcttaaaaatatggtggttctagcaattcacactggaaagatctatactattgttgttgtatctgatttatgtgccaatagtaaatttgatggtacaactgacaagaaagaagcaaaattccggacatttgcagaatattttgagaagaagtatagtatatttctttgtcatcctttacaaccattgctagtgttgaaacccacccataatcctcacaatcttctttcctcaaagaatagagatgaagacaatgttgtggaaaataaaaatagggcgaacagccttgttcacatgcctccagagttgctgattccccttgatttacctattgatgttttgagagtattctacttgtttccatctctgatgcatcgtcttgagtcactaatgctagccagccaactaagaagtgaaattgcatacagagattctgatatatcaagcttcgtgattttggaagctatgacaacacttagatgctgtgaggacttctctatggagcgattagagttattgggggactctgttcttaagtatgcagtgagtgcccatcttttcatgacatttcttaataagcatgagggacagttatcgtccagaaggcaagaaacaatatgtaatgccacactttataggcttggtattgaacgcaggatacagggttacatacgtgatgctgcatttgatcctcgtcgatggcttgctcctggacagctgtccagacgtccttgtccttgtgaatgcccagtaaattctgaggttgtaactgaggatattcataggattgatgacaagtctataattataggcaaggcgtgtgacaagggacacagatggatatgttcgaaaaccatctctgattgtgttgaggctctaattggggcctattatgtcgaagggggattaaaagcagcttttgctgttctcaaatggttccagattgagactgaaatcgaggaagagttaattatggaagctctgtcgagtgcttcagtgcgaaactatcttccaaaagttgatgtagttgaattgcttgaagcaaaactaggctacacttttcaaatgaaaggtttgttaatagaggctctcacccactcatcacagcaagaatctggagcaacatactgctaccaacgcttggagttccttggtgatgcagtcttggatattttaataactcgccatctgttccttagtcataaagacacagatgagggggagctgacagatttacggtctgcatcagtaaataatgagaattttgcacaagttgcggtaaagcacaatctccatcagtttctacaacattcttcggggttcttacaagaccaaattactgaatatgtgaatagtcttgaaagttcgtccatggacagagccagccttttatccagtggaccatgtagggggccaaaagttttaggtgatattgtagaaagtatagcaggtgctattcttattgacagcaaacttgatttggatttagtttggcgggtttttaaacctcttctttcaccaattgtcacacctgagaatttggagttgccccgattcagagaacttaatgagtggtctgacaagaatgggtactttattggaattaagtgtgaaaatcgaggagacagcacaatggctatccttaacttacaactcaaggatttgcttcttgtgaggcaaggttgtgggaagaataaagtagatgcgaaagcacatgcagcttccttattgcttagggatctagaggaaaaaggacttataattccaaggaatgcaagcagagtggaacaacttgaaaagaattctggtactgtaaaacattgcaacaacgtgcttgatgttatggacacacaaaacgtagcaccacctaggcaaaaggaagtagctgtgttaagtaccaccactcctggctctgttcttgataagccattggttgtgaaggttaagttgagcaaaggaggacctcgtatatcattgtacgagtcgtgtaaaaagcttcagtggccaatgccgacctttgaattcgtgaaggtcgaaccaagcgtgtgctcctcttcctgtggttcgtcacaaaaggttgcgccccaaggattcgcatttgcttcgacaataacgttgcatataccgaacggcgatgtcatcagcctcacaggagatgggcgtgcggataagaagagctcacaggattctgctgcgttgctcatgctctatgagctgcagcggcaacgtagattccaagttcaagaagtatgaggaatcacctcgtggttccatcaccaaagatgcaatgttaccgccaccggcgattattgcttgggcatcttggagtaatgtcaccgccaaatcagtctttagtcgtcagccgcacgggggtgtaagaaaataatgtacttcattctgattctaaattataagacaccccgaattatgtaatctaattatcataatgtcctataatttgaaatggagcggtgttggttactctcgttcccgtctgatggattcagacatttcatctgtacacattaggttctggtgcatgttaa

SEQ ID NO: 219516 - DNA, 528 bp, Zea Mays
caagcactgtgctgttcaggagtaggggtagtttgcgcatacgcggctcaatggcaatcatttgactgggccgatcccaagggaactttctggaatatctagtctcaaagttgtcgatgtttcaagcaatgatttatgtgggacgattcccacatctggaccatttgagcacattcctctgagcaactttgagaagaacccacgcttggaaggtccagagctacaaggcctggccatatatgacaccaactgctagagggggcaccacgaacaaaagaatcgctaggaagaaatgggcgaacaaggttaccaaaaagtgggcgacatagattattaggtctggttctgctgccactctgtaatcccccctgcatagctcttatttgtaacttgctgtctgcacgaaagttggtggatgttttagcagaatgctttctgcccgtgaaagtaaacttgaaactgcttattatgagtgaaatgatgatgttatttcccttgccatgagtttttggttccttgtgttttttt

SEQ ID NO: 219517 - DNA, 615 bp, Zea Mays
cagcattcaaggaacaatcccttctgagcttggtaatttgaagaatctaataagcttggacttgtacaagaacaacatttcggggacaatacctccttcccttggaaagttgaaatcccttgtattcctgcggctcaatggcaatcatttgactgggccgatcccaagggaactttctggaatatctagtctcaaagttgtcgatgtttcaagcaatgatttatgtgggacgattcccacatctggaccatttgagcacattcctctgagcaactttgagaagaacccacgcttggaaggtccagagctacaaggcctggccatatatgacaccaactgctagagggggcaccacgaacaaaagaatcgctaggaagaaatgggcgaacaaggttaccaaaaagtgggcgacatagattattaggtctggttctgctgccactctgtaatcccccctgcatagctcttatttgtaacttgctgtctgcacgaaagttggtggatgttttagcagaatgctttctgcccgtgaaagtaaacttgaaactgcttattatgagtgaaatgatgatgttatttcccttgccatgagtttttggttccttgtgttttttt

SEQ ID NO: 219518 - DNA, 755 bp, Zea Mays
tcaggatttcatatttcattgaagaatttatgacaatctaagacacacacatgagatcttggtaatttgaacttatctggtcatctggtgcctgagcttgggaaattggagcatctgcagtacctggaactttacaagaacagcattcaaggaacaatcccttctgagcttggtaatttgaagaatctaataagcttggacttgtacaagaacaacatttcggggacaatacctccttcccttggaaagttgaaatcccttgtattcctgcggctcaatggcaatcatttgactgggccgatcccaagggaactttctggaatatctagtctcaaagttgtcgatgtttcaagcaatgatttatgtgggacgattcccacatctggaccatttgagcacattcctctgagcaactttgagaagaacccacgcttggaaggtccagagctacaaggcctggccatatatgacaccaactgctagagggggcaccacgaacaaaagaatcgctaggaagaaatgggcgaacaaggttaccaaaaagtgggcgacatagattattaggtctggttctgctgccactctgtaatcccccctgcatagctcttatttgtaacttgctgtctgcacgaaagttggtggatgttttagcagaatgctttctgcccgtgaaagtaaacttgaaactgcttattatgagtgaaatgatgatgttatttcccttgccatgagtttttggttccttgtgttttttt

SEQ ID NO: 219519 - DNA, 3164 bp, Zea Mays
aaccaacattccagatcaagtaacctgtccggcgtgcgaggagtggaagttgacagcacccgccgctttaaaccccgtccgtgtcccgctagccgccattgcagagcactgactgagcacaccacccaccagctccgaagtcatgtcccacctcgacgcggcctcgctcctcgccccctcgccgccgctggcaaagccccacccgcgcagccgcttcctctgcctcatctcctccatgctcgccgtcctcggcgcctccctcgcgggtctcctcttattcgcgctccaccccgcgccgaacccggtcccgaactacgcgtcgctcttcctctccctcggatccaacgacaccgccgcctcgcacctccgagcgctcactctccacccgcacgtcgcggggaccaaggcgaacgccctcaccgcccgctacgtgttcgacgcgctctccgcgctctccttccccacccacatcacgccttactccgtcctcctctcctaccccgtccaccgctccctctccctctcggcgccaggccgcggcgtcgtcacctccttctccctaaagcaggagacctaccccaacgacccctacgcagcagccgcggcggagaccatcccgacgttctacgcgtactcggcctccgggtcggtctccgcggaggccgtgtatgctaactacggccgcgaggaggacttctcttacctcgcctcccgcggcgtggacgtcgcgggcaaggtcgcgttcgcgcggtacgggaggatccactgcgaggacatagcgcacaacgcgcgcgccgccggcgccgcggccgcggtggtgtacactgacccgctgcagtacggcggcgcacccggtgaggggtggttccccgactcgcggtggctgccgcccagcggtgtgcaggtggggagcctcttccggggcgtgggggacccgacgacgccgatgtgggcatcgtccgagggctgcgagcgcgtcagcttggaggaggccatgaataccgatgacatgccgctcatcccagccctgccggtatcggctcaggacgcgatggagatacacagagccatgggcggggccgtggcgccggaggactggcagggccgtgaagacggacccgtttaccgcctcgggccagggccggcagttttgaacctgacatatcttgggaatgattcgatggcaacgattgagaatgtcttcgccattatcgagggcgccgaagagcccgatagatatgtcattcttggtaaccatcgtgatgcttggacgttcggtgcatctgatcccaacagtggaacagcagctatgattgagttagctaaaaggttttcaatgctgcaaaaacaaggatggaggcctcgaagaactattatcttctgtagttgggacgcggaagaatacggactgacagggtcaactgaatgggttgaagaaaaccgggagatgttgtattctagagctgttgcttatctgaatattgacgtttcagtcgttggtccaggattcctgccttctacaactccccaacttgatgagttacttcagcaagtaactaaagtggttcaagaccctgataattcatctcagactgtgtatgattcatggattaaatcgagcactcctctccgggtgagttgttgcaacttgcttatccaacagcctaccttctatgtagtgctgagaatccagttagttgtcactataaaatagtgattgtattgttaccaagctacaagttccttttcagtttcagttccattcctcgagaattatgtggtttcaggaggacagaccacttcgacttcctgacaaattatataacattactcactattcactgcatatctcttgcgttaaggttcttagactaggtgatggaggatcagactattcagcattcgtccaacatgttggtattccttcgatgaatataatttttggagaaggaccaggatatccggtttaccactccttatatgatgactacgtatggatggcgaaattcggagatcctgcgttccgtaggcatgtggcagctgctagcatatggggaatgatggctttgaggttggcaaatgaagacatcctacccttcaattacatgtcctatgcaattgagcttgaggcatacacaaaaacggtagagaatgaagtgaagggaacaactgtcacttgttcccctctgtacaactcaatcagaactctcggagcggcagctaccaaagtgaataacgaacaaaaggaacttcaaaagctactcttgagcaagcagctgaacaaggattcactgaaaatccgacaactcaatgaccgtcttatgcagaccgagcgtgcattcactagcagggaaggcatcttcaagctagaatggtttaagcatctggtgtatggaccttcagaccagaatgactgggatactgcagtctatccaggtatagccaatgccatagccagcgcccggagcagcaacacttcggagtcctggaagtttgtacagcatgagatctacagagtagccagggccgtgacacaagcatctgctatactgagtggccgtctgacatgacaggattcaaaccatattcgttaaaaaagattgttactgtggatttcggaagttttgacattttttgaaactttcgactatgaaatatctgagttgcagagaaagaccgtgcaccacattagggcttgttcgttttgctctcaatccatgtggattgggtgggattggatgagtttcaatcccaaacaagtcaaaatctttcacaattttttccaatcccatccaatccacatgagataggaataaccgaacaagcccttaaaaggatttggtataggtcagaactttccgatagggggttggaaatttcaacttgggcatactttccaaacacaaaaaagaagtgtgcagtgttgtgcttagtgtctctcagttttatattaaagaatttgttatgcacttaagcacaactagtagtgagagttgagccgctttttagtacaggttccctatactcaagaatagaaaacaagtttacaaagcattgaggttgaagcttgattgaaagctctcatttcctgtacatctattggacaaatctccatttgtgcttaacaactataatcatatcccatatgacttgttggatcctaa

SEQ ID NO: 219520 - DNA, 2927 bp, Zea Mays
aaccaacattccagatcaagtaacctgtccggcgtgcgaggagtggaagttgacagcacccgccgctttaaaccccgtccgtgtcccgctagccgccattgcagagcactgactgagcacaccacccaccagctccgaagtcatgtcccacctcgacgcggcctcgctcctcgccccctcgccgccgctggcaaagccccacccgcgcagccgcttcctctgcctcatctcctccatgctcgccgtcctcggcgcctccctcgcgggtctcctcttattcgcgctccaccccgcgccgaacccggtcccgaactacgcgtcgctcttcctctccctcggatccaacgacaccgccgcctcgcacctccgagcgctcactctccacccgcacgtcgcggggaccaaggcgaacgccctcaccgcccgctacgtgttcgacgcgctctccgcgctctccttccccacccacatcacgccttactccgtcctcctctcctaccccgtccaccgctccctctccctctcggcgccaggccgcggcgtcgtcacctccttctccctaaagcaggagacctaccccaacgacccctacgcagcagccgcggcggagaccatcccgacgttctacgcgtactcggcctccgggtcggtctccgcggaggccgtgtatgctaactacggccgcgaggaggacttctcttacctcgcctcccgcggcgtggacgtcgcgggcaaggtcgcgttcgcgcggtacgggaggatccactgcgaggacatagcgcacaacgcgcgcgccgccggcgccgcggccgcggtggtgtacactgacccgctgcagtacggcggcgcacccggtgaggggtggttccccgactcgcggtggctgccgcccagcggtgtgcaggtggggagcctcttccggggcgtgggggacccgacgacgccgatgtgggcatcgtccgagggctgcgagcgcgtcagcttggaggaggccatgaataccgatgacatgccgctcatcccagccctgccggtatcggctcaggacgcgatggagatacacagagccatgggcggggccgtggcgccggaggactggcagggccgtgaagacggacccgtttaccgcctcgggccagggccggcagttttgaacctgacatatcttgggaatgattcgatggcaacgattgagaatgtcttcgccattatcgagggcgccgaagagcccgatagatatgtcattcttggtaaccatcgtgatgcttggacgttcggtgcatctgatcccaacagtggaacagcagctatgattgagttagctaaaaggttttcaatgctgcaaaaacaaggatggaggcctcgaagaactattatcttctgtagttgggacgcggaagaatacggactgacagggtcaactgaatgggttgaagaaaaccgggagatgttgtattctagagctgttgcttatctgaatattgacgtttcagtcgttggtccaggattcctgccttctacaactccccaacttgatgagttacttcagcaagtaactaaagtggttcaagaccctgataattcatctcagactgtgtatgattcatggattaaatcgagcactcctctccggactaggtgatggaggatcagactattcagcattcgtccaacatgttggtattccttcgatgaatataatttttggagaaggaccaggatatccggtttaccactccttatatgatgactacgtatggatggcgaaattcggagatcctgcgttccgtaggcatgtggcagctgctagcatatggggaatgatggctttgaggttggcaaatgaagacatcctacccttcaattacatgtcctatgcaattgagcttgaggcatacacaaaaacggtagagaatgaagtgaagggaacaactgtcacttgttcccctctgtacaactcaatcagaactctcggagcggcagctaccaaagtgaataacgaacaaaaggaacttcaaaagctactcttgagcaagcagctgaacaaggattcactgaaaatccgacaactcaatgaccgtcttatgcagaccgagcgtgcattcactagcagggaaggcatcttcaagctagaatggtttaagcatctggtgtatggaccttcagaccagaatgactgggatactgcagtctatccaggtatagccaatgccatagccagcgcccggagcagcaacacttcggagtcctggaagtttgtacagcatgagatctacagagtagccagggccgtgacacaagcatctgctatactgagtggccgtctgacatgacaggattcaaaccatattcgttaaaaaagattgttactgtggatttcggaagttttgacattttttgaaactttcgactatgaaatatctgagttgcagagaaagaccgtgcaccacattagggcttgttcgttttgctctcaatccatgtggattgggtgggattggatgagtttcaatcccaaacaagtcaaaatctttcacaattttttccaatcccatccaatccacatgagataggaataaccgaacaagcccttaaaaggatttggtataggtcagaactttccgatagggggttggaaatttcaacttgggcatactttccaaacacaaaaaagaagtgtgcagtgttgtgcttagtgtctctcagttttatattaaagaatttgttatgcacttaagcacaactagtagtgagagttgagccgctttttagtacaggttccctatactcaagaatagaaaacaagtttacaaagcattgaggttgaagcttgattgaaagctctcatttcctgtacatctattggacaaatctccatttgtgcttaacaactataatcatatcccatatgacttgttggatcctaa

SEQ ID NO: 219521 - DNA, 2841 bp, Zea Mays
aaccaacattccagatcaagtaacctgtccggcgtgcgaggagtggaagttgacagcacccgccgctttaaaccccgtccgtgtcccgctagccgccattgcagagcactgactgagcacaccacccaccagctccgaagtcatgtcccacctcgacgcggcctcgctcctcgccccctcgccgccgctggcaaagccccacccgcgcagccgcttcctctgcctcatctcctccatgctcgccgtcctcggcgcctccctcgcgggtctcctcttattcgcgctccaccccgcgccgaacccggtcccgaactacgcgtcgctcttcctctccctcggatccaacgacaccgccgcctcgcacctccgagcgctcactctccacccgcacgtcgcggggaccaaggcgaacgccctcaccgcccgctacgtgttcgacgcgctctccgcgctctccttccccacccacatcacgccttactccgtcctcctctcctaccccgtccaccgctccctctccctctcggcgccaggccgcggcgtcgtcacctccttctccctaaagcaggagacctaccccaacgacccctacgcagcagccgcggcggagaccatcccgacgttctacgcgtactcggcctccgggtcggtctccgcggaggccgtgtatgctaactacggccgcgaggaggacttctcttacctcgcctcccgcggcgtggacgtcgcgggcaaggtcgcgttcgcgcggtacgggaggatccactgcgaggacatagcgcacaacgcgcgcgccgccggcgccgcggccgcggtggtgtacactgacccgctgcagtacggcggcgcacccggtgaggggtggttccccgactcgcggtggctgccgcccagcggtgtgcaggtggggagcctcttccggggcgtgggggacccgacgacgccgatgtgggcatcgtccgagggctgcgagcgcgtcagcttggaggaggccatgaataccgatgacatgccgctcatcccagccctgccggtatcggctcaggacgcgatggagatacacagagccatgggcggggccgtggcgccggaggactggcagggccgtgaagacggacccgtttaccgcctcgggccagggccggcagttttgaacctgacatatcttgggaatgattcgatggcaacgattgagaatgtcttcgccattatcgagggcgccgaagagcccgatagatatgtcattcttggtaaccatcgtgatgcttggacgttcggtgcatctgatcccaacagtggaacagcagctatgattgagttagctaaaaggttttcaatgctgcaaaaacaaggatggaggcctcgaagaactattatcttctgtagttgggacgcggaagaatacggactggattcctgccttctacaactccccaacttgatgagttacttcagcaagtaactaaagtggttcaagaccctgataattcatctcagactgtgtatgattcatggattaaatcgagcactcctctccgggttcttagactaggtgatggaggatcagactattcagcattcgtccaacatgttggtattccttcgatgaatataatttttggagaaggaccaggatatccggtttaccactccttatatgatgactacgtatggatggcgaaattcggagatcctgcgttccgtaggcatgtggcagctgctagcatatggggaatgatggctttgaggttggcaaatgaagacatcctacccttcaattacatgtcctatgcaattgagcttgaggcatacacaaaaacggtagagaatgaagtgaagggaacaactgtcacttgttcccctctgtacaactcaatcagaactctcggagcggcagctaccaaagtgaataacgaacaaaaggaacttcaaaagctactcttgagcaagcagctgaacaaggattcactgaaaatccgacaactcaatgaccgtcttatgcagaccgagcgtgcattcactagcagggaaggcatcttcaagctagaatggtttaagcatctggtgtatggaccttcagaccagaatgactgggatactgcagtctatccaggtatagccaatgccatagccagcgcccggagcagcaacacttcggagtcctggaagtttgtacagcatgagatctacagagtagccagggccgtgacacaagcatctgctatactgagtggccgtctgacatgacaggattcaaaccatattcgttaaaaaagattgttactgtggatttcggaagttttgacattttttgaaactttcgactatgaaatatctgagttgcagagaaagaccgtgcaccacattagggcttgttcgttttgctctcaatccatgtggattgggtgggattggatgagtttcaatcccaaacaagtcaaaatctttcacaattttttccaatcccatccaatccacatgagataggaataaccgaacaagcccttaaaaggatttggtataggtcagaactttccgatagggggttggaaatttcaacttgggcatactttccaaacacaaaaaagaagtgtgcagtgttgtgcttagtgtctctcagttttatattaaagaatttgttatgcacttaagcacaactagtagtgagagttgagccgctttttagtacaggttccctatactcaagaatagaaaacaagtttacaaagcattgaggttgaagcttgattgaaagctctcatttcctgtacatctattggacaaatctccatttgtgcttaacaactataatcatatcccatatgacttgttggatcctaa

SEQ ID NO: 219522 - DNA, 2485 bp, Zea Mays
cagctccgaagtcatgtcccacctcgacgcggcctcgctcctcgccccctcgccgccgctggcaaagccccacccgcgcagccgcttcctctgcctcatctcctccatgctcgccgtcctcggcgcctccctcgcgggtctcctcttattcgcgctccaccccgcgccgaacccggtcccgaactacgcgtcgctcttcctctccctcggatccaacgacaccgccgcctcgcacctccgagcgctcactctccacccgcacgtcgcggggaccaaggcgaacgccctcaccgcccgctacgtgttcgacgcgctctccgcgctctccttccccacccacatcacgccttactccgtcctcctctcctaccccgtccaccgctccctctccctctcggcgccaggccgcggcgtcgtcacctccttctccctaaagcaggagacctaccccaacgacccctacgcagcagccgcggcggagaccatcccgacgttctacgcgtactcggcctccgggtcggtctccgcggaggccgtgtatgctaactacggccgcgaggaggacttctcttacctcgcctcccgcggcgtggacgtcgcgggcaaggtcgcgttcgcgcggtacgggaggatccactgcgaggactggcagggccgtgaagacggacccgtttaccgcctcgggccagggccggcagttttgaacctgacatatcttgggaatgattcgatggcaacgattgagaatgtcttcgccattatcgagggcgccgaagagcccgatagatatgtcattcttggtaaccatcgtgatgcttggacgttcggtgcatctgatcccaacagtggaacagcagctatgattgagttagctaaaaggttttcaatgctgcaaaaacaaggatggaggcctcgaagaactattatcttctgtagttgggacgcggaagaatacggactgacagggtcaactgaatgggttgaagaaaaccgggagatgttgtattctagagctgttgcttatctgaatattgacgtttcagtcgttggtccaggattcctgccttctacaactccccaacttgatgagttacttcagcaagtaactaaagtggttcaagaccctgataattcatctcagactgtgtatgattcatggattaaatcgagcactcctctccgggttcttagactaggtgatggaggatcagactattcagcattcgtccaacatgttggtattccttcgatgaatataatttttggagaaggaccaggatatccggtttaccactccttatatgatgactacgtatggatggcgaaattcggagatcctgcgttccgtaggcatgtggcagctgctagcatatggggaatgatggctttgaggttggcaaatgaagacatcctacccttcaattacatgtcctatgcaattgagcttgaggcatacacaaaaacggtagagaatgaagtgaagggaacaactgtcacttgttcccctctgtacaactcaatcagaactctcggagcggcagctaccaaagtgaataacgaacaaaaggaacttcaaaagctactcttgagcaagcagctgaacaaggattcactgaaaatccgacaactcaatgaccgtcttatgcagaccgagcgtgcattcactagcagggaaggcatcttcaagctagaatggtttaagcatctggtgtatggaccttcagaccagaatgactgggatactgcagtctatccaggtatagccaatgccatagccagcgcccggagcagcaacacttcggagtcctggaagtttgtacagcatgagatctacagagtagccagggccgtgacacaagcatctgctatactgagtggccgtctgacatgacaggattcaaaccatattcgttaaaaaagattgttactgtggatttcggaagttttgacattttttgaaactttcgactatgaaatatctgagttgcagagaaagaccgtgcaccacattagggcttgttcgttttgctctcaatccatgtggattgggtgggattggatgagtttcaatcccaaacaagtcaaaatctttcacaattttttccaatcccatccaatccacatgagataggaataaccgaacaagcccttaaaaggatttggtataggtcagaactttccgatagggggttggaaatttcaacttgggcatactttccaaacacaaaaaagaagtgtgcagtgttgtgcttagtgtctctcagttttatattaaagaatttgttatgcacttaagcacaactagtagtgagagttgagccgctttttagtacaggttccctatactcaagaatagaaaacaagtttacaaagcattgaggttgaagcttgattgaaagctctcatttcctgtacatctattggacaaatctccatttgtgcttaacaactataatcatatcccatatgacttgttggatcctaa

SEQ ID NO: 219523 - DNA, 1878 bp, Zea Mays
aaaccatgtgctctctctgtatagtaagctgaagtgactggagttagctaaaaggttttcaatgctgcaaaaacaaggatggaggcctcgaagaactattatcttctgtagttgggacgcggaagaatacggactggattcctgccttctacaactccccaacttgatgagttacttcagcaagtaactaaagtggttcaagaccctgataattcatctcagactgtgtatgattcatggattaaatcgagcactcctctccgggtgagttgttgcaacttgcttatccaacagcctaccttctatgtagtgctgagaatccagttagttgtcactataaaatagtgattgtattgttaccaagctacaagttccttttcagtttcagttccattcctcgagaattatgtggtttcaggaggacagaccacttcgacttcctgacaaattatataacattactcactattcactgcatatctcttgcgttaaggttcttagactaggtgatggaggatcagactattcagcattcgtccaacatgttggtattccttcgatgaatataatttttggagaaggtaatgcccctgctctcttctatttgtctgctcagtgacttttatttttcaatgaactttcctgggtacttttgcttttgtaggaccaggatatccggtttaccactccttatatgatgactacgtatggatggcgaaattcggagatcctgcgttccgtaggcatgtggcagctgctagcatatggggaatgatggctttgaggttggcaaatgaagacatcctacccttcaattacatgtcctatgcaattgagcttgaggcatacacaaaaacggtagagaatgaagtgaagggaacaactgtcacttgttcccctctgtacaactcaatcagaactctcggagcggcagctaccaaagtgaataacgaacaaaaggaacttcaaaagctactcttgagcaagcagctgaacaaggattcactgaaaatccgacaactcaatgaccgtcttatgcagaccgagcgtgcattcactagcagggaaggcatcttcaagctagaatggtttaagcatctggtgtatggaccttcagaccagaatgactgggatactgcagtctatccaggtatagccaatgccatagccagcgcccggagcagcaacacttcggagtcctggaagtttgtacagcatgagatctacagagtagccagggccgtgacacaagcatctgctatactgagtggccgtctgacatgacaggattcaaaccatattcgttaaaaaagattgttactgtggatttcggaagttttgacattttttgaaactttcgactatgaaatatctgagttgcagagaaagaccgtgcaccacattagggcttgttcgttttgctctcaatccatgtggattgggtgggattggatgagtttcaatcccaaacaagtcaaaatctttcacaattttttccaatcccatccaatccacatgagataggaataaccgaacaagcccttaaaaggatttggtataggtcagaactttccgatagggggttggaaatttcaacttgggcatactttccaaacacaaaaaagaagtgtgcagtgttgtgcttagtgtctctcagttttatattaaagaatttgttatgcacttaagcacaactagtagtgagagttgagccgctttttagtacaggttccctatactcaagaatagaaaacaagtttacaaagcattgaggttgaagcttgattgaaagctctcatttcctgtacatctattggacaaatctccatttgtgcttaacaactataatcatatcccatatgacttgttggatcctaa

SEQ ID NO: 219524 - DNA, 871 bp, Zea Mays
gacttcagaaaatgttcactccccttcctcggcattggcgtcacattcgcagccgtctcactcctctcgcacagcatccgcttctcctgccaaaccctagcacctccgtcctccgaccccctcagctccggcgatggcctccaccccgcaccctccgccgctcatcggcaagtcgggaaacctcacggtgttcttcacgccatcggcggagcacgagagcccggggtccgagttctctacgcccccgacgagccctcgcgccgaggactcccctgaatcaccaccggcgcagacagcccctccgcccgcgcctgtttactcagtatccacgccgcagcttgtcaagatggtctccccgccgcttcccgccgagaagctctcccgaccctcgctggtccaggtgccgccattgcagttcgggaaggcttcggcaggatcagatggatcgctgcttgcgttcttctgggacgcggttgcacgcatgcaagaagcacacgcgagcttggacgagcacatctcgagatggttcgggctggaccagtccaagtaccagtgggcgctcaacgactattatgagaggaccgggcaggagatagatttgagcaacgttggcactcgttagcagcacagttgtaaaaattcagaaagcttgaaaaagtggattatttctagtttttatgtgtgtaactaagctggtgccgtgtcaagctgcatatagaatccttttggttgcgtgaagactgagttctctttttctgcacccggaagctcttggttgtaacaaatccatatttagcacctttattgtagcttcgttgtggataaagaaaaaccttgctgaccttttttttattgtaccttcattttcatt

SEQ ID NO: 219525 - DNA, 10337 bp, Zea Mays
aatgccgttcgttctccgccttcgcttttcaccgtccaaggacccggcgccatcgagcagcttctggaggtagcgcagggatcgcgatgtggtcgtcgaagggatcttcgtcggctcgtcgccccctccttcttcggccactgcgcacgagggcgacggcgatggctgctgctgccacattgatgtgggagggagcagacggagaagccactgactctgactagagagcggccggagtgaaagttgttgaaagcgggagcgggagccttaccaaactgggctggcaaggcgtcgtcgcaggttgccggttcgccgctgccagcgaagcactcacctcgccgtcgtcctccggctgccgttcctgcggtcatatgtgacgccttacctgcagttctcctcgtccctcacgcctcaactcccgcacctctgagtctcgatggaggaccgcctcttcgataagtccctgaacccgaataagcttttgaaggaacaattcgtcagcaacttgacggggtcttccctgctggagatcgcggcgctctccaccgtcgtgccggcattggtagttctcagaaagtggagcagcagagataattctaggaaggattcagcaaagaaaaacgatgatcaagttcaccctgttggtaaagattggatgcaatacttctctacactagctgtagactatctcactgttgtattgccaattattgtggttttcacagtcttatctgaatgggcttttggttgtgctatttctcttgcaatcctgatatacatctacgtcatgtttaaaaggcctcagctttatcttaaagatgggttcagccagttgccttcgatgagggcagacatatcttcttaccgtgtctcagtggttctggtgacatgtttgtgcattttagctgtggacttcaaaatatttccaagacgctatgccaaggctgaaacatatggtagtggcatcatggatcttggagtaggatcatttgtagtggctaatgcactggtatctagacaagcacgaaacatagcctcaatgagtttcaaggcggctctgagttccataagtccactagtatttcttggctttgctcgcattatatccacatggggtgttgattatcaggtccatgtaggagaatatggtgttcattggaacttctttttcaccctcgcagctgtttctatccttacatccattgtcaggattcatccaaaacattgtggcttagttggtctgcttatccttgctggataccagatttggctatcttctggattaaatgagtacctcatttctgataaaagaagtgctgatataatcagccagaataaggagggcatttatagcatccttgttcaaagggcaagaacaggaacactcaagtcatgaaaatctgggttcttgctgcgttgttttggattttggcaatcatctttgatagctatattgagagagtttctcggcgaatgtgcaactttgcttatgttatgcttgtttttggccagaattttcaggttttatgtatcctcacattagctgggttcgtctcatataaaaagaacttggttcttgaagatgcattcaatcaaaatatgctcggttcattccttctggcaaatatccttactggtctggttaatctctcagttaacacgctctctgcttcttccctcaccgccttcatgattctctggaggtgcgtgggcattcggccctctttccgcgtggcgtttcttcgtgcctgaggcgacgacggtttggcaccggctctctgccgtcgagagagaatggcaccagccaccagctcgtgtcaccactgccggcataggtggtctgttcctcttcagctcgctgcttatttaagaaaccgtgacagagaatgcctttgaccttaaatctgttgaaccaatgtaccgggggaggaggtaaccagtgcatcagtactccggcccctcagctccacttcagatcagatctcctgaattgcacgtttgagatcgagatctatcaggccatgctaagagagtaagaggtgatcaaatgacagtactgaaaagtgtagcaacaaccacgcttgcttgtgtgtgatggtggagtgagagacaaggagagctggatccaccaccctgtcctctggagacttgatgagtcggacgcatcaaattgcgttgcgtgatcggacgggtccaaatggtattaactcgcagcccatggattgcgagccttcatggaatggtttccggatcacgatggatcaatcgttcatcgctgacgaactagtacgtggtatttgtattgcaccgaccttgtgtggcccatagtactacttcctttaacttgttttcggtactctcgtttctgaaattgatgttgctaggttattctaatcggtcaaattttcataagttcaactagatttataatatttcatgttttataatatttggttgcaaatgctatatcttgaggaaaggtagtcgactctctaaatttaagaagaaatgtgatgcggttttctactcgggtattcttcaaatagcaaggcttgtagggttttaaacaaaactcgtggcattattgaggaatcatttgatgttgagtttgatgaaacaaataggttttaagatgaaaatcaaaatcttaatgatgtaagtggagttcacttgaggaatgccattaagattgaccattggtgaaattcagccaaaagaagatgacgatgatgcatggttgtcattccatcatcttcaactctaaatgaggaaattcatcaaagttaacaaaataatgaagttgagaatgctcatgataatggtaacaagtcattcggttcctcaagcttcatcaagtgattctcatattgtatcaaggatccatcattatattgcaaaagataacatggtcgatcaaattatgggtgacataagtaagggtgtttaaactcgctcccgcattgctttattttatgaatatttctcttttgtatcttgtattaaacataaccgtatagatgaagcactacttgatgttgattgggtgaatgcaatgcatgaggaattaaataactacatccgtaatgaagtttgagagcttgttgaaagacccaagaatcacaatgttactggtactaaatgggtatttcacaacaagcataatgaagatagattggtagtgaggaacacgacacgattagtggcacaagattatatttaaatagaaggattgtattttggtgagataattttcatgttgcaagattagaggcaatatgggttcttcttgcttatgcttgtgcttacaacattaaactctaccaaatggatgtaaatgacgttttttctaaatgctaagattagtgaactagtgtatgtggagcaacctctcggttttgaggaccccaagaagcatagccacatgtacaagctttctaaagctttctatgggcttaagcaagctccatgcacttggtatgaaaggcttagagaattcttgttttccaaatagtttaaaattgggaaggttggcactatatgttcactaaaagaattggtaaagatttatttgtttgtcaaatctacgttgatgatatcatttttggatttactaatgagttgttttacgaggaatttggaaaatgatgtcaaaagagtttgaaatgtcaatgatatgggaattgaatttcttttgtggccttcaaaacaaacaatggaaatatgggatttttgtgagccaatctaagtatttaaaggacatgctaaagaaatttgggctagaagatgcaaatccaatcgagactcacatggctacaaatggtcatctagacttagatgagggatgtgcaattgttgattaaaagtgttttcgttctattattgatagtttactttacattactgcatctaggcctgatgtaatgtttagtgtttgcatgtgtgctcggtttcaagcttcacctagagaagtttatttgaaagtcgcaaagaggattctaaggtatttgaagcatactcccaatgttggcttattgtatcataaaggtgctcaatttgaattaattggatattcggattccgattatgcgggacacaaagttgatagaatgaacacttctggttgttgtcaatttcttggaagatctctagtctcatggtcttctaagaagtaaaatttggtcgatgtatctaccgccgaggtggaatacatatcagtctgtaattgttgtgctcaagtattgtggatgaagcaaactctattggattatgagatctttttcaaaaaatgtgtctttcatgtgtgataatgagagtgcagtgaaattgggtacaaattcggttcaacactcaagaacgaagcatattgatataaaacattattttttgagggatcatggtgtcaaaggggatatctcaatatgttttattagcacgaatgatcaattagtggatatatttacaaaatctttggatgaatcaaggttttgcaagttgaaaaacgaaatgaatgtaattgacttcttaaacgtggcttgaagtcgagggcacatgtatagacatccatttgagccctagtgcatctctctaagtcatttattgactatttttcttgaattttttattcttacatgatctaagtgggttctatgtgaaaatgctatttattctagtacattatgtgtttatgcatacatgctaacccttgtaacaatcaaaatatccatatttaagcaaagaaccccatttgaattttggattcataaaatggacaaaaaatggaaactgagtatcatgccacagactgttaggaccttgaccgcggatagtccggagtaacaggacagagactgaaagggaaatagggtcaaaccttttcctaaatgattttggtggttgaaatgccaacacaaataattggactaactagtttgctctagattatatattctacaggtgctaaaggttcaacataaaccaataaaaagatcaagttagggttcaaaaagaaaggagcaaaagaaaccgaagagaaccctggtctggcgcaccggacagtccggtgtgccactggacagtgtccggtgcaccaccggatagtgtctggtgcaccaggggtcgtacagttcaaacttgccaccttcgggtttttggaaagccgctccgctataatttatcggactgtccggtgtgccagcggagcaatgactatcaagtgcaacggtcaactccaatggtcgcctgcaaacgtgaacaatgcgtggatagttcgcgcagagtcagagcagcgccagaaggcacaccggacagtgaacagtgcctgtccggtgcggaaccggactgtccggtgcccccaagatgtcagagctccaacggtcgaaaccgtcagaaccctaacggacagcctccccaatggttggtttggtggttggggctataaataccccccaaccaccaccactccaagcatccaagtttttcagacatctcattcaatacaagagctagtgcaatcaatacaagacacaattcaaaagaatcaaagcctctccaagtcccaaacacactccaaacacctagtgactagagagagagagttttgctcgtgttatttgagctcttgttcttggatcactttcttcttctcattcttgttcttcaagcacttgtaatcaaagcaagagacaccaattgtgtggtggtccttgtggggtctaagtgacccgtttgattaaggagaaagctcactcggtctaacaaaccgtttgagagagggaaagggttgaaatagacccatttctttgtgaccacctcaacggggactaggtttgcattaaccgaacctcggtaaaacaaatcatcgtgtcactcgctttatttcttggttgatttgtttttcgccctctcttccggacttcgattttattctaacgctaaccccggtttgaagtgtgcttaaagtttgtaaatttcagtttccgcctattcaacccccctctaggcgactttcaattggtatcggagccgatacttcattagagtctaaccactcgaagtgatgtcggaaggatccgctaagagggaaatggaaacggacacaagccgcgggaaggctccatcaagggagtccggcgccaaaggaagggaggactcacctccccgcatcaagtcgcatcagagtggcgacaagaagaaaaagatgaagaaattggtctactacgagaccgattcttcgttgctgaaagggaaatagggtcaaaccttttcctaaatgattttggtggttgaattgcccaacacaaataattggactaactagtttgctctagatcatacattctacaggtgccaaaggttcaacacaaaccaatcaaaagaacaagttaggcttcaaaagaacagagcaaaaaggaaaccgaagtactccctggtctggcgcaccggactgtccggtgtgccaccggacagtgtccggtgcaccagggaggattgactccaactcttcaccttcgggtttcccaggcgcacctccgctataattcaccggactgtccggtgtgccaccggactgtccggtgcgccagcggagcaacgactacatacgcgcaacggtcgactctgacaggaacagtgcagaacagttgaaagggaattaggcttacacatattttcctaaatgattttggtggttgaattgcccaacacaaataattggactaactagtttgctctagtctataagttatacatgtgccaaaggttcacactaagccaataaaaagaccaagaaaagggttcaacaaagagagcaagggataaccgaagtgtgccctggtctggcgcactggactgtccggtgcaccaccggacattgtccggtgcaccaggggactacaagctgaactcaccaccttcgggaaaacgcagaggcgcttcgctataattcaccggactgtccggtgtaccaccggacagtgtccggtgccccaggggagagcgactctgaactcgccagcttcggatttcggctccgctataattcaccggactgtccggtgagccagcggagcaacggctacttcgcgccaacggtcgactgcaacgcattaaatgcgcgccaacgcgcgcagaggagcagagcacgagcgggtggcacaccggacagtctacaggacttgttcggtgcaccaccagacagccaggcgggcccacaagtcagagctcttacggtcggaacccaacggcttggtgacgtggctggcgcaccggactatccggtgcgccatgcgacagcagcctccaccaaacggctagtttggtggttggggctataaataccctcaaccaccccacattcaagtcatccaagttttccaccttccaactacttacaagagctctagcattcaattctagacacacccaagtgatcaaatcctctcccaattccacaaaagctttagtgttaagtgagagagatttgttgtgttcttttgagctcttgcgcttggattgcttctttgtctcattctttcttgcgatcatctcaattgtaaacaaggcaagagacaccaattgtgtggtggtccttgcgggaagtttggttcccaattgatttgagaagagaagctcactcggtccgagggaccgtttgagagagggaaagggttgaaagagacccggtctttgtgaccacctcaacggggagtaggtttgcgagaaccgaacctcagtaaaacaaatccgcgtgtcatactctttattcgcttgcgatttgttttgcaccctctctcgcggactcgttttatatttctaacgctaacccggcttgtagttgtgattaagtttgtaaatttcagattcaccctattcacccccctctaggtgactttcaattggtatcagagcccggtgcttcattagagcctaaccgctcgaagtgatgtcgggagatcacgccaagaaggagatggagatcggcgacaagcccactacaagccacaggaaggcttcatcggaagagtctcgcaacaaggggaaggggaaggagaagaaagcctcttcccacaagtcgcatcggagtggcgacaagaaaaagaagatgatgaaggtggtctactacgagaccgatacttcatcaccttccacctttggctccgacgcgccatccattacttctaagagccatgagcgcaagaagtttagtaagattcccctacgctaccctcgcattcctaaatatactccattgctttccgttccattaggcaaaccgccaatctttgacggtgaagattacgctaggtggagtgatttgatgaaatttcacctaacctcactccacaaaagtatatggaatgttgttgagtttggagcacaggtaccatccgtaggggatgaggattatgatgaggacgaggtagcccaaatcgagcacttcaactcccaagccacaactatactcctcgcctctctaagtcgagaggagtataacaaggtgcaaggattaaagagcaccaaggaagtttgggacgtgctcaataccgcgcacgaaggagatgagctaaccaagatcaccaagcgggagacaatcgagggggagcttggtcgcttccgtcttcgccaaggggaggagccacaagacatgtacaaccggctcaaaaccttggtgaaccaagtgcgcaacctcgagagcaaaaaatgggatgaccacgaaatggttaaggttattctaagatcacttattttccttaaccccactcaagttcaattgattcgtggcaatcctatatatacactaatgactcccgaggaagtgatcgggaattttgtgagctttgagttcatgatcaaaggctcaaggaagatcaacgagcttgatggtccctccacgtccgaagcacaaccgatcgcatttaaggcgacggaggagaagaaggaggagtctacatcaagtagacaaccaatcgacgcctccaagctcgacaacgaggaaatggcgctcgtcatcaagagcttccaccaaatcctcaagcaaaggagggagaaagattacaagccccgctccaagaaagtttgttacaagtgtggtaagcccggtcactttatagcaaaatgtcctatttctagtgacagtgacaggggcgacgacaagaaggggagaagaaaggagaagaagaaatactacaagaagaagggtggcgacgctcatatatgccgcgagtgggactcggacgagagctcctccgactcctcctccgacgaggacgccgccaacatcgccatcaacaagggccttctctttcccaacgtcggccacaagtgcctcatggcaaaggacgacaaaaagaagaaggttaaatccaaatcctccactagatatgagtcctctagcgatgataatgctagtgacgaggaagataatttgcgtactctttttgccaacctaaacatgcaacaaaaagaaaaattaaatgaattgattagtgccattcatgagaagtatgatctcttggacactcaagaggacttccttattaaagaaaacaaaaagcatattaaggtgaaaaatgcttatgctctagaagtagaaaagtgcgaaaaattatctagtgagctaagcacttgccgtgagactattgacaaccttagaaatgaaaatgctagtttaagtgctaaggttgattcaaatgtttgtgatgtttcaattcccaatcttagaaatgataatgatgatttgcttgctaagattgaagaattaaacatttctcttgctagccttaggattgagaatgaaaaattacttactaaggctaaagaactagatgtttgcaatgcttccatttccgaccttagaagtaaaaatgatatattacatgctaaggtggtagaattaaaatcttgcaaaccctctacatctatcgttgaacatactactatttgtactagatgtagagatgttaacattgatgttattcatgatcacatggctttaattaaacaacaaaatgatcatatagcaaaattagatgctaaaattgccgagcatgacttagaaaacgaaaaatttaaatttgctagaagcatgctctatagagggagacgccctggcattaaagatggcattggcttccaacagggaggcaatgtcaaacttaatgccacttctaagaaattgtccaactttgttaagggcaaggctcccatgcctcaggataacgagggttacattttgtaccctgtcggttatcctgagagcaaaattaggagaattcattctaggaagtctcactctggccctaaccatgcttttatgtataagggtgagacatctagttcta

SEQ ID NO: 219526 - DNA, 2065 bp, Zea Mays
gaactacccacacgtttctttaccctaacgccgccgccgcttcttcgtctcccatcatctccctccctttatcgcgctcggcaccaggcaacacgaacgcatcgccggtgggatcccggattggccggtggacgagttcttccgcgacgttagtgacttcaatgggcgagagtgacaccaccaagcgggaagcctggggacaaggtgggtgactccgcgtactaccgctcgttggagaaggatctggatgccaacgagctgtttggccgagtacaggagatccgatctggacgccagcgctaccctctccagtccccacaaacggcctccggccttcactggcaacacggtagcctattatgtcccgccgtgagatcagttctcgcagaggttcttcaaggattcttcaaagttgctcgattttttttcaggttgcagagattaattcagcacgtgccaccaatattgagcttttatttcttgtttgtgtatttaaaaggctaaaatgtcattttcggaaggaataattcattcagtgatttaactggaatttcacgcttcacgtttagttatcaaaactaccaataaattttcattcagtgatttaaccgaaatttatttatgtgagaagtgatttagactagctttatgctgaaagaaaattcaagcatttgctgaaagttgatgtgcaacttgtccaaattttgtacaaagaatgttttttttgacatggttcctttgaaaatacacccttatagtacattctaaaaatcgtcacaaaattctatacaagaagttcatctagcatagtgcatattaaccagagttagaatttgttccacctccaggtgctcgacctcggggagaacctgctctccggcgtgctccacccgacgctgttcgacaacctcaccagccttttgaagtgtaagatttgttattctttagttatataatttctagtagagacaacttaagtattacagctatgtgttaggaagggttcatgaaaaagaatgaattttgtattcagcatatgtgcataatagggcttcgattctcaagtcatgtaatattggaagtatgcataagtgcataacaaagtttattaaagaaagaaaagtcctcacttgctggcagtttgtccattgtatttttgtaaattaaggttattaaagaaagaaatgtcctcacttctatgggttaatttatgatcttagcacttgctacgactataaagtttatataggttcacagcttcttactgtccactaggcttctccagctgcattgtttgtaaggaacagaaactagctaactgttgtgacttaattactcatcaactttcacctgccttaagccttttaggttcacttgtcttatatataccatggtaaaccacaccatgaatatgccataaataagtaacaagagtgactagcaactcagcacacacaggttgtcaggatccttcacgtacacctttcatgttcttgcaaccttgattctacatgcttcaggtagtctagaatatcagattgttgtatatatttaacaccttctgtaccatcaaattcaaaaatgcactcaagaaaaggcttttcaaaactcttagaatgtattccaagagcagtgcacatattcagaagctaattatgtaatttcttatatgttgctttgaggcaaattgaacagggatttgtttggcttccaaatggtttgttggtcctaaaatagtcagaatcacatgacatctgtgctatagatatggacctcggtggttttctccacattaggaaagctagaagagccttttgaactcagtttttttgctaacagtggtgttatggtgaaacagagttttgtgtgtatgtaccaacaactaaaatgtaaacacgacattatcatagttgagtacaggaataattatctcttatatcttattgcaaaatctgaaacagttctcctgtagatggttagcttgcattttacgctacaattacctcagatcacttgttgtatcttacaccaatttacaaaatttcttgatgcgttttatgacaac

SEQ ID NO: 219527 - DNA, 1636 bp, Zea Mays
ccttgaatgacaggacaaagaaatgtttgttggaaacccttaatgagaatttgcgtcatcccaattctcaaatacagtgtgctgctgttgaggcattaaagcattttattccaacatacctggtatcttctggtgaaaagattgctagtgatattatctcaaaatatgtggcacttctagatgacccaaatgtggctgcaagacgaggagctgcactggcccttggaatattaccattcaaattcttgatgttgaaatggatgcctgtcatgagtaaactctgtagctcatgcaccattgaggataagcctgatgaccctgatgctgaagcacgtgtgaactctgttagggggctaatttcggtttgcgaaacactaacagcatcttttgatcagctctcaaatggagattctctatatgcatacataaaagattatgtcatgcgagctttatttagagcactcgatgattatgctgtggacaacagaggagatgtgggttcttgggtacgtgaagcagcaatggatgcgctagtacgatgcatgttcatcctctgcaagagagatattgttgctttgagagcagtgtcagccactggccatgactctgaactgggtgatatggaagtaaatgcaagtagtactgcataccggctatttgattctggtattgcacaggatctggtagcaggcattgcaaaacaagcagttgagaaaatagataagataagagaaatagctatcaaaaccctgcagagaattctgtaccaccaggaacacctcatcccatttatacctcacagggagttgcttgaagaaattattcccaacagcagagatttggagtgggcggtggtttgcaggagtctttgaagaaagcttcaatgtcagctttggtagggtatctccaagattcagacatcaatactaattgtgaagggaaaagtagagagtatctattgagttgtgatcttctatggggcctccagcactaccagaaatgtgaccgtgtaattactcccatgttcaagactattgaggctctcttcagtaaaaaggttttcttgaacaaggaggggtacagtgagttctacagtggactggtagattccgtgagctctgaactgaagggatccaaggattttacaaagttatgtgcaggtctctcgatccttgggtacatttcttccgagtcagatggaacttgcaccaaggcattttcccaactcctcacattcctaggccacagataccccaagatccgaaaagctgcagccgaccaggtgtaccttgtgctgctgcaaaatgatgaccttattgtgtcggagaatatggataaagcccaggaattacttgcggagacgtgctgggaaggggatgtggaggaagcaaggcgtaggaggtcagaaatcaacgagatggctggttttagggtcaccacttcacagaagtctggaaagcaagaaactagaacggtcgccgcttcgacggatgagaacagatcttattcgtcattggtcgatttcagcggatactaaagatcgccttacatcctattttcgacgaaaggtgtcgattgtactagtgcacaatgccgaatatcactaaacgtttgaatgagcggggttgcttgtgga

SEQ ID NO: 219528 - DNA, 1987 bp, Zea Mays
ccttgaatgacaggacaaagaaatgtttgttggaaacccttaatgagaatttgcgtcatcccaattctcaaatacagtgtgctgctgttgaggcattaaagcattttattccaacatacctggtatcttctggtgaaaagattgctagtgatattatctcaaaatatgtggcacttctagatgacccaaatgtggctgcaagacgaggagctgcactggcccttggaatattaccattcaaattcttgatgttgaaatggatgcctgtcatgagtaaactctgtagctcatgcaccattgaggataagcctgatgaccctgatgctgaagcacgtgtgaactctgttagggggctaatttcggtttgcgaaacactaacagcatcttttgatcagctctcaaatggagattctctatatgcatacataaaagattatgtcatgcgagctttatttagagcactcgatgattatgctgtggacaacagaggagatgtgggttcttgggtacgtgaagcagcaatggatgcgctagtacgatgcatgttcatcctctgcaagagagatattgttgctttgagagcagtgtcagccactggccatgactctgaactgggtgatatggaagtaaatgcaagtagtactgcataccggctatttgattctggtattgcacaggatctggtagcaggcattgcaaaacaagcagttgagaaaatagataagataagagaaatagctatcaaaaccctgcagagaattctgtaccaccaggaacacctcatcccatttatacctcacagggagttgcttgaagaaattattcccaacagcagagatttggagtgggcggttcctactgtgtcatatccacgattggtgaaacttcttcaggttagctattatagcaagtctgtgctctcagggctcgtgatttctacaggtggtttgcaggagtctttgaagaaagcttcaatgtcagctttggtagggtatctccaagattcagacatcaatactaattgtgaagggaaaagtagagagtatctattgagttgtgatcttctatggggcctccagcactaccagaaatgtgaccgtgtaattactcccatgttcaagactattgaggctctcttcagtaaaaaggttttcttgaacaaggaggggtacagtgagttctacagtggactggtagattccgtgagctctgaactgaagggatccaaggattttacaaagttatgtgcaggtctctcgatccttgggtacatttcttccgagtcagatggaacttgcaccaaggcattttcccaactcctcacattcctaggccacagataccccaagatccgaaaagctgcagccgaccaggtgtaccttgtgctgctgcaaaatgatgaccttattgtgtcggagaatatggataaagcccaggaattacttgcggagacgtgctgggaaggggatgtggaggaagcaaggcgtaggaggtcagaaatcaacgagatggctggttttagggtcaccacttcacagaagtctggaaagcaagaaactagaacggtcgccgcttcgacggatgagaacagatcttattcgtcattggtcgatttcagcggatactaaagatcgccttacatcctattttcgacgaaaggtgtcgattgtactagtgcacaatgccgaatatcactaaacgtttgaatgagcggggttgcttgtggattttcttttttttttttttaactttgcagagcatacaacctaagatgtaaaatcaagaagctcgtccagcccctccctcttttttggcatcaatcaaaattgggattttctttgacttgcctgcactggattgttcaatacacaaaggaaaaattaactatagaaaggcttatgtgtggcattaatacgacagaaggtgtaggctgacaacatggaaaaattaaacagctttgctatttcgagccaaatctatgatttat

SEQ ID NO: 219529 - DNA, 2402 bp, Zea Mays
ctcgaacggtcccaaaccctaggcctaggcgcgaccagagtccatgtcggggtcttacggatccgacgactaccgcggcggcggcggcggcggcgtggtggtggaggcgggggcagaggaggatacaatcaaagtggtggtagtgaccgtggttttgatgaccaccgtggtggcagaggtggcagctatggaggacgagaccaggagaaccaaaagggtagtgaaggtggctacaatgctggtggttatggacaaactcctcaaggtcctccttcctacggtggtcctgcaggctcatacccaccaagctatggtgccccgcctccacaccaatatggtggtgccccaggcgggcaaggcggcctgcctcctacatatgctggtggatatggtggtcagtccatgcctgggggtggaggatctgggggtgcaccgccaccttatcgtggcggcgctagtgtttatactggtagtgctggtcctgaaccagctggaaaagtcaagcaatgtgatgaaaattgtgacgagacatgtgacaacgcaaggatttacatatcaaatttgcctcctgatgtcactgttgaggaattacaggagctatttggaggaatcggccaggttgggaggatcaagcaaaaacgtggttacaaagaccagtggccctggaacataaaaatctacactgatgactctggaaaagccaaaggagatgcttgccttgcctatgaagatccttctgctgctcattcagctggtggattttacaataattatgacatgagaggctacaaaatcagcgttacgatggctgaaaaatcagcacccagagcagcaccttcttatggtcatggcggtggccgcggtggtggatatggtggaggtggacgcagggataattacagagatggtgggggccatggacccaatagaaaccagggtggtggttcgcgttcccgaccatactgaaagcaactaatattcttactgtgattgttgcctgtgagaaaccatttctattcctgttctacggatttgtactcattcaggcgcataagaggcagatggggatataagctccaaatgctggtaggtttgtgatactatttcaggccggtggatcactcctgtaagctttggattttgctgcaaagaacaggtagcgtggtttatcatgtgataggtttattagatttcgtctatattagatgacatatcaaacaacattcatagaatgttccacacccatttttgtttgaatgcacagagggtttgtagcatgtacttagcttaggttgccacaaacatttggcttcatatagatggtgaattgtgcctctgggtaataagcttgttttggtaaagagcctactcttggataaaggctgcagctccacttgtgccccaactaaacatccttagcaacacaatttgactttttttgtgctaaagtgatgatttataaatagaaaaggaacaagaattgggtggattattgcttcatttgccatttgaggcctctcgggagtatgggactgggtcactgggagctcatgcctttggttaattgacctggagactttgacaacttcatagtgcacaatccttgcaccgatcagacatatcagtcgcctgtgcgtgcagatggcgaaccagcattggtattttcgtgtgctgaggcctttattgtatttaccttcttatttttattaagctttcatgaagtatgtgaatgattgtactgcttgagcagtaaccaattaagtacacgacgggaaagctactggctgttgcagaagccggtagtgtattattattacaatcgggagacaagtcatgtgggcaagcgcaagtgtattgtagcctacgttgcgattatttggaatcgaaattttagcgatcccactggcaacgtaatgctccccttgttccgaaactaaacggatttttggagattctgaacgccaattgtcttgtaagttcgatataaaatatatagaaaacattatggatatttatggcattaaattcgttagtcatatgataatgagatatatttctatagtgtgttcgtaactagtgacataaatgttgatattttttctatattaataaatttggtcaaatgtaaaaagtgtttgacgtaaacaaaatctaaggcaccaagcgactaatttgattgaagcatttcttagcgaaactaatataaacaaatattaacgtctgagtaaagtacaccaaagatctataaactcaaaacgaatttttaggtccctaaacttgttttgccatgtcatccagttctataaactcaaacgatttttttagtctcaaacgattttttagtctctaaacttgttccggtatacactatagtccaaaccgacccaatctcgcaacatggg

SEQ ID NO: 219530 - DNA, 2462 bp, Zea Mays
tctcgagcgctctattccgccctgtgttctcgaacggtcccaaaccctaggcctaggcgcgaccagagtccatgtcggggtcttacggatccgacgactaccgcggcggcggcggcggcggcgtggtggtggaggcgggggcagaggaggatacaatcaaagtggtggtagtgaccgtggttttgatgaccaccgtggtggcagaggtggcagctatggaggacgagaccaggagaaccaaaagggtagtgaaggtggctacaatgctggtggttatggacaaactcctcaaggtcctccttcctacggtggtcctgcagtgccgcctcctaatagctacagtggtggcccaggctcatacccaccaagctatggtgccccgcctccacaccaatatggtggtgccccaggcgggcaaggcggcctgcctcctacatatgctggtggatatggtggtcagtccatgcctgggggtggaggatctgggggtgcaccgccaccttatcgtggcggcgctagtgtttatactggtagtgctggtcctgaaccagctggaaaagtcaagcaatgtgatgaaaattgtgacgagacatgtgacaacgcaaggatttacatatcaaatttgcctcctgatgtcactgttgaggaattacaggagctatttggaggaatcggccaggttgggaggatcaagcaaaaacgtggttacaaagaccagtggccctggaacataaaaatctacactgatgactctggaaaagccaaaggagatgcttgccttgcctatgaagatccttctgctgctcattcagctggtggattttacaataattatgacatgagaggctacaaaatcagcgttacgatggctgaaaaatcagcacccagagcagcaccttcttatggtcatggcggtggccgcggtggtggatatggtggaggtggacgcagggataattacagagatggtgggggccatggacccaatagaaaccagggtggtggttcgcgttcccgaccatactgaaagcaactaatattcttactgtgattgttgcctgtgagaaaccatttctattcctgttctacggatttgtactcattcaggcgcataagaggcagatggggatataagctccaaatgctggtaggtttgtgatactatttcagccggtggatcactcctgtaagctttggattttgctgcaaagaacaggtagcgtggtttatcatgtgataggtttattagatttcgtctatattagatgacatatcaaacaacattcatagaatgttccacacccatttttgtttgaatgcacagagggtttgtagcatgtacttagcttaggttgccacaaacatttggcttcatatagatggtgaattgtgcctctgggtaataagcttgttttggtaaagagcctactcttggataaaggctgcagctccacttgtgccccaactaaacatccttagcaacacaatttgactttttttgtgctaaagtgatgatttataaatagaaaaggaacaagaattgggtggattattgcttcatttgccatttgaggcctctcgggagtatgggactgggtcactgggagctcatgcctttggttaattgacctggagactttgacaacttcatagtgcacaatccttgcaccgatcagacatatcagtcgcctgtgcgtgcagatggcgaaccagcattggtattttcgtgtgctgaggcctttattgtatttaccttcttatttttattaagctttcatgaagtatgtgaatgattgtactgcttgagcagtaaccaattaagtacacgacgggaaagctactggctgttgcagaagccggtagtgtattattattacaatcgggagacaagtcatgtgggcaagcgcaagtgtattgtagcctacgttgcgattatttggaatcgaaattttagcgatcccactggcaacgtaatgctccccttgttccgaaactaaacggatttttggagattctgaacgccaattgtcttgtaagttcgatataaaatatatagaaaacattatggatatttatggcattaaattcgttagtcatatgataatgagatatatttctatagtgtgttcgtaactagtgacataaatgttgatattttttctatattaataaatttggtcaaatgtaaaaagtgtttgacgtaaacaaaatctaaggcaccaagcgactaatttgattgaagcatttcttagcgaaactaatataaacaaatattaacgtctgagtaaagtacaccaaagatctataaactcaaaacgaatttttaggtccctaaacttgttttgccatgtcatccagttctataaactcaaacgatttttttagtctcaaacgattttttagtctctaaacttgttccggtatacactatagtccaaaccgacccaatctcgcaacatggg

SEQ ID NO: 219531 - DNA, 2496 bp, Zea Mays
cagcccaccacggttcaacctggaaacgcgttttttttaccctaatccacgtacacatacctcactgtccgcatctcgagcgctctattccgccctgtgttctcgaacggtcccaaaccctaggcctaggcgcgaccagagtccatgtcggggtcttacggatccgacgactaccgcggcggcggcggcggcggcgtggtggtggaggcgggggcagaggaggatacaatcaaagtggtggtagtgaccgtggttttgatgaccaccgtggtggcagaggtggcagctatggaggacgagaccaggagaaccaaaagggtagtgaaggtggctacaatgctggtggttatggacaaactcctcaaggtcctccttcctacggtggtcctgcaggctcatacccaccaagctatggtgccccgcctccacaccaatatggtggtgccccaggcgggcaaggcggcctgcctcctacatatgctggtggatatggtggtcagtccatgcctgggggtggaggatctgggggtgcaccgccaccttatcgtggcggcgctagtgtttatactggtagtgctggtcctgaaccagctggaaaagtcaagcaatgtgatgaaaattgtgacgagacatgtgacaacgcaaggatttacatatcaaatttgcctcctgatgtcactgttgaggaattacaggagctatttggaggaatcggccaggttgggaggatcaagcaaaaacgtggttacaaagaccagtggccctggaacataaaaatctacactgatgactctggaaaagccaaaggagatgcttgccttgcctatgaagatccttctgctgctcattcagctggtggattttacaataattatgacatgagaggctacaaaatcagcgttacgatggctgaaaaatcagcacccagagcagcaccttcttatggtcatggcggtggccgcggtggtggatatggtggaggtggacgcagggataattacagagatggtgggggccatggacccaatagaaaccagggtggtggttcgcgttcccgaccatactgaaagcaactaatattcttactgtgattgttgcctgtgagaaaccatttctattcctgttctacggatttgtactcattcaggcgcataagatggggatataagctccaaatgctggtaggtttgtgatactatttcagccggtggatcactcctgtaagctttggattttgctgcaaagaacaggtagcgtggtttatcatgtgataggtttattagatttcgtctatattagatgacatatcaaacaacattcatagaatgttccacacccatttttgtttgaatgcacagagggtttgtagcatgtacttagcttaggttgccacaaacatttggcttcatatagatggtgaattgtgcctctgggtaataagcttgttttggtaaagagcctactcttggataaaggctgcagctccacttgtgccccaactaaacatccttagcaacacaatttgactttttttgtgctaaagtgatgatttataaatagaaaaggaacaagaattgggtggattattgcttcatttgccatttgaggcctctcgggagtatgggactgggtcactgggagctcatgcctttggttaattgacctggagactttgacaacttcatagtgcacaatccttgcaccgatcagacatatcagtcgcctgtgcgtgcagatggcgaaccagcattggtattttcgtgtgctgaggcctttattgtatttaccttcttatttttattaagctttcatgaagtatgtgaatgattgtactgcttgagcagtaaccaattaagtacacgacgggaaagctactggctgttgcagaagccggtagtgtattattattacaatcgggagacaagtcatgtgggcaagcgcaagtgtattgtagcctacgttgcgattatttggaatcgaaattttagcgatcccactggcaacgtaatgctccccttgttccgaaactaaacggatttttggagattctgaacgccaattgtcttgtaagttcgatataaaatatatagaaaacattatggatatttatggcattaaattcgttagtcatatgataatgagatatatttctatagtgtgttcgtaactagtgacataaatgttgatattttttctatattaataaatttggtcaaatgtaaaaagtgtttgacgtaaacaaaatctaaggcaccaagcgactaatttgattgaagcatttcttagcgaaactaatataaacaaatattaacgtctgagtaaagtacaccaaagatctataaactcaaaacgaatttttaggtccctaaacttgttttgccatgtcatccagttctataaactcaaacgatttttttagtctcaaacgattttttagtctctaaacttgttccggtatacactatagtccaaaccgacccaatctcgcaacatggg

SEQ ID NO: 219532 - DNA, 684 bp, Zea Mays
ggctgaggcgagcccaaaacaattttgtggcctggctgaaaggaaacgcgagtttgttggttccctgaccggcctggcccgacttcagtcgcccagcgacgctagggtttcactctcctcagtcgcagcggttcccactctcgtctccagaagaagcgccgcgatgggttccccgccgctgacgccgtaccgccgatgggccactccactgcactccagcagaagcttgaggccaccacacagttcaggaagctgcgctccataggtgagagcgaagtcccccaattgaagaggtgatcagcacaggagtcgtgccccgattctacgggcatgtgatgattttatatttaactgttgcctttacttgcctatgatgatatgttttataatgatgatcaatcaagggagtatgacttgtagcagtcttttcagtgaatcaaggatgagtttctgtttaatgcgtacagtgagaatacattaacaattactagcagtcattcatagtcagtcaacataggccatctgctgctagtacctcttttcttctcatgagttgtagcaatttctgtttaattcatatgaatgtaattacaattatattttaagttgctactatagtttctgtttaattacaatcatagtttctgtttaatagtttctgtttaattaaaattcatatgattg

SEQ ID NO: 219533 - DNA, 696 bp, Zea Mays
gcccagtccgggagcctggctgaggcgagcccaaaacaattttgtggcctggctgaaaggaaacgcgagtttgttggttccctgaccggcctggcccgacttcagtcgcccagcgacgctagggtttcactctcctcagtcgcagcggttcccactctcgtctccagaagaagcgccgcgatgggttccccgccgctgacgccgtaccgccgatgggccactccactgcactccagcagaagcttgaggccaccacacagttcaggaagctgcgctccatagagcgaagtcccccaattgaagaggtgatcagcacaggagtcgtgccccgattctacgggcatgtgatgattttatatttaactgttgcctttacttgcctatgatgatatgttttataatgatgatcaatcaagggagtatgacttgtagcagtcttttcagtgaatcaaggatgagtttctgtttaatgcgtacagtgagaatacattaacaattactagcagtcattcatagtcagtcaacataggccatctgctgctagtacctcttttcttctcatgagttgtagcaatttctgtttaattcatatgaatgtaattacaattatattttaagttgctactatagtttctgtttaattacaatcatagtttctgtttaatagtttctgtttaattaaaattcatatgattg

SEQ ID NO: 219534 - DNA, 550 bp, Zea Mays
ggaaacgcgagtttgttggttccctgaccggcctggcccgacttcagtcgcccagcgacgctagggtttcactctcctcagtcgcagcggttcccactctcgtctccagaagaagcgccgcgatgggttccccgccgctgacgccgtaccgccgatgggccactccactgcactccagcagaagcttgaggccaccacacagttcaggaagctgcgctccataggtgaggttcggatcttatgtacagttaccttttccggatggacagtttggtggtgagatttgcgcaatttgttgagtagtattaggccatgcgtgagggcatggtcatttgtgggttttcaggtaactctcgtgtacatgttgacttgtggattgcgagctggcaaaattagttgttgcacctctaattttctgaatttaccgtatcctcaaagaaacaaaccctacccttcagcctctgcaacgtgcatacatgtatgccctgaagtttgaaaacaagctatgctccctaagcatttgatttcatgaacaactattctatttttt

SEQ ID NO: 219535 - DNA, 1066 bp, Zea Mays
ttggaaggtggtggtgccggtgcatccgctgatcagccactgggtctcagtactccgcgatcgctccaccccttcccacgccttcaggagtgcaatgggggagctagggagattgctaatctatgaggcaacacgagattggttgccgacagtaacacggcagatccagtcacctgtgggcactgaggttgttgaatctgtcagtgagatggagccaataatgattgtacctattcttagagcagggcttgcacttgcagatctcgcaacatcaattttgccttcaactagaactttccatttaggtatggcccgggatgagacaacactgatggcctctgtttacttaaataagctacctgatagattcccgaaaggatgtaaaatcctcattgtggatcctatgctagcaactggtggaacagtcactgcagcagttgatctggttatggaacgtggagctgaaatcagtcagataaaaatttcattggtatgcagatatcagctgttgctgcccctcctgccctcaagaagctcaatcaaagattcccaaggatttgtgtgtatacaggagccatggatcaaattgtaaacgagaaagggtacttatatttttaccaacaatatgcataaatcatgattattgcactgctaactcagtctcgtgaatgaaactgcagtttcataatcccaggccttggggatgctggagatcgcagctatggaacatgactccggcccttcggtgatggccatcgttaggaatttcagcaaaacccagatttagttgatgcctgcttattttcgtagatgagatttgtggttccactgaacacaaatctgtagttttgagggtctggacataatattttgacaatgtgatgtcaaatttcgcccttctattgtggcgatgtcctgataatggttatgagcttcatggagtgtttattttgagaagtgggatagcctgcaatcaccgtagctctaaacataacctatttgccttagctctgaacataacctatttgcttggtttcaagaatgatgggagtgctttgtttgaaaa

SEQ ID NO: 219536 - DNA, 2495 bp, Zea Mays
ttcgacttgacattttggagagagctctcggggaaaactgttccctgtcggaggttgaataatccaagcttgagatggaaggtcatgtagcaatggagtggaatgatcctaatccaggcccagaatccttgacgagcttccaaaccgaagctgttcgaccagacaccgcagggggccacagcaacgacgacgttgaagctggatttgagaagcatggcttggcagtcaccgtaaggccgcctgaggaggaagctcggtcagtgccactaaccccacagcttggccagaagtccagtcctggcagcagcctcgcggagaggatgcaggcaagagctggattcatggtgtcgaagctcaacatgcccttcagcacagcagctggagctgacaattcagtacccgaagttccatcgccctacctcacgattccgcctggcctgagcccagcaacgctgctggagtcaccagtcttcgtttctaattccatgggccaggcctcgccaaccacggggacgctattcatgtttggtagcacaaatgacaatgatcctattagatttggaggtggtcctccttcagttggagatggccctaatgcttttcctttcaagcccttagatctgaaatcctcacactacactgctgaagcaatgaaggaacaaaatacgaagtcttctgtcaagactgaaaccaagattctgacagtacaagaggctagtttgctcagccaactgaaccagctgaatcacaattcgcagaccattattaatagtggcggtcctcatgaccccaagctcagccgtcctgcatctggcgccggtgcaggcaatgaacacatatcacccccggatcacggacagacagctgaggaaagtgatgcgagggaagactacccggcaatggctactaccacgccagcagaggacgggtacagctggaggaagtacgggcagaagcaggtgaagcacagcgagtacccgcgtagctacttcaagtgcacgcatcccaactgcctggtgaagaagaaggtcgagcgctcgcacgaggggcacatcacggagatcatctacaagggcgcgcataaccacccgaagcccacgcagagccgccgtccaggcgtccagcccgtgcacccgtttggcgacagtgcgcaggcggacgcagccgacaacctggggtcacaggcaaacgcactggacgccaaccagccgaggcgtgcgggtgttcaggatggcatggacgcgacgtcgtcgccctcagttcccattgagcgctgtgactcgccggcctcgatgcaggtcgactcggcaactcggtttgggtcccccgagggcgcggatgtgacgtctgtgtccgacgaggtgggcggggacgacagggtgactcgtggcagtatgtctcagggcggtgccgacgcggagggtgacgagctggaatgtaaacgaaggaagctggagtcgtacgccatcgatatgagcaccgcgtcgagagctgttcgcgagcctcgcgtggtgatccagacgacgagcgaggtggacatcctagatgacggctaccgctggcgcaagtacgggcagaaggtcgtcaagggcaacccgaatccaaggagctactacaagtgcacgtacccgggctgcgtggtgcggaagcacgtggagcgcgcgtcgcacgacctcaagtccgtgatcaccacgtacgagggcaggcacaaccacgaggtccccgccgccaggaatagcggccacccgggcaccgcggcggcgacaggcgcgggtggcccgcgcaggctggagcacccgtcgctgcgcgacggcctgatggggcacttgggcggctgcggcgtgccgttcggcctgccgccgcctagggatccgctggcgccgatgggcaattacccgacgtatgcctcctccattccccttggcggcgccggccccacgtcactgccgagcctgccggtgccggcggggaccctcagcgccgtcgatgggctgaagctcccgatgctggcgccgtcgtccctgcagcagcacccgctgctgaggcaccggcaggcgatgcaggccgctggcctcgtggcgcccaaggacgacgtgaaggtcgagggcaacgttgccggcggcgctgccccgtcggtgtaccagcagatgatgtgcagcgggctgcggttgcgccagcagatgtagatacataaataaatgtggagaggattagtgattctcaagttattagtttcttaccagtcgtattaggatgagttcgtgataattgttataacgtgggaacaaacacccgttgctttctgttttttttttcacccttccacttcatttttagctcagcaactatttatttatttactgcccctcttcattgaggtttggtattcgttgagcgacaggcatcatatggtgtttcggtgcctctgatgttcaattgagaaatgtgttgtttctgggctggtgatttggcagcagcccagaaagcacttagcg

SEQ ID NO: 219537 - DNA, 2074 bp, Zea Mays
gcaagaatatgatgatcaatctctgttctttccatagttatgtggcaatgtatgccccacacttcagggccaggcctcgccaaccacggggacgctattcatgtttggtagcacaaatgacaatgatcctattagatttggaggtggtcctccttcagttggagatggccctaatgcttttcctttcaagcccttagatctgaaatcctcacactacactgctgaagcaatgaaggaacaaaatacgaagtcttctgtcaagactgaaaccaagattctgacagtacaagaggctagtttgctcagccaactgaaccagctgaatcacaattcgcagaccattattaatagtggcggtcctcatgaccccaagctcagccgtcctgcatctggcgccggtgcaggcaatgaacacatatcacccccggatcacggacagacagctgaggaaagtgatgcgagggaagactacccggcaatggctactaccacgccagcagaggacgggtacagctggaggaagtacgggcagaagcaggtgaagcacagcgagtacccgcgtagctacttcaagtgcacgcatcccaactgcctggtgaagaagaaggtcgagcgctcgcacgaggggcacatcacggagatcatctacaagggcgcgcataaccacccgaagcccacgcagagccgccgtccaggcgtccagcccgtgcacccgtttggcgacagtgcgcaggcggacgcagccgacaacctggggtcacaggcaaacgcactggacgccaaccagccgaggcgtgcgggtgttcaggatggcatggacgcgacgtcgtcgccctcagttcccattgagcgctgtgactcgccggcctcgatgcaggtcgactcggcaactcggtttgggtcccccgagggcgcggatgtgacgtctgtgtccgacgaggtgggcggggacgacagggtgactcgtggcagtatgtctcagggcggtgccgacgcggagggtgacgagctggaatgtaaacgaaggaagctggagtcgtacgccatcgatatgagcaccgcgtcgagagctgttcgcgagcctcgcgtggtgatccagacgacgagcgaggtggacatcctagatgacggctaccgctggcgcaagtacgggcagaaggtcgtcaagggcaacccgaatccaaggagctactacaagtgcacgtacccgggctgcgtggtgcggaagcacgtggagcgcgcgtcgcacgacctcaagtccgtgatcaccacgtacgagggcaggcacaaccacgaggtccccgccgccaggaatagcggccacccgggcaccgcggcggcgacaggcgcgggtggcccgcgcaggctggagcacccgtcgctgcgcgacggcctgatggggcacttgggcggctgcggcgtgccgttcggcctgccgccgcctagggatccgctggcgccgatgggcaattacccgacgtatgcctcctccattccccttggcggcgccggccccacgtcactgccgagcctgccggtgccggcggggaccctcagcgccgtcgatgggctgaagctcccgatgctggcgccgtcgtccctgcagcagcacccgctgctgaggcaccggcaggcgatgcaggccgctggcctcgtggcgcccaaggacgacgtgaaggtcgagggcaacgttgccggcggcgctgccccgtcggtgtaccagcagatgatgtgcagcgggctgcggttgcgccagcagatgtagatacataaataaatgtggagaggattagtgattctcaagttattagtttcttaccagtcgtattaggatgagttcgtgataattgttataacgtgggaacaaacacccgttgctttctgttttttttttcacccttccacttcatttttagctcagcaactatttatttatttactgcccctcttcattgaggtttggtattcgttgagcgacaggcatcatatggtgtttcggtgcctctgatgttcaattgagaaatgtgttgtttctgggctggtgatttggcagcagcccagaaagcacttagcg

SEQ ID NO: 219538 - DNA, 1922 bp, Zea Mays
ctgaaattttgccccgagtctagatgagaaatcggttaaatccaaatggttttgctctgaacaaaatacgaagtcttctgtcaagactgaaaccaagattctgacagtacaagaggctagtttgctcagccaactgaaccagctgaatcacaattcgcagaccattattaatagtggcggtcctcatgaccccaagctcagccgtcctgcatctggcgccggtgcaggcaatgaacacatatcacccccggatcacggacagacagctgaggaaagtgatgcgagggaagactacccggcaatggctactaccacgccagcagaggacgggtacagctggaggaagtacgggcagaagcaggtgaagcacagcgagtacccgcgtagctacttcaagtgcacgcatcccaactgcctggtgaagaagaaggtcgagcgctcgcacgaggggcacatcacggagatcatctacaagggcgcgcataaccacccgaagcccacgcagagccgccgtccaggcgtccagcccgtgcacccgtttggcgacagtgcgcaggcggacgcagccgacaacctggggtcacaggcaaacgcactggacgccaaccagccgaggcgtgcgggtgttcaggatggcatggacgcgacgtcgtcgccctcagttcccattgagcgctgtgactcgccggcctcgatgcaggtcgactcggcaactcggtttgggtcccccgagggcgcggatgtgacgtctgtgtccgacgaggtgggcggggacgacagggtgactcgtggcagtatgtctcagggcggtgccgacgcggagggtgacgagctggaatgtaaacgaaggtcactgattagtatctgcgcgtctgaagctggagtcgtacgccatcgatatgagcaccgcgtcgagagctgttcgcgagcctcgcgtggtgatccagacgacgagcgaggtggacatcctagatgacggctaccgctggcgcaagtacgggcagaaggtcgtcaagggcaacccgaatccaaggagctactacaagtgcacgtacccgggctgcgtggtgcggaagcacgtggagcgcgcgtcgcacgacctcaagtccgtgatcaccacgtacgagggcaggcacaaccacgaggtccccgccgccaggaatagcggccacccgggcaccgcggcggcgacaggcgcgggtggcccgcgcaggctggagcacccgtcgctgcgcgacggcctgatggggcacttgggcggctgcggcgtgccgttcggcctgccgccgcctagggatccgctggcgccgatgggcaattacccgacgtatgcctcctccattccccttggcggcgccggccccacgtcactgccgagcctgccggtgccggcggggaccctcagcgccgtcgatgggctgaagctcccgatgctggcgccgtcgtccctgcagcagcacccgctgctgaggcaccggcaggcgatgcaggccgctggcctcgtggcgcccaaggacgacgtgaaggtcgagggcaacgttgccggcggcgctgccccgtcggtgtaccagcagatgatgtgcagcgggctgcggttgcgccagcagatgtagatacataaataaatgtggagaggattagtgattctcaagttattagtttcttaccagtcgtattaggatgagttcgtgataattgttataacgtgggaacaaacacccgttgctttctgttttttttttcacccttccacttcatttttagctcagcaactatttatttatttactgcccctcttcattgaggtttggtattcgttgagcgacaggcatcatatggtgtttcggtgcctctgatgttcaattgagaaatgtgttgtttctgggctggtgatttggcagcagcccagaaagcacttagcg

SEQ ID NO: 219539 - DNA, 3595 bp, Zea Mays
gaacaattgctcggcccacgtctactcttcttggacgaggggcaaaagctgcgtcgaaacgggaggcgtggctctacgctagcacgctccacctcggacgtctcttctacctctccgtaacaaaggcgcacgggcaaagcggatcccctcttccactccgctgcctcacttccgccgcacgcgaccggaggcggctcaccgcgtagccgcgagcccaacccttgccccgcccgcccgtccttcattccttccggtggactagccgccgtacgcctcaggcagccatgtctccccccgagaatcccagccccgcggcgccggccgagccgtcgcagccgccgccaccggctgccgcggccaaggggaagcggaagaaggacgagaagaaggatgacgatctgtcggaggaggatctggcgctgaaggagcagctggagctctacgtcgtgcgggcgcaggatgcggatccgggcgtgcagaagctcgcgctcgagagcatgaggcaggagattcgctctgccacgagctcaatgacttcagttccaaagccgctgaaattcctccgcccacactttggaactctcaagtcctatttcgaaacaatgccagagtccgagctcaagaagtacatggctgacatactgtcagtgttagctttaacaatgtccgttgaaggagaaagagagagtctgaaataccgtttgctgggttctgaaggtgatattggttcatggggtcatgaatatgtgagaaatttggccggtgagattgcacaagaattccaaaagcgtcaggatgatgacttgcatgctctaatggtgctagtccagcaaattgtttcatttcacatgaaggcataatgctgagcctgaagctgtggatcttcttatggaggttgaagaccttgatttactagttgagcatgtcgatgcaacaaactacaaaagagcttgtttgtaccttactagttcatccaaatttctccctgcccctgatgatagtttagcacttgacatagcgtataccatctatatgaagtttggagaccttgcaagtgctttgagaatttctctgcaacttgagaaatctgtgcagtatgtgaagcaagtctacacagcaactgatgatcttctgctgaagaaacagttctcttatctcattgcgcgccatggtttggctatggagattgatgacgagatctctactgatgataatgataaggaggctttacaagaaatagtaaataatactaagttgagtgagggatatcttactcttgctcgcgatattgaggtcatggagcctaaatccccagaggatatatacaaggtccatttgattgatggccgtggtgccagctccagtcttgattccgcaagacagaatttagctgcaacatttgtaaatgcatttgtgaatgctgggtttggcaaggacaagttgatgaccgctccatctgattcacccagcagcgggtcttccggaaattggttatttaagaacaaggaacatggaaaagccagtgcagcagctagtctgggaatgattctcctgtgggatactgattctgggctcgctcagcttgacaagtacttgcatagtaatgatactcatgttgtagctggagccttgctaggtattggaattgtcacttgcggggtgaagagtgattgtgatcctgcgtttgctattctcatggagtatattggcaaagatgactcaaacattcgtattggagcaatattgggtcttggaattgcatatgctggttcccagaaagaagagcttaaaatgcatctatctgctgtgctgggagactctcaatcacctcttgaagtattggtcttctcagccattgccttggggttggtgtttgttggttcttgcaatgaagagattgcacagtctattatatttgccttgatggagcgtagtgaggctgagttggcagagcccattatacggttgcttcctgttgcgcttggccttctataccttggaaaacaggatagtgtggaggctaccgcagaggtctctaaaacatttgatgaaaagatagggaagtactgtgatgtaacacttatgtcgctggcatatgccgggacaggaaatgtgcttaaggttcagaaacttcttggcatttgttcacagcatcttgagaaaggtgaaacacaccaagggccagctgtccttggaattgctcttattgctatggctgaagaattaggagctgaaatggctgtacgttcacttgagcgtcttctgcagtatggcgagcagaatataagacgagcagttcctcttgctcttggtatactctgcatatctaatcccaaggtgaatgttatggacacactgagtagattgagtcatgatgccgatgccgatgtgtcaatggctgcaattatctcattgggtttgattggtgctggcacaaacaatgccagaatagctgccatgcttcgcaatctttcaagttattactacaaagaagcagctcatctgttttgtgttagaattgctcagggccttgttcacctcggaaagggcttgttgaccctttctccgtaccattctgatagatttcttctttccccgatggcacttggagggcttgtaactgttctgcatgcgtgtcttgatatgaagtccactatcctagggaaatatcactacatactttacattattgtcctggcaatgcagcccaggatgcttttaactgtcgatgaggatctgaagcccctctcagtacctgtccgcgttgggcaagctgtggacgtggttggtcaggcaggaaggcctaagacaattaccggctttcagacacactccacaccagtcttgcttgcagcaggggagagagctgaactagcaactgaaaaatacatcccactgactccggtattagagggctttgtgattttgaagaagaacccggagtaccatgaagagtgaaacgctttagcatgccaaatagcatggtgtttcggaggctcgtgcacatggcagtcttcaagccctggcgcacccctcgtcgagaaatcgctcgccctttgctcaacccttcgcctggagttcatgttgaattcttaccagagttgtggctaactgaaagctgtcttcggttgtgctgatatacgattgtatctgtacgattgtagcaattactgggacagcttactctgtatggtgtggtgataacgtggcatagcatttttggcgctggtctaggttagtccttgtgttgacatggtgcaccatcattataagttttctgtattttatggatccgttctgttcgtgtgtactggaaacattgtacacatgatatgtaagtgtgcctccatgtgtatgtgtgccttcgtgtgtgttttggttttgtctttagcatggcttttgtccccttaaaaccaaaagacaaatcaaagcgctcgaagcaactttttccaaatatatatggaagaacttttagggctgatttggtgatgggttttttacattggtccccttagttgtccaccactgctcattgctacccttaatttttgttcctcctcagttttgcccacgaatccttctctccactcagaaa

SEQ ID NO: 219540 - DNA, 3596 bp, Zea Mays
gaacaattgctcggcccacgtctactcttcttggacgaggggcaaaagctgcgtcgaaacgggaggcgtggctctacgctagcacgctccacctcggacgtctcttctacctctccgtaacaaaggcgcacgggcaaagcggatcccctcttccactccgctgcctcacttccgccgcacgcgaccggaggcggctcaccgcgtagccgcgagcccaacccttgccccgcccgcccgtccttcattccttccggtggactagccgccgtacgcctcaggcagccatgtctccccccgagaatcccagccccgcggcgccggccgagccgtcgcagccgccgccaccggctgccgcggccaaggggaagcggaagaaggacgagaagaaggatgacgatctgtcggaggaggatctggcgctgaaggagcagctggagctctacgtcgtgcgggcgcaggatgcggatccgggcgtgcagaagctcgcgctcgagagcatgaggcaggagattcgctctgccacgagctcaatgacttcagttccaaagccgctgaaattcctccgcccacactttggaactctcaagtcctatttcgaaacaatgccagagtccgagctcaagaagtacatggctgacatactgtcagtgttagctttaacaatgtccgttgaaggagaaagagagagtctgaaataccgtttgctgggttctgaaggtgatattggttcatggggtcatgaatatgtgagaaatttggccggtgagattgcacaagaattccaaaagcgtcaggatgatgacttgcatgctctaatggtgctagtccagcaaattgtttcatttcacatgaagagcataatgctgagcctgaagctgtggatcttcttatggaggttgaagaccttgatttactagttgagcatgtcgatgcaacaaactacaaaagagcttgtttgtaccttactagttcatccaaatttctccctgcccctgatgatagtttagcacttgacatagcgtataccatctatatgaagtttggagaccttgcaagtgctttgagaatttctctgcaacttgagaaatctgtgcagtatgtgaagcaagtctacacagcaactgatgatcttctgctgaagaaacagttctcttatctcattgcgcgccatggtttggctatggagattgatgacgagatctctactgatgataatgataaggaggctttacaagaaatagtaaataatactaagttgagtgagggatatcttactcttgctcgcgatattgaggtcatggagcctaaatccccagaggatatatacaaggtccatttgattgatggccgtggtgccagctccagtcttgattccgcaagacagaatttagctgcaacatttgtaaatgcatttgtgaatgctgggtttggcaaggacaagttgatgaccgctccatctgattcacccagcagcgggtcttccggaaattggttatttaagaacaaggaacatggaaaagccagtgcagcagctagtctgggaatgattctcctgtgggatactgattctgggctcgctcagcttgacaagtacttgcatagtaatgatactcatgttgtagctggagccttgctaggtattggaattgtcacttgcggggtgaagagtgattgtgatcctgcgtttgctattctcatggagtatattggcaaagatgactcaaacattcgtattggagcaatattgggtcttggaattgcatatgctggttcccagaaagaagagcttaaaatgcatctatctgctgtgctgggagactctcaatcacctcttgaagtattggtcttctcagccattgccttggggttggtgtttgttggttcttgcaatgaagagattgcacagtctattatatttgccttgatggagcgtagtgaggctgagttggcagagcccattatacggttgcttcctgttgcgcttggccttctataccttggaaaacaggatagtgtggaggctaccgcagaggtctctaaaacatttgatgaaaagatagggaagtactgtgatgtaacacttatgtcgctggcatatgccgggacaggaaatgtgcttaaggttcagaaacttcttggcatttgttcacagcatcttgagaaaggtgaaacacaccaagggccagctgtccttggaattgctcttattgctatggctgaagaattaggagctgaaatggctgtacgttcacttgagcgtcttctgcagtatggcgagcagaatataagacgagcagttcctcttgctcttggtatactctgcatatctaatcccaaggtgaatgttatggacacactgagtagattgagtcatgatgccgatgccgatgtgtcaatggctgcaattatctcattgggtttgattggtgctggcacaaacaatgccagaatagctgccatgcttcgcaatctttcaagttattactacaaagaagcagctcatctgttttgtgttagaattgctcagggccttgttcacctcggaaagggcttgttgaccctttctccgtaccattctgatagatttcttctttccccgatggcacttggagggcttgtaactgttctgcatgcgtgtcttgatatgaagtccactatcctagggaaatatcactacatactttacattattgtcctggcaatgcagcccaggatgcttttaactgtcgatgaggatctgaagcccctctcagtacctgtccgcgttgggcaagctgtggacgtggttggtcaggcaggaaggcctaagacaattaccggctttcagacacactccacaccagtcttgcttgcagcaggggagagagctgaactagcaactgaaaaatacatcccactgactccggtattagagggctttgtgattttgaagaagaacccggagtaccatgaagagtgaaacgctttagcatgccaaatagcatggtgtttcggaggctcgtgcacatggcagtcttcaagccctggcgcacccctcgtcgagaaatcgctcgccctttgctcaacccttcgcctggagttcatgttgaattcttaccagagttgtggctaactgaaagctgtcttcggttgtgctgatatacgattgtatctgtacgattgtagcaattactgggacagcttactctgtatggtgtggtgataacgtggcatagcatttttggcgctggtctaggttagtccttgtgttgacatggtgcaccatcattataagttttctgtattttatggatccgttctgttcgtgtgtactggaaacattgtacacatgatatgtaagtgtgcctccatgtgtatgtgtgccttcgtgtgtgttttggttttgtctttagcatggcttttgtccccttaaaaccaaaagacaaatcaaagcgctcgaagcaactttttccaaatatatatggaagaacttttagggctgatttggtgatgggttttttacattggtccccttagttgtccaccactgctcattgctacccttaatttttgttcctcctcagttttgcccacgaatccttctctccactcagaaa

SEQ ID NO: 219541 - DNA, 1740 bp, Zea Mays
gctacgtagccgtggtccggcaagtcggggattccaggtccttgacatctagccgtctaggatattcagagcacgacagagttgcagtcaccagtgcaaggttcagaatttgatagagcgttgtctacagctctacatgaacaaaggagaagttgttagaactctttctactcgtgctagaatagaacctggcttcactactttagtatggcagaaacttgaagaagaaaactccgagttctttagggcttactatatacggttgaagttgaaaaggcagatcatcttgttcaatcatttattgcaacaccagtacaatttgatgaaatatccagcacctccgaatattccattggctccaatacaaaatggaattcatcatatgccagttagcaatttaccaatggggtatccagtacttcagcagcctatcatgcctgctcccggccagcctcacatggatccaatggcctgcggtctgtccagtggtcatgtggttaatggaatacctgcaccaggtggttatcatcccatgcgcatgaactccggaaatgacatggttttggacaatggagcgcctgaagcaccacatgctggtgctaccggtagtgctatgtcatctgagatggctgtgagtccctcgtcggcggcttcaagcaaccatgctccttttacgccgtcagatataccaggcatgaccatggatgtatcggccctagactcggcatttgggtgtgatgtggggaatcctgaatctctgcaattgggaccagatgggtcgtcaagagactctattagatccttagggcagctctggaatttcagcctctctgatctaacagcggatttgacgagtttgggagcagatctggacgtgctggagaactacactggcacccctttcctgccatcggattcggacattttgcttgattccccagaccaagatgatatagtcgagtattttgctgacgccatcaacgggtctccgtcagacgaagagaaaccgtagtttttccggggttgcatggcatgcattcaggttcatcatcaggcagggctgtcatctcatctcatgtagtgtaaagcagccaatctaactgtgtattcggctcgcgcgcggtgatccggtaatcgggcctctgccactaaaaagaattttgtagcggttaattgaaatcctaattctttggaataagtagctgggactggaatgtccagagagtagcggtcgttgttggcttagggattgctgctggtggatgcaaacctcacagctagctggtgactctgaaaccacaggaactccttttctttttctttttacttgtatctgtatttgctgctacataagtaaacagaagtggggtgtacctagttttctggttctcgagtgtcttgaaacagtgggcgcgggttttcagctgaaagatcatgatattgtgttgttggcaaagtgctgaggacacgcgatgcaaagtttcttagattagccatacacaggaggctgctggagttgatctcacatctcagggtgtgtttggttgaactggagaatagagcctacccatcgtcaatcattttagtggagcaagaacatcccaataatttatagagttcgcccctctttcgtacaaccgttctccactcaaccaaacacacccttactcaatccatctgtgctgctctctgagctcatctttcctagtcaaacttaaatatgattacaaccaaataacg

SEQ ID NO: 219542 - DNA, 1863 bp, Zea Mays
tacgtagccgtggtccggcaagtcggggattccaggtccttgacatctagccgtctaggatattcagagcacgacagagttgcagtcaccagtgcaaggtactaatgaagtgcaaagtcagcaaccaaactcaatggccgctgatgctcctgctggaaattcgggttccttgtctgtagctagtaatgacaataagaaggtgtctcgcgaagatattgaacttgttcagaatttgatagagcgttgtctacagctctacatgaacaaaggagaagttgttagaactctttctactcgtgctagaatagaacctggcttcactactttagtatggcagaaacttgaagaagaaaactccgagttctttagggcttactatatacggttgaagttgaaaaggcagatcatcttgttcaatcatttattgcaacaccagtacaatttgatgaaatatccagcacctccgaatattccattggctccaatacaaaatggaattcatcatatgccagttagcaatttaccaatggggtatccagtacttcagcagcctatcatgcctgctcccggccagcctcacatggatccaatggcctgcggtctgtccagtggtcatgtggttaatggaatacctgcaccaggtggttatcatcccatgcgcatgaactccggaaatgacatggttttggacaatggagcgcctgaagcaccacatgctggtgctaccggtagtgctatgtcatctgagatggctgtgagtccctcgtcggcggcttcaagcaaccatgctccttttacgccgtcagatataccaggcatgaccatggatgtatcggccctagactcggcatttgggtgtgatgtggggaatcctgaatctctgcaattgggaccagatgggtcgtcaagagactctattagatccttagggcagctctggaatttcagcctctctgatctaacagcggatttgacgagtttgggagcagatctggacgtgctggagaactacactggcacccctttcctgccatcggattcggacattttgcttgattccccagaccaagatgatatagtcgagtattttgctgacgccatcaacgggtctccgtcagacgaagagaaaccgtagtttttccggggttgcatggcatgcattcaggttcatcatcaggcagggctgtcatctcatctcatgtagtgtaaagcagccaatctaactgtgtattcggctcgcgcgcggtgatccggtaatcgggcctctgccactaaaaagaattttgtagcggttaattgaaatcctaattctttggaataagtagctgggactggaatgtccagagagtagcggtcgttgttggcttagggattgctgctggtggatgcaaacctcacagctagctggtgactctgaaaccacaggaactccttttctttttctttttacttgtatctgtatttgctgctacataagtaaacagaagtggggtgtacctagttttctggttctcgagtgtcttgaaacagtgggcgcgggttttcagctgaaagatcatgatattgtgttgttggcaaagtgctgaggacacgcgatgcaaagtttcttagattagccatacacaggaggctgctggagttgatctcacatctcagggtgtgtttggttgaactggagaatagagcctacccatcgtcaatcattttagtggagcaagaacatcccaataatttatagagttcgcccctctttcgtacaaccgttctccactcaaccaaacacacccttactcaatccatctgtgctgctctctgagctcatctttcctagtcaaacttaaatatgattacaaccaaataacg

SEQ ID NO: 219543 - DNA, 2006 bp, Zea Mays
gtagccgtggtccggcaagtcggggattccaggtccttgacatctagccgtctaggatattcagagcacgacagagttgcagtcaccagtgcaaggtactaatgaagtgcaaagtcagcaaccaaactcaatggccgctgatgctcctgctggaaattcgggttccttgtctgtagctagtaatgacaataagaaggtgtctcgcgaagatattgaacttgtaagctttctagctatctagtggcatcccttctagggtagacccagtgcctgaggctcccacatgagtggtgtctggggaagggataaaccgaggcaggcttttcccttgcaaatgcggagaggctgcttcgaacccgcaacctggttcagaatttgatagagcgttgtctacagctctacatgaacaaaggagaagttgttagaactctttctactcgtgctagaatagaacctggcttcactactttagtatggcagaaacttgaagaagaaaactccgagttctttagggcttactatatacggttgaagttgaaaaggcagatcatcttgttcaatcatttattgcaacaccagtacaatttgatgaaatatccagcacctccgaatattccattggctccaatacaaaatggaattcatcatatgccagttagcaatttaccaatggggtatccagtacttcagcagcctatcatgcctgctcccggccagcctcacatggatccaatggcctgcggtctgtccagtggtcatgtggttaatggaatacctgcaccaggtggttatcatcccatgcgcatgaactccggaaatgacatggttttggacaatggagcgcctgaagcaccacatgctggtgctaccggtagtgctatgtcatctgagatggctgtgagtccctcgtcggcggcttcaagcaaccatgctccttttacgccgtcagatataccaggcatgaccatggatgtatcggccctagactcggcatttgggtgtgatgtggggaatcctgaatctctgcaattgggaccagatgggtcgtcaagagactctattagatccttagggcagctctggaatttcagcctctctgatctaacagcggatttgacgagtttgggagcagatctggacgtgctggagaactacactggcacccctttcctgccatcggattcggacattttgcttgattccccagaccaagatgatatagtcgagtattttgctgacgccatcaacgggtctccgtcagacgaagagaaaccgtagtttttccggggttgcatggcatgcattcaggttcatcatcaggcagggctgtcatctcatctcatgtagtgtaaagcagccaatctaactgtgtattcggctcgcgcgcggtgatccggtaatcgggcctctgccactaaaaagaattttgtagcggttaattgaaatcctaattctttggaataagtagctgggactggaatgtccagagagtagcggtcgttgttggcttagggattgctgctggtggatgcaaacctcacagctagctggtgactctgaaaccacaggaactccttttctttttctttttacttgtatctgtatttgctgctacataagtaaacagaagtggggtgtacctagttttctggttctcgagtgtcttgaaacagtgggcgcgggttttcagctgaaagatcatgatattgtgttgttggcaaagtgctgaggacacgcgatgcaaagtttcttagattagccatacacaggaggctgctggagttgatctcacatctcagggtgtgtttggttgaactggagaatagagcctacccatcgtcaatcattttagtggagcaagaacatcccaataatttatagagttcgcccctctttcgtacaaccgttctccactcaaccaaacacacccttactcaatccatctgtgctgctctctgagctcatctttcctagtcaaacttaaatatgattacaaccaaataacg

SEQ ID NO: 219544 - DNA, 6006 bp, Zea Mays
ccgcgagctacagctttgcagcgctctctcttggctcgctcgctcgctcgcccgcctcgcctgcgccctctctttcactcctggctcgcttgcgttgtggagctcgagactgtcgccattccgctacgagaaaccctaaccctagccctcgcaccgccgcgggaggccgcgggagagaccgtgtcgcaccgcgccgtcgatcccgatccagacgccgtcgcgccgtgccgcgctgatcgagtgtggaggaatggaggacgggcagaatatcagattgcttgcagctagtttatttttccagcccagggtgaacttctgggtagtgtagtttgtcgtgggtttatcttctgcagaatagaagcaaatatttgtaaaagctgcttatagttctatatgatatgaaagtttgggaactatcaactgcaaattggccactctttctcaggcattagaccctaagggatactcaaggaatgtcacattttcatcccacacagcatgctagtgacaatgattttcagatgtggcaacagcagatgatgttcaagcacttgcaggagtttcagaggcagcaacaactacagcagtctgatcatggagccaggatgcagctctcttttggacagtttcatgctcctgcaaaacctttgcctggtgatcaattgtcgacaatgtcaaatgaaatggtcaacaatgagaccatgaattctggatggccacataattttacaggtggtgacctgagtttgacgagcaactcccagatgttgaacaatggtagcacaaattgggatcagattgttggttctcctgttgtgggcaatttcatgaatggttcaatgtttgtgaatgctcataatcagtcgatgagaccaatgggattagctacccaccaagtggatcaaactttttatccaatgcatgctaccagcagtagagggcctggaaaccagtattcccaatttttagggattcctgctgatcctcagagtgaagcggcaagggttggtccagttcagtcagaaaagacatccagaccattcaactcttcaatgaacgaacttggtcttcatatgcaaggtaccaccagtttgatgcataattttcgtggaaaagggggcttcttaaataacagtctgatgcaaagtcaaggtgataatatcagggcaggcagtccggttacaatgaatcaactacaacatggttttcaaacccaagattttcatggtaggccaaaccaagttgatcttcaagcgggcatgcaagagaaatcagcaatgcaggtagggcaagcgagtcgtggggctagccttgaccctactgaggagaaaatcttatttgggagtgacgaggatagcaactggggagctttgttgaggggtgacaatgacaatgtcaattctttggacaatgacaactatggtggtggctactcatctctacagagcggtagctggagtgcccttatgcaggaagctctccagtctacaaccagtgaaagtcccaaagaagagtggagtggcttgagtttccataaaactgagcaggtgatggctagcaatgcaaatttatcaggccgcaatggtagtaagtttactggattaagtggtgcaaacctagaaaatgcacgtccttcgccagcgtccagctatgctgatggaacaatgaataacccaaaccttgccagttttcagcatgtcataaggcctccatccgagcgaagggaccatatgtctcatgaatcttctaatgctcctgttaacaatcatcaatcaacttctgaagtcaacaaggggtactttcagcaaggcataaaacaaattcactctgatgcaaggcaaggacaagcgcacctagtaaatggaacctggccgcatcaaaagactgaactgctcagaagtaatttgcagtcaactggtgtacatgctacaccacctggtggacatggatttgggatgtcacaacaaattgcaactgatcacaatatcaacagagagtccagtaataatcaaaatgactggaaagctaacaatgcacttggacaagacatgtgcaatagccaaaatatctttaatagcaatgagaactcttggaagtcaactggaggtaatgccaattcagtccagagatttcagcagaggaggtctgatgtaagcgctactaatgaaagttcagatggtaaaaatattagcatgatgagctcaagcatgccaatgatgacacaggatcattaccagatggtcactagtcagagtggtgagcaaattggcatgaaccgtaatctgacacatagagctccagagacctctgagtcaccaggaaaaagcgcagaacaaagaccaggtgatttcaatcaggaatatctaaatgcaatccctaacgaaagagaaacacacatttcaaaccatggtcgacacataacaagtgattctgcccccagaaggcattctgtatctgctgggaaggaatctgaaaatttaggtcagtctagtcagcaagcaatgggatcttacatcttgcagaaccgtgctatggggagttctggaatgaacattggtctgtctccaggcaatccaatgtcaaatagtctgtttccacctcagacacgaaatagtctgcagcatcattttggcacaaactcccatgtttccaatagtatgccgtcagcaagtgagttcccttatttgtagaaaatgatgatggcacaggaacaacttcaatcgcgacatggtctccccaacagctccagtgcatcaactttaggaggagctgatactggtctatcccagaatagagcagttcaaaacagtcaacatatgcttcagcttctgcataaggtggataactcaaggaatagcaatgtggttgctgacatacccaacaattcccttggcgttgtttctgcccagcaacaacttaaccattcttctttgcaaggatttgggttgagactggcaccaccatcccaactccaatcaatttcgggtaatttatggtctagtcagactaatgctgatggcaagcaattttaccaagatggcgaccgcacacagctaccttccacccctagccagtcactgactcctcagcatcaaaattctctatcttcaccatttcacagttcagaaacagaaaatactgggcaaccaattgcgtgtttcccccaattaggatcaggccaacagtatcctatggcagatgatagatctggtcctgcacccatgctgcagcagcagcctcagcaaagcaactctgcaacagtgttcaagaatgtatggacaaacatatcagcacagcgcctaactggtatgcaacctaacaagattacacccaacatcattcagtctatgatgtttccaaataatgctgcagcttccaacttatggagctctcagaaggcagatgatcaagggcagagggcatcaactccatcagatattgcaacaagttcagcgaactcacagaatcaatctccaaaacaagctgctgatagtgatgcaaagttagcatcttcccagaagggaaacctagagttgacaggaactaccgtaacaggaggaaacgaatccttgcagaagccttcttcagatgagaattctatcaatgctgtttcatcctttgcacagttgcgtcagcaaggcatccttggtgctaaacatggggagaacccaggagctaattttcaggctatgaatgtttcccacaataatgctaatcacagtggtggcattgttttacatggaagtccagcacctacaaacattcagcagcaaaattactctcttctacatcaaatgcaaacctcgaggcatatggatgttgatccaggcagtttatctggaaagacgacaaaacctgatattggttctgatgctgcacagattgattggaattctggtcagagatttgctcatgtaaccaataactcaaccaaatcgtctgcagataacattggaagccctggtgtcccagggtcattcacatcggacttgaaaatgttgagttttgcttcaaggaacgaggagagaaatccaaacataccttctcggtttccttccggagagtgcccgtctcctggtatgataaccacacaagatgataatcagaatcaagttcagcatatgggcacaggtgcaatgtcaaattctgatgaaagaagtgagaggccgaggataaaccctcaaatggcaccttcttggtttggacattacggaaactacagaaatggtcagagtgttgctacgcttaatgctgctacgcttaatgcgcagaagcccatggctttgccatttaattttccgaaagcatctcggaacaatgaaaataatagccatgctgaaaatagagttgaacctagccaatctgttaggcctgggcatcatctcccatcagcaagaatggaagctttggttccttccaatgtaaaagtgtcttcaatgatgagaaggcctaagaagcgtaaaactatggactccacacttgtttcttggcataaaataattgaaagcccacgaaaattgaggggcatcagcacacctgagatggactgggcttgggcagctaaccggttaattgagaaggatgaggcagaaactccagacgatgctcctttaaattatttgccgcggaagaggctaattttgacaagccagttgatccagcaacttctccctgctataccagcgaccattctgagagcacaagctgtgtctgcttacggaagtgcgacatacactctatcaatgttgacactaagggatgcatgcagcatggcatcatcatcatataactcttgctcacctgtggaggatgaaaataacccatctgaacaaccaagtgctaagaaaatggaagacagagtgtcaaaggttgtggaagtcttcgttggaagaatccggaagatggaaaatgactttataagtttgaacaagagggcctcgatgctagatgtgcaactggagtgccaagatctggagagaatttctattgtaaatcgtctgggaagatttcatggccggagccatgcagcggcagttgagagttcatcagctccagaaatgactcctcggagaatttttcctgaaagacatgtcatgtcttttgccgtgcctggaaatcttcctgaaggagtgtgctgtttgtcactctagtggaatgatcttcagttattttctagccgcaatgatgatcccgggtcgcgccctgtgattcccagtgctccttgtcccatgcaaagcatggtcaaacagaaggatcatatattgtcaaggggtaacttgagaactggaagcatcacagtaccacgatgaggcaggccggggacatgttccagccgatcaagtcagtgctggctgttgttgatgcaccttatatcaagtataggtccatgtatattgtggaaagtgaaggaaaaaaactgtggatctcccatcatttttctcgatgaagagtaattagcctcagaatttttttagagaagtcgatgcttactagcttagtgcatctggtgggtttcttgggtatttgtcgatctctaagaaatccgtgatgatggagtgttggcaggctagagtggaaataataatgtgagcctttctctgggttctttggttcctttaggatgggatgcaaattggctagtgtgtcctccagtctaactgaccacccctgttagtcagcagttaattattactagttttatgtagtgctgaaagcattcatggaacaattggcgggtaaagtgcttgggaattcttgtaacttgtgtacccgtgatgtttaaacgctaacgggttcttgtaaatttgaagtgccaatattcctgaggttatattttgctttgtgcaaattgaccagcgtctactgtctccagatgcgtcaatgaagctgggcgcttgcggcttccggtgttccgtttcgctagtggaatgatctcgtgatgatacagtctaaattgatcagtgagctgcgattgggtttgcgagtttccgtaggtttagaatgaag

SEQ ID NO: 219545 - DNA, 5936 bp, Zea Mays
gcaccccctctccgcgagctacagctttgcagcgctctctcttggctcgctcgctcgctcgcccgcctcgcctgcgccctctctttcactcctggctcgcttgcgttgtggagctcgagactgtcgccattccgctacgagaaaccctaaccctagccctcgcaccgccgcgggaggccgcgggagagaccgtgtcgcaccgcgccgtcgatcccgatccagacgccgtcgcgccgtgccgcgctgatcgagtgtggaggaatggaggacgggcagaatatcagattgcttgcagctagtttatttttccagcccagggtgaacttctgggtagtgtagtttgtcgtgggtttatcttctgcagaatagaagcaaatatttgtaaaagctgcttatagttctatatgatatgaaagtttgggaactatcaactgcaaattggccactctttctcaggcattagaccctaagggatactcaaggaatgtcacattttcatcccacacagcatgctagtgacaatgattttcagatgtggcaacagcagatgatgttcaagcacttgcaggagtttcagaggcagcaacaactacagcagtctgatcatggagccaggatgcagctctcttttggacagtttcatgctcctgcaaaacctttgcctggtgatcaattgtcgacaatgtcaaatgaaatggtcaacaatgagaccatgaattctggatggccacataattttacaggtggtgacctgagtttgacgagcaactcccagatgttgaacaatggtagcacaaattgggatcagattgttggttctcctgttgtgggcaatttcatgaatggttcaatgtttgtgaatgctcataatcagtcgatgagaccaatgggattagctacccaccaagtggatcaaactttttatccaatgcatgctaccagcagtagagggcctggaaaccagtattcccaatttttagggattcctgctgatcctcagagtgaagcggcaagggttggtccagttcagtcagaaaagacatccagaccattcaactcttcaatgaacgaacttggtcttcatatgcaaggtaccaccagtttgatgcataattttcgtggaaaagggggcttcttaaataacagtctgatgcaaagtcaaggtgataatatcagggcaggcagtccggttacaatgaatcaactacaacatggttttcaaacccaagattttcatggtaggccaaaccaagttgatcttcaagcgggcatgcaagagaaatcagcaatgcaggtagggcaagcgagtcgtggggctagccttgaccctactgaggagaaaatcttatttgggagtgacgaggatagcaactggggagctttgttgaggggtgacaatgacaatgtcaattctttggacaatgacaactatggtggtggctactcatctctacagagcggtagctggagtgcccttatgcaggaagctctccagtctacaaccagtgaaagtcccaaagaagagtggagtggcttgagtttccataaaactgagcaggtgatggctagcaatgcaaatttatcaggccgcaatggtagtaagtttactggattaagtggtgcaaacctagaaaatgcacgtccttcgccagcgtccagctatgctgatggaacaatgaataacccaaaccttgccagttttcagcatgtcataaggcctccatccgagcgaagggaccatatgtctcatgaatcttctaatgctcctgttaacaatcatcaatcaacttctgaagtcaacaaggggtactttcagcaaggcataaaacaaattcactctgatgcaaggcaaggacaagcgcacctagtaaatggaacctggccgcatcaaaagactgaactgctcagaagtaatttgcagtcaactggtgtacatgctacaccacctggtggacatggatttgggatgtcacaacaaattgcaactgatcacaatatcaacagagagtccagtaataatcaaaatgactggaaagctaacaatgcacttggacaagacatgtgcaatagccaaaatatctttaatagcaatgagaactcttggaagtcaactggaggtaatgccaattcagtccagagatttcagcagaggaggtctgatgtaagcgctactaatgaaagttcagatggtaaaaatattagcatgatgagctcaagcatgccaatgatgacacaggatcattaccagatggtcactagtcagagtggtgagcaaattggcatgaaccgtaatctgacacatagagctccagagacctctgagtcaccaggaaaaagcgcagaacaaagaccaggtgatttcaatcaggaatatctaaatgcaatccctaacgaaagagaaacacacatttcaaaccatggtcgacacataacaagtgattctgcccccagaaggcattctgtatctgctgggaaggaatctgaaaatttaggtcagtctagtcagcaagcaatgggatcttacatcttgcagaaccgtgctatggggagttctggaatgaacattggtctgtctccaggcaatccaatgtcaaatagtctgtttccacctcagacacgaaatagtctgcagcatcattttggcacaaactcccatgtttccaatagtatgccgtcagcaagtgagaaaatgatgatggcacaggaacaacttcaatcgcgacatggtctccccaacagctccagtgcatcaactttaggaggagctgatactggtctatcccagaatagagcagttcaaaacagtcaacatatgcttcagcttctgcataaggtggataactcaaggaatagcaatgtggttgctgacatacccaacaattcccttggcgttgtttctgcccagcaacaacttaaccattcttctttgcaaggatttgggttgagactggcaccaccatcccaactccaatcaatttcgggtaatttatggtctagtcagactaatgctgatggcaagcaattttaccaagatggcgaccgcacacagctaccttccacccctagccagtcactgactcctcagcatcaaaattctctatcttcaccatttcacagttcagaaacagaaaatactgggcaaccaattgcgtgtttcccccaattaggatcaggccaacagtatcctatggcagatgatagatctggtcctgcacccatgctgcagcagcagcctcagcaaagcaactctgcaacagtgttcaagaatgtatggacaaacatatcagcacagcgcctaactgcttccaacttatggagctctcagaaggcagatgatcaagggcagagggcatcaactccatcagatattgcaacaagttcagcgaactcacagaatcaatctccaaaacaagctgctgatagtgatgcaaagttagcatcttcccagaagggaaacctagagttgacaggaactaccgtaacaggaggaaacgaatccttgcagaagccttcttcagatgagaattctatcaatgctgtttcatcctttgcacagttgcgtcagcaaggcatccttggtgctaaacatggggagaacccaggagctaattttcaggctatgaatgtttcccacaataatgctaatcacagtggtggcattgttttacatggaagtccagcacctacaaacattcagcagcaaaattactctcttctacatcaaatgcaaacctcgaggcatatggatgttgatccaggcagtttatctggaaagacgacaaaacctgatattggttctgatgctgcacagattgattggaattctggtcagagatttgctcatgtaaccaataactcaaccaaatcgtctgcagataacattggaagccctggtgtcccagggtcattcacatcggacttgaaaatgttgagttttgcttcaaggaacgaggagagaaatccaaacataccttctcggtttccttccggagagtgcccgtctcctggtatgataaccacacaagatgataatcagaatcaagttcagcatatgggcacaggtgcaatgtcaaattctgatgaaagaagtgagaggccgaggataaaccctcaaatggcaccttcttggtttggacattacggaaactacagaaatggtcagagtgttgctacgcttaatgctgctacgcttaatgcgcagaagcccatggctttgccatttaattttccgaaagcatctcggaacaatgaaaataatagccatgctgaaaatagagttgaacctagccaatctgttaggcctgggcatcatctcccatcagcaagaatggaagctttggttccttccaatgtaaaagtgtcttcaatgatgagaaggcctaagaagcgtaaaactatggactccacacttgtttcttggcataaaataattgaaagcccacgaaaattgaggggcatcagcacacctgagatggactgggcttgggcagctaaccggttaattgagaaggatgaggcagaaactccagacgatgctcctttaaattatttgccgcggaagaggctaattttgacaagccagttgatccagcaacttctccctgctataccagcgaccattctgagagcacaagctgtgtctgcttacggaagtgcgacatacactctatcaatgttgacactaagggatgcatgcagcatggcatcatcatcatataactcttgctcacctgtggaggatgaaaataacccatctgaacaaccaagtgctaagaaaatggaagacagagtgtcaaaggttgtggaagtcttcgttggaagaatccggaagatggaaaatgactttataagtttgaacaagagggcctcgatgctagatgtgcaactggagtgccaagatctggagagaatttctattgtaaatcgtctgggaagatttcatggccggagccatgcagcggcagttgagagttcatcagctccagaaatgactcctcggagaatttttcctgaaagacatgtcatgtcttttgccgtgcctggaaatcttcctgaaggagtgtgctgtttgtcactctagtggaatgatcttcagttattttctagccgcaatgatgatcccgggtcgcgccctgtgattcccagtgctccttgtcccatgcaaagcatggtcaaacagaaggatcatatattgtcaaggggtaacttgagaactggaagcatcacagtaccacgatgaggcaggccggggacatgttccagccgatcaagtcagtgctggctgttgttgatgcaccttatatcaagtataggtccatgtatattgtggaaagtgaaggaaaaaaactgtggatctcccatcatttttctcgatgaagagtaattagcctcagaatttttttagagaagtcgatgcttactagcttagtgcatctggtgggtttcttgggtatttgtcgatctctaagaaatccgtgatgatggagtgttggcaggctagagtggaaataataatgtgagcctttctctgggttctttggttcctttaggatgggatgcaaattggctagtgtgtcctccagtctaactgaccacccctgttagtcagcagttaattattactagttttatgtagtgctgaaagcattcatggaacaattggcgggtaaagtgcttgggaattcttgtaacttgtgtacccgtgatgtttaaacgctaacgggttcttgtaaatttgaagtgccaatattcctgaggttatattttgctttgtgcaaattgaccagcgtctactgtctccagatgcgtcaatgaagctgggcgcttgcggcttccggtgttccgtttcgctagtggaatgatctcgtgatgatacagtctaaattgatcagtgagctgcgattgggtttgcgagtttccgtaggtttagaatgaag

SEQ ID NO: 219546 - DNA, 6958 bp, Zea Mays
acgctcagacgtctaggcatctcgcttgctttccttccaggcttccacgattccaccccagtctgcccaccgactcttccctctccccactactgtcggcgcgtgctctttcctcctcacaccgcacacccgctgccggagctcgagagtcccctccgcttgtcggtgcccgttctgtcaacccctcgccggacgcctgccgccggagctagagagggccaatgcagccgccgctgcgtggtgcctagggcgggtcgcaggggacaaggccgagcccaccaccgtcgacgaggcattcatggaacgcagcaagagcttcatcaaggccctccaggagctcaagaacctgcgcccacagctctacaccgcctccgagtactgcgacaagtcctaactccacagtgagcagaagcaaaagcatacatggtggagctttatcaagataatcttatggacctattgctgccctgaaatgcaaagcaactaaagttagagataaaaaattccaaggcatctagaatgttagaaaatccaagtggaagactcccatgatgcaatcctatatccactgcaggcaaggaatcatctgcatctccattctccaggaatgtgtagtcgcataaccagtttgaatattgttagggttggcatgaaggttcagcccacgactaggctccacatgtttgtcatcactcagttctttggagtttggacaacccccgagggcaccaaatctaggaggctcttcttcgcactaaaatcacaagaatgcgctcgaaaactgagggcagatttggcaattgaagaacagtgggaacaagaactgagaagaatgctgaagggcatagtaacagatacaagctaaaattgagacacatataaatgaccatgaatgagactgtatgagcctgatcagctcaattctaggttatgtgcattgtttgctcagtagactacagaccataaggtttatctcctcactgatttgatattattatttattatgccagttcttggaagttgaccttgcattatgtctgttcgtgtttgtgtagatgctcgacgttaaacttatgctgtcatgtagatgcttagtcctctcctcgcctttcgcagtcgcaggcgagttaagaagtggactaacttggatgaaccagcagagagtatgttccctagacaacgacaaacaatgttacctctacgtaaattgtggaggaatggaggacgggcagaatatcagattgcttgcagctagtttatttttccagcccagggtgaacttctgggtagtgtagtttgtcgtgggtttatcttctgcagaatagaagcaaatatttgtaaaagctgcttatagttctatatgatatgaaagtttgggaactatcaactgcaaattggccactctttctcaggcattagaccctaagggatactcaaggaatgtcacattttcatcccacacagcatgctagtgacaatgattttcagatgtggcaacagcagatgatgttcaagcacttgcaggagtttcagaggcagcaacaactacagcagtctgatcatggagccaggatgcagctctcttttggacagtttcatgctcctgcaaaacctttgcctggtgatcaattgtcgacaatgtcaaatgaaatggtcaacaatgagaccatgaattctggatggccacataattttacaggtggtgacctgagtttgacgagcaactcccagatgttgaacaatggtagcacaaattgggatcagattgttggttctcctgttgtgggcaatttcatgaatggttcaatgtttgtgaatgctcataatcagtcgatgagaccaatgggattagctacccaccaagtggatcaaactttttatccaatgcatgctaccagcagtagagggcctggaaaccagtattcccaatttttagggattcctgctgatcctcagagtgaagcggcaagggttggtccagttcagtcagaaaagacatccagaccattcaactcttcaatgaacgaacttggtcttcatatgcaaggtaccaccagtttgatgcataattttcgtggaaaagggggcttcttaaataacagtctgatgcaaagtcaaggtgataatatcagggcaggcagtccggttacaatgaatcaactacaacatggttttcaaacccaagattttcatggtaggccaaaccaagttgatcttcaagcgggcatgcaagagaaatcagcaatgcaggtagggcaagcgagtcgtggggctagccttgaccctactgaggagaaaatcttatttgggagtgacgaggatagcaactggggagctttgttgaggggtgacaatgacaatgtcaattctttggacaatgacaactatggtggtggctactcatctctacagagcggtagctggagtgcccttatgcaggaagctctccagtctacaaccagtgaaagtcccaaagaagagtggagtggcttgagtttccataaaactgagcaggtgatggctagcaatgcaaatttatcaggccgcaatggtagtaagtttactggattaagtggtgcaaacctagaaaatgcacgtccttcgccagcgtccagctatgctgatggaacaatgaataacccaaaccttgccagttttcagcatgtcataaggcctccatccgagcgaagggaccatatgtctcatgaatcttctaatgctcctgttaacaatcatcaatcaacttctgaagtcaacaaggggtactttcagcaaggcataaaacaaattcactctgatgcaaggcaaggacaagcgcacctagtaaatggaacctggccgcatcaaaagactgaactgctcagaagtaatttgcagtcaactggtgtacatgctacaccacctggtggacatggatttgggatgtcacaacaaattgcaactgatcacaatatcaacagagagtccagtaataatcaaaatgactggaaagctaacaatgcacttggacaagacatgtgcaatagccaaaatatctttaatagcaatgagaactcttggaagtcaactggaggtaatgccaattcagtccagagatttcagcagaggaggtctgatgtaagcgctactaatgaaagttcagatggtaaaaatattagcatgatgagctcaagcatgccaatgatgacacaggatcattaccagatggtcactagtcagagtggtgagcaaattggcatgaaccgtaatctgacacatagagctccagagacctctgagtcaccaggaaaaagcgcagaacaaagaccaggtgatttcaatcaggaatatctaaatgcaatccctaacgaaagagaaacacacatttcaaaccatggtcgacacataacaagtgattctgcccccagaaggcattctgtatctgctgggaaggaatctgaaaatttaggtcagtctagtcagcaagcaatgggatcttacatcttgcagaaccgtgctatggggagttctggaatgaacattggtctgtctccaggcaatccaatgtcaaatagtctgtttccacctcagacacgaaatagtctgcagcatcattttggcacaaactcccatgtttccaatagtatgccgtcagcaagtgagaaaatgatgatggcacaggaacaacttcaatcgcgacatggtctccccaacagctccagtgcatcaactttaggaggagctgatactggtctatcccagaatagagcagttcaaaacagtcaacatatgcttcagcttctgcataaggtggataactcaaggaatagcaatgtggttgctgacatacccaacaattcccttggcgttgtttctgcccagcaacaacttaaccattcttctttgcaaggatttgggttgagactggcaccaccatcccaactccaatcaatttcgggtaatttatggtctagtcagactaatgctgatggcaagcaattttaccaagatggcgaccgcacacagctaccttccacccctagccagtcactgactcctcagcatcaaaattctctatcttcaccatttcacagttcagaaacagaaaatactgggcaaccaattgcgtgtttcccccaattaggatcaggccaacagtatcctatggcagatgatagatctggtcctgcacccatgctgcagcagcagcctcagcaaagcaactctgcaacagtgttcaagaatgtatggacaaacatatcagcacagcgcctaactggtatgcaacctaacaagattacacccaacatcattcagtctatgatgtttccaaataatgctgcagcttccaacttatggagctctcagaaggcagatgatcaagggcagagggcatcaactccatcagatattgcaacaagttcagcgaactcacagaatcaatctccaaaacaagctgctgatagtgatgcaaagttagcatcttcccagaagggaaacctagagttgacaggaactaccgtaacaggaggaaacgaatccttgcagaagccttcttcagatgagaattctatcaatgctgtttcatcctttgcacagttgcgtcagcaaggcatccttggtgctaaacatggggagaacccaggagctaattttcaggctatgaatgtttcccacaataatgctaatcacagtggtggcattgttttacatggaagtccagcacctacaaacattcagcagcaaaattactctcttctacatcaaatgcaaacctcgaggcatatggatgttgatccaggcagtttatctggaaagacgacaaaacctgatattggttctgatgctgcacagattgattggaattctggtcagagatttgctcatgtaaccaataactcaaccaaatcgtctgcagataacattggaagccctggtgtcccagggtcattcacatcggacttgaaaatgttgagttttgcttcaaggaacgaggagagaaatccaaacataccttctcggtttccttccggagagtgcccgtctcctggtatgataaccacacaagatgataatcagaatcaagttcagcatatgggcacaggtgcaatgtcaaattctgatgaaagaagtgagaggccgaggataaaccctcaaatggcaccttcttggtttggacattacggaaactacagaaatggtcagagtgttgctacgcttaatgctgctacgcttaatgcgcagaagcccatggctttgccatttaattttccgaaagcatctcggaacaatgaaaataatagccatgctgaaaatagagttgaacctagccaatctgttaggcctgggcatcatctcccatcagcaagaatggaagctttggttccttccaatgtaaaagtgtcttcaatgatgagaaggcctaagaagcgtaaaactatggactccacacttgtttcttggcataaaataattgaaagcccacgaaaattgaggggcatcagcacacctgagatggactgggcttgggcagctaaccggttaattgagaaggatgaggcagaaactccagacgatgctcctttaaattatttgccgcggaagaggctaattttgacaagccagttgatccagcaacttctccctgctataccagcgaccattctgagagcacaagctgtgtctgcttacggaagtgcgacatacactctatcaatgttgacactaagggatgcatgcagcatggcatcatcatcatataactcttgctcacctgtggaggatgaaaataacccatctgaacaaccaagtgctaagaaaatggaagacagagtgtcaaaggttgtggaagtcttcgttggaagaatccggaagatggaaaatgactttataagtttgaacaagagggcctcgatgctagatgtgcaactggagtgccaagatctggagagaatttctattgtaaatcgtctgggaagatttcatggccggagccatgcagcggcagttgagagttcatcagctccagaaatgactcctcggagaatttttcctgaaagacatgtcatgtcttttgccgtgcctggaaatcttcctgaaggagtgtgctgtttgtcactctagtggaatgatcttcagttattttctagccgcaatgatgatcccgggtcgcgccctgtgattcccagtgctccttgtcccatgcaaagcatggtcaaacagaaggatcatatattgtcaaggggtaacttgagaactggaagcatcacagtaccacgatgaggcaggccggggacatgttccagccgatcaagtcagtgctggctgttgttgatgcaccttatatcaagtataggtccatgtatattgtggaaagtgaaggaaaaaaactgtggatctcccatcatttttctcgatgaagagtaattagcctcagaatttttttagagaagtcgatgcttactagcttagtgcatctggtgggtttcttgggtatttgtcgatctctaagaaatccgtgatgatggagtgttggcaggctagagtggaaataataatgtgagcctttctctgggttctttggttcctttaggatgggatgcaaattggctagtgtgtcctccagtctaactgaccacccctgttagtcagcagttaattattactagttttatgtagtgctgaaagcattcatggaacaattggcgggtaaagtgcttgggaattcttgtaacttgtgtacccgtgatgtttaaacgctaacgggttcttgtaaatttgaagtgccaatattcctgaggttatattttgctttgtgcaaattgaccagcgtctactgtctccagatgcgtcaatgaagctgggcgcttgcggcttccggtgttccgtttcgctagtggaatgatctcgtgatgatacagtctaaattgatcagtgagctgcgattgggtttgcgagtttccgtaggtttagaatgaag

SEQ ID NO: 219547 - DNA, 1070 bp, Zea Mays
aaaaacctctgcttctgtgttcatttggtcttgagaaatatgaaaagtgcattccatcttctcgccttctgaggcagaagaacttcttgctattgccatttccctctttttggaccgtcgacttgaagggttgctgcttgttttgggagactgcctgaattcacttatattatacttcaatacgagtgagtgggaaactagctgtgtgatggtggctgaatcaattgctcagagggtcacactggacctcaattgtttaagggttgttgactgcatcactggtacaaataagcgcagcaaaatcctaaggagtcaggtggcacttcagctgctgaagatcagctttgggcttaaggtggcgaatgttgagaagattttgaagctagtcacatccatcaacgtgaaggagaaagaatgtgacttcttcaggctttatgtgtatctagtattgatggacaacttgctcttctcaagtgatgcatttagagataagactgggatggttgatgcttggcggaattatctgcgcaactgttccacccaaattgggtgcacggactggagattctatgctccaaaggcccgaaacaaggcttcttatcttctgcaaggttcaatcttgaaaaaaagcagtggcgatggtaaaagttgtgtccggtaatcaaaggggaccaaatgtctggtgcagcagtgcccaggttgtggttccattcgatgggcaacggcgaagtgctcatatcattccatgttttatgtacaattcttttttagttgttgtgttttagttcaaaaatgaactagcgagcgacaaatattcgagaacagagttagcagccagatttagaggggtgttgattgatgtatctgtgggggtgcttctgcttggttgattgacagaaacaaaaaggaaagagagcagcaagggatgattgggtgcagcctggagggggatgttttgtttatctcgtgttattaggttcttctccaactggctggttagctggctggccagattccgagcatcgttttcggacttgtctgctggtgtgcacatggtctggagtctggac

SEQ ID NO: 219548 - DNA, 2889 bp, Zea Mays
tacaggcaaaatatttccggtcctcaaagctcccgcccgccctccttccctccctccctccggcgccagtccaggcacaggcaggcttcagtctccagagatggcgaggaacgagcccctagacttcgagaacgaggacgatccgctcctccccgccccgcgccccgccaagaggagcaaggtcatcggcatggatgatctcctgctggattactttcaatctggtaaaaaggacaagctcaaagttaaggctgccaagtctaagcatggccccaaaggaggatatgattcaggtgaggaagacgacagggctacacagcaagagattacagtctgcaaaatatttgaggaagttcagcaaaagggcaaagtgatggatgctagagacgatgtacccccatggggtcaacaattttttagatgccaggtcgactctaactttatcttctgtttaccattttcagtccaccagatgctttccctttcttgatcaccagccactaagttattcatccttacagaaccccccctcaaatcttagcaatggcggagttgagaattgtcatctcctgcaatcattctctgcaattgaagatataggttttgatctagagatgcatcaaggttcattatgttcccacttcccactgtgaaatgttctattttttaaataacataaaacccaccagtgtttgaattggttcaaccttttgttctctttcactgtgttgtatgtttatatctgttagtcaatattaaaattgatcccctgttctatgtttttttgctttgtcacttgcagttaattttggcgtcttcctcatgtttttgtgtaggagaggggttcctcgaaggcatgctgttggatggatggcttctgaatttggttcgcatatgtggttttgttgaagactctgtagcatcgtggacgctgaccaacttgttgcattcacccaatgagaaattacaagtttctgcagctgacttttgggatggcattctttccttggatgaggctggtgaaccgttggtcaaccttgggtattttccaagttactctgttctaaaacgggctatgctgagctatggatatctatttgatacttcaggcactaaggcttcaatctctggaagcactgctgcaggtggccctgatgatagtctgcctcataacatcattgcttggttaagagttgtatctgcttgctgcaaaatcaggtacaaattttttaatacactggatatttttgcttagtatctcagcttgcacacttacacaagcctaaactcatcactcattagcatagttaacatggcaacagcatatcaaacaaagctaagcgtactaacttgaaaattttatcatttttctcaacactataaaatataacagaattcttccaccccccaaatataacaacacactgctcgtaaagtaactcatgtcaaagttgcacttatactttttttggttaagtggcagtgcagtaaataacattcgtatttcaccatataatagtcttgttgaaaaaaatctcagcttttattgaaagctaatgacagtctgtgtcatacaactgtggaaaccagttcacaagaagagcaaaaagacatactcaaacaaacaaggaacaagagtctacaacacacaacataaactatcttcagagtttctctatgcccgttgacttcaccatcttgtggtggaaattatgcaacaacttgcatagtatcaacatcacagactctagccaatcatggtccgagaatggctccattaaagcaccgcaagggagcagggtgatttactgttgtaagactattgaagggcatatagcttttcccccctgtcattgatgctaaaagtgcattccatcttctcgccttctgaggcagaagaacttcttgctattgccatttccctctttttggaccgtcgacttgaagggttgctgcttgttttgggagactgcctgaattcacttatattatacttcaatacgagtgagtgggaaactagctgtgtgatggtggctgaatcaattgctcagagggtcacactggacctcaattgtttaagggttgttgactgcatcactggtacaaataagcgcagcaaaatcctaaggagtcaggtggcacttcagctgctgaagatcagctttgggcttaaggtggcgaatgttgagaagattttgaagctagtcacatccatcaacgtgaaggagaaagaatgtgacttcttcaggctttatgtgtatctagtattgatggacaacttgctcttctcaagtgatgcatttagagataagactgggatggttgatgcttggcggaattatctgcgcaactgttccacccaaattgggtgcacggactggagattctatgctccaaaggcccgaaacaaggcttcttatcttctgcaaggttcaatcttgaaaaaaagcagtggcgatggtaaaagttgtgtccggtaatcaaaggggaccaaatgtctggtgcagcagtgcccaggttgtggttccattcgatgggcaacggcgaagtgctcatatcattccatgttttatgtacaattcttttttagttgttgtgttttagttcaaaaatgaactagcgagcgacaaatattcgagaacagagttagcagccagatttagaggggtgttgattgatgtatctgtgggggtgcttctgcttggttgattgacagaaacaaaaaggaaagagagcagcaagggatgattgggtgcagcctggagggggatgttttgtttatctcgtgttattaggttcttctccaactggctggttagctggctggccagattccgagcatcgttttcggacttgtctgctggtgtgcacatggtctggagtctggac

SEQ ID NO: 219549 - DNA, 1871 bp, Zea Mays
tacaggcaaaatatttccggtcctcaaagctcccgcccgccctccttccctccctccctccggcgccagtccaggcacaggcaggcttcagtctccagagatggcgaggaacgagcccctagacttcgagaacgaggacgatccgctcctccccgccccgcgccccgccaagaggagcaaggtcatcggcatggatgatctcctgctggattactttcaatctggtaaaaaggacaagctcaaagttaaggctgccaagtctaagcatggccccaaaggaggatatgattcaggtgaggaagacgacagggctacacagcaagagattacagtctgcaaaatatttgaggaagttcagcaaaagggcaaagtgatggatgctagagacgatgtacccccatggggtcaacaattttttagatgccagttaattttggcgtcttcctcatgtttttgtgtaggagaggggttcctcgaaggcatgctgttggatggatggcttctgaatttggttcgcatatgtggttttgttgaagactctgtagcatcgtggacgctgaccaacttgttgcattcacccaatgagaaattacaagtttctgcagctgacttttgggatggcattctttccttggatgaggctggtgaaccgttggtcaaccttgggtattttccaagttactctgttctaaaacgggctatgctgagctatggatatctatttgatacttcaggcactaaggcttcaatctctggaagcactgctgcaggtggccctgatgatagtctgcctcataacatcattgcttggttaagagttgtatctgcttgctgcaaaatcagaaaagtgcattccatcttctcgccttctgaggcagaagaacttcttgctattgccatttccctctttttggaccgtcgacttgaagggttgctgcttgttttgggagactgcctgaattcacttatattatacttcaatacgagtgagtgggaaactagctgtgtgatggtggctgaatcaattgctcagagggtcacactggacctcaattgtttaagggttgttgactgcatcactggtacaaataagcgcagcaaaatcctaaggagtcaggtggcacttcagctgctgaagatcagctttgggcttaaggtggcgaatgttgagaagattttgaagctagtcacatccatcaacgtgaaggagaaagaatgtgacttcttcaggctttatgtgtatctagtattgatggacaacttgctcttctcaagtgatgcatttagagataagactgggatggttgatgcttggcggaattatctgcgcaactgttccacccaaattgggtgcacggactggagattctatgctccaaaggcccgaaacaaggcttcttatcttctgcaaggttcaatcttgaaaaaaagcagtggcgatggtaaaagttgtgtccggtaatcaaaggggaccaaatgtctggtgcagcagtgcccaggttgtggttccattcgatgggcaacggcgaagtgctcatatcattccatgttttatgtacaattcttttttagttgttgtgttttagttcaaaaatgaactagcgagcgacaaatattcgagaacagagttagcagccagatttagaggggtgttgattgatgtatctgtgggggtgcttctgcttggttgattgacagaaacaaaaaggaaagagagcagcaagggatgattgggtgcagcctggagggggatgttttgtttatctcgtgttattaggttcttctccaactggctggttagctggctggccagattccgagcatcgttttcggacttgtctgctggtgtgcacatggtctggagtctggac

SEQ ID NO: 219550 - DNA, 894 bp, Zea Mays
atagatgcacaacaagaaccataattaaaatggttatcagctactccctccatttcaaattggctgacaaatgtgtactggcatcttctggctttcaaggtgatattaaggctctgcagaagaacctagctgccagagaattgctgtaccaacaccagcataataaaaggatgagctgccccgccatggcacagctcctctccaataccctgtactacaagcgattcttcccatattacgccttcaatgtgctcggtgggcttgacagcgaggggaaaggatgcgttttcacctatgatgcagtaggttcctatgagagaaccggttacagtgctcagggaacgggatctactttgatcatgccagtcctggacaatcaactaaaatcaccaagtcctctattactccctgtcagggatgctgtcacaccattgtcggagtcagaggccatcgatctagttaaggacgtgttcgcatctgcaactgagagagacatctacactggagacaagttggaaattgtagtcattaacaaggccggtactatgcgcgagtatatcgacctgagaaaggattaagccaacacttcagttgtgctgcagctgtcatttgctttgaactttttttcctagtctggtgatttatgtctaaagctgttgcttcataggaacacttgtgtttacttgcatatgtaatgtacggtatgtaccaggattcagtgagttttttttctgttgaaacaaattgcttggatactgaaacactgtatttattgcctgaattgtctattttagttttcgtatttggtaatttagggaccaaaatagaataaaatagagggactaaacattagtccctagaaaccaaacacctctattaaaattatttggtttc

SEQ ID NO: 219551 - DNA, 957 bp, Zea Mays
attataacccaatacttttcaaattatagtattgacactactgtgtggaggttgctaagctttctttgattattatgtactttatgagaaagatggttatcagctactccctccatttcaaattggctgacaaatgtgtactggcatcttctggctttcaaggtgatattaaggctctgcagaagaacctagctgccagagaattgctgtaccaacaccagcataataaaaggatgagctgccccgccatggcacagctcctctccaataccctgtactacaagcgattcttcccatattacgccttcaatgtgctcggtgggcttgacagcgaggggaaaggatgcgttttcacctatgatgcagtaggttcctatgagagaaccggttacagtgctcagggaacgggatctactttgatcatgccagtcctggacaatcaactaaaatcaccaagtcctctattactccctgtcagggatgctgtcacaccattgtcggagtcagaggccatcgatctagttaaggacgtgttcgcatctgcaactgagagagacatctacactggagacaagttggaaattgtagtcattaacaaggccggtactatgcgcgagtatatcgacctgagaaaggattaagccaacacttcagttgtgctgcagctgtcatttgctttgaactttttttcctagtctggtgatttatgtctaaagctgttgcttcataggaacacttgtgtttacttgcatatgtaatgtacggtatgtaccaggattcagtgagttttttttctgttgaaacaaattgcttggatactgaaacactgtatttattgcctgaattgtctattttagttttcgtatttggtaatttagggaccaaaatagaataaaatagagggactaaacattagtccctagaaaccaaacacctctattaaaattatttggtttc

SEQ ID NO: 219552 - DNA, 2928 bp, Zea Mays
caacgggtcgttcctattcaaaaatcgaactcctacgctccttcggtccttcccctccccatcttcccaaaccgccccacgcttcatcctcgcaagcctccccgaccccccagctcaacgagatccggcgagcgaattccctcttccccgaccaccagatcgcagcgatggagccggatcgggtcgccgcgggggcatcctcctcgccgcagccctcaccagcgccggccatgttcctgccggggcaaacgcgaggagtttggggatcaaggagaggactccattatcttgtcaccgcggctgcaggagatttgtactcctgaccgccccactgccctgcgcttcttaggtactggctctccaagaaagttggaatgtcttataatttggaacggagggagtacaagcaactattatacacatgctttgcttaagtcttcaaagtatttttattcgtataattatttgtggttggtctttgtttgtgtgtagggaagaaatataataacctcatggagagatacaagaagcaggtggtcaagtgttctgaggagtgtgaccctagatataacggcttgaagaagaagtacacagacgagtgtgcagagaggcggcgtctgtacaatgagcttattgagctaagaggtaacattagggtgttctgcagatgcagacctctgagctccaatgagctcgcccgtgggtgttcatcagtagttgagattgactcatcacaggagactgagctgcagtttgtccccaatgaaaaagaaaggaagccctttaagttcgaccatgtttttggcccagaggatgaccaagaggccgtgttttcagaaacagtgcccgttgttgggtcagtgatggatggtttcaacgtatgcatctttgcatatgggcaaacaggaaccgggaaaactttcacaatggaaggggttccagaaaataggggtgtaaattatagggctttggaagaattgttcagaatctcagagaaaagaagtgcatctgttgcatacacattttccgtaagcatcttggaagtttacaatgaaaagatcagggatcttcttgatgagagcaatgatcaatcaaaaaggttggatattaagcaaaatgctgatggaacacaagaagttcatggtttggttgaggctccaatttataacatagatggtgtgtgggagaaactgaagtttggcgctcaaaataggtctgttggctcaaccaatgctaatgaactcagcagccgctcccacagtttggttagggtcactgttaggagcgagcacttggtgacttatcagaggagcagaagccacatgtggttggttgaccttgctggaagtgagagaatagctaaaactggggtagaaggagataggctgaaagaatcacagttcatcaacaaatcactatctgccttgggtgatgttatatctgcccttgcctcaaaaaattcccatattccatacaggaattccaagctgactcatttgctccaaagctctttaggcggagattgcaagactctaatgttcgtgcagataagcccaagctcaatggattcaggagaaactctcagttcactcaattttgcgagtagagtccgagctgtagaacatggccctgctgctcgtaagcaagcggatccagctgggagtttgaagttaaagcagatgactgaaaaacttcagcatgaggaaaaggagaatgcacagctgaatcaaagcttgcagctgatgcaactgaagtatgcttctcgtgagaatgtcttcaggacactaaatgaaaaggtgaaggatgctgaacaagcatgcagaaattatcagcagcggattagagagctggaaaatgaattaggcaatgagaagagggcttctagggattctgctagatcctcaaggcccccacttgttcctacgagacagagacaacctcagggaaggactaacagcttcgcaccaccttcaggcccttctagatggaggctcaaagcccccgcaaaacacaacaaagagaacattcctgtggcgatgaataaaccaaatgctggggatgatcctaataagcctgtcggcagagcaaggcgtgtttcacttgctccggtgattcgacaaatccccatccagcccaagaggcgatcttcgatggcagtgctaccatccgtgagagagcatctttctgtgctaaacgacaagaaagcaggatctcgactgtcgcaagccaacatggcaagaggatcacttggggcatttggcttgaatttggttccaggaacacccctagcaggacatggtggacctgttgatgctacaccagatggagcaaagttcaggagatttgatttcggaagcagcagcaagttcacaagccctgccccaaatgtgggcatgtggaacaaaatggtcacgccgcagcagaagctgggaatggcaccggcaggagcgaagctgtgtttcagcatccagaaaagagttacgcctccacatgttcgggcgaaacctggattgggcatcttcgacccagctctgcgtgagaatatggtcgtggggagagccggcaatgcgctgcgggtgctcaaccccaagcgaaggcaatctgttatctaactcttgaagccaaaggtacagcagatgtttggacgttcaaacggagcgtgtggttcttagtgaaaccgtgaagatgttcttttcagcatctttaaatggattctgcttggttgttactagttgataggaaagctatgttaatactgttaatggaagttgttaattgtatttgttcgttactaagaatcgcttcaactgttgagcaattttaggacttgtttggtagagtcccgcttcacaattctctaatagagtgattctgattgattctctaccgaaagtgaatctatttgacgaaaatcatttggctgtgaag

SEQ ID NO: 219553 - DNA, 2057 bp, Zea Mays
ttttgaaccagacttgttgatgtcagacacatgtttgacgagattgattatattttagaaggaaaaaatgctgaaaggtttgctactctttattcacatgttgattttctggcaggttcaagtggggtcaattctgaagctagtacaagtatcaaggtcccaaaagtttactggaactatacatgtaaaaccatattgacactggaatggattgatggaattaagctaactgatgctgagcgcatcagcaaagccaatttgaacaggaaaagaatgatagatgagggtctctattgctcattgcgacaactgcttgaagaagggtttttccatgcagacccccatcctggtaatctagttgcaactgaaggtggatctctagcatattttgactttggtatgatgggagatattccgaggcactatcgtgtggggcttatacaaatgcttgtacattatgttaatcgggactccttaggcttggcgaatgacttccattcactaggatttgttcctgagggaacagatttacttgcagttgcagatgcgttgcggttttcctttggtgatgtcaggaggcaatcaaatgatttccagggcgtaatgaaccatttgtatgatgtgatgtatgaatttagtttctcccttccccctgattatgcgttggtgataagagctcttggttctctagaagggactgcaaaagcactggatcctgagtttaaagttattgagagtgcatatccttttgtaattgggagactccttgcagaccccagccctgatatgaggaaaatattgcgggagcttcttatatgtgacgatggatccatcagatggaatcgactggaaaggctggtacatgcttaattattgttccttatcttgttatctcattgttatcacgattttttaccaaaatcatatgatgaaattaccaaaatcagtcttttaaataacaagaacatgctagggagttttgtttgtcatgatatacactcctgatttctctgttcgtatgtgtggaaacagtttcatggacctatcctttctgtgaacatgattactaatttgtggtagccctcttgacacatagaaccactaagctatatctgaacagtcatcagaatcttcaagcgcatcaggagctgactccagtgagaacgccaatggaagtcctgagtggagatcatttgatatgcattctgtgattgcagctacagaagacctatttgatttcattttatcgaggaaaggatggcgggttcgggttttccttgtccaggacatcgttaatgcttcagacgtgttccttcaagaagcgacattcccatatgtatatgcgaaagtgggaaagataggggacctaaatccagagagaagtaagatgatcaggaggctggtgaatactgtgcaatcgttccgccaagctatcaatttggctccagatgcttggagcgccatgctaatccgcactttgttgaaacctgaatcacaaaaatttgttcttgatgtgtttttggccctggctaaccattccagttacaagattccagaaacattctggctatttatgtcaagatttctaaattacttggacaaacaagatatactttaggaacggttaatatatcaattcctttttttttgttatggcttgaatttatttattttagatcggtcgccactggccaatgttgacttaaaaagctgttgctgctgttctccggctggtgctgattccaaaattcatatttttttgtcctgtgataagtgcttttcttttatcatttacagatgatagcatttcctatctatgtagttttagaatgtgcttaatatttgggtaggtggattgcagccctggggaaactctattttattttttcaatattaaaagttgtcttgctttgcattgagatgactggccttttaccatttataacacacacgataaggggttttagtgattaatgacgacactattattgtgattaatacgttttgaaaaagtaacagagacaatttgatttaggtcgtagcaatggtgatttttt

SEQ ID NO: 219554 - DNA, 1799 bp, Zea Mays
ctaccttttgaaccagacttgttgatgtcagacacatgtttgacgagattgattatattttagaaggaaaaaatgctgaaaggtttgctactctttattcacatggttcaagtggggtcaattctgaagctagtacaagtatcaaggtcccaaaagtttactggaactatacatgtaaaaccatattgacactggaatggattgatggaattaagctaactgatgctgagcgcatcagcaaagccaatttgaacaggaaaagaatgatagatgagggtctctattgctcattgcgacaactgcttgaagaagggtttttccatgcagacccccatcctggtaatctagttgcaactgaaggtggatctctagcatattttgactttggtatgatgggagatattccgaggcactatcgtgtggggcttatacaaatgcttgtacattatgttaatcgggactccttaggcttggcgaatgacttccattcactaggatttgttcctgagggaacagatttacttgcagttgcagatgcgttgcggttttcctttggtgatgtcaggaggcaatcaaatgatttccagggcgtaatgaaccatttgtatgatgtgatgtatgaatttagtttctcccttccccctgattatgcgttggtgataagagctcttggttctctagaagggactgcaaaagcactggatcctgagtttaaagttattgagagtgcatatccttttgtaattgggagactccttgcagaccccagccctgatatgaggaaaatattgcgggagcttcttatatgtgacgatggatccatcagatggaatcgactggaaaggctgctatatctgaacagtcatcagaatcttcaagcgcatcaggagctgactccagtgagaacgccaatggaagtcctgagtggagatcatttgatatgcattctgtgattgcagctacagaagacctatttgatttcattttatcgaggaaaggatggcgggttcgggttttccttgtccaggacatcgttaatgcttcagacgtgttccttcaagaagcgacattcccatatgtatatgcgaaagtgggaaagataggggacctaaatccagagagaagtaagatgatcaggaggctggtgaatactgtgcaatcgttccgccaagctatcaatttggctccagatgcttggagcgccatgctaatccgcactttgttgaaacctgaatcacaaaaatttgttcttgatgtgtttttggccctggctaaccattccagttacaagattccagaaacattctggctatttatgtcaagatttctaaattacttggacaaacaagatatactttaggaacggttaatatatcaattcctttttttttgttatggcttgaatttatttattttagatcggtcgccactggccaatgttgacttaaaaagctgttgctgctgttctccggctggtgctgattccaaaattcatatttttttgtcctgtgataagtgcttttcttttatcatttacagatgatagcatttcctatctatgtagttttagaatgtgcttaatatttgggtaggtggattgcagccctggggaaactctattttattttttcaatattaaaagttgtcttgctttgcattgagatgactggccttttaccatttataacacacacgataaggggttttagtgattaatgacgacactattattgtgattaatacgttttgaaaaagtaacagagacaatttgatttaggtcgtagcaatggtgatttttt

SEQ ID NO: 219555 - DNA, 4275 bp, Zea Mays
gttggttgtgcattactgcattgcatccagtaaaaaaactacagctcaaccaaatttagccgagcggagacgcacaagccggcgtgggctgcattacacgagacgatcaacaagggcagcggcccagcagcaacgaaccaccgcacaagcgccaggccgccagctcgcactctggtccagccacgcggcgccgctgccaccttcctctcaccgtgtacgtcttcggcgtacacgtctctctctctctctctcctcccctaaaccctacgctgcccttctttccctccccgtctctccctcccgtgcgggcggcggagctgatgagatcccggccatggcgggccccacctcgcggctcctcatcctcgcccgccgcgccgaccgacgcagatgcctcccttttctcgttccccgcgccttgcaggccgcccccccgaccttttctccggcgttgccgctacctccctgcctccccgcctcaacgccggtgatgagctattcaagtgcatttacaagtgtacatggagagaggccttcatcagaatatgcaaagatcaggaaggagtcactggaaacccagtttggaagaatattgggttcaagttcacgcaggcattttgctgaccgtggctttggtccattccttgctctatacagggctgctactatctcctttcatgttgtaaaactcactatttggcatttgttgctcaatgatatgcataaaagagcagaaaagtttcgagagaccttgatacgcttgggtcctttttatatcaagcttggccaagcattgagcacacgccctgatatacttcctagtgcgtactgtcaggagcttgcaaagctacaggatcaaataccaccgtttccaactcgcattgcactcaggaccatagagtctcagttgggttctcgaatttctgatttgtttgctgatatcagcccagagccgattgcagcagcatcactggggcaggtttacaaagcatatatttcagacctgagttctccaagttgaaatgcattcctttgatacttcaagtaatgcagctcatctacgatctggagagcttgttgcagtcaaagttcaaaggcctggaatggcgcccttgctgactctagatgcacttttgttccacatgattggaggacaaatgaaacgatttgctaaggctcgcaaagacctattggtggccgttaatgagattgtcagacacatgtttgacgagattgattatattttagaaggaaaaaatgctgaaaggtttgctactctttattcacatggttcaagtggggtcaattctgaagctagtacaagtatcaaggtcccaaaagtttactggaactatacatgtaaaaccatattgacactggaatggattgatggaattaagctaactgatgctgagcgcatcagcaaagccaatttgaacaggaaaagaatgatagatgagggtctctattgctcattgcgacaactgcttgaagaagggtttttccatgcagacccccatcctggtaatctagttgcaactgaaggtggatctctagcatattttgactttggtatgatgggagatattccgaggcactatcgtgtggggcttatacaaatgatttacttgcagttgcagatgcgttgcggttttcctttggtgatgtcaggaggcaatcaaatgatttccagggcgtaatgaaccatttgtatgatgtgatgtatgaatttagtttctcccttccccctgattatgcgttggtgataagagctcttggttctctagaagggactgcaaaagcactggatcctgagtttaaagttattgagagtgcatatccttttgtaattgggagactccttgcagaccccagccctgatatgaggaaaatattgcgggagcttcttatatgtgacgatggatccatcagatggaatcgactggaaaggctggtacatgcttaattattgttccttatcttgttatctcattgttatcacgattttttaccaaaatcatatgatgaaattaccaaaatcagtcttttaaataacaagaacatgctagggagttttgtttgtcatgatatacactcctgatttctctgttcgtatgtgtggaaacagtttcatggacctatcctttctgtgaacatgattactaatttgtggtagccctcttgacacatagaaccactaaggtaagattgaagggagtatccagcctatagatgtggaattattaacaacttttactgttgaccatctatttttttgggatcctgtattttgtttgggctgtatgatctgagctagctcagtttgtgggaatactcacaccactcaggttcgagttgtatttggcttgaatatgatcaacctgcaggggggtaagacaactccgggcattgcattaagaagaacttctcacacagagaggattttcctaaccctagactgaatatcctttcttgtgggagtcaaactcaggtcctgcagaggctatcaagtcacataaccatctcagctagagtccctttcacttatctgtttcttcttacttacaacatgacatggttccttctacttcggtcgactttttaaatatatattctgtgcaagtactgcagtgttgctcaaagaaaaatttgggttggtccagttctggtagtggtacctatgatctaagagccacttcataaactacagctatttgttctcctgttaacaccaatcaacgagttttcacaaccctgatggtagtgctgattggtcccaccccttagacagacaagtatgcatcaaccatcctgggtgtcctcatcacatccaggttgtctggaaggacagatgtaatcatgttgccatttaaaagggtgctaaagctgtagttttgtgttactatggtgcaatagttgcagttccttgaaactggtcctaggagttgaagtttgagttaggcacacaaaattgtattctgtgaaataatatggtgttaggatcgtaattgcaattttttaatcgtagtttattgagttaggcacacaaaattgtattctgtaaaataatatgatgataggattgtaattgcaatttttaatgttttaagcttcaaatatgcaacagaggagaaatttcgataatctgaaaattttaatgcaacaaattgggttatctttgctggaaatgggtcatggtctctatcctgttgttggttctaattcttgtgttgggtttgggtagtaacttagtgtgatgagaaattttacagatatttgttttttatttgttcctactaacaacatttggtttttagattgcagctatatctgaacagtcatcagaatcttcaagcgcatcaggagctgactccagtgagaacgccaatggaagtcctgagtggagatcatttgatatgcattctgtgattgcagctacagaagacctatttgatttcattttatcgaggaaaggatggcgggttcgggttttccttgtccaggacatcgttaatgcttcagacgtgttccttcaagaagcgacattcccatatgtatatgcgaaagtgggaaagataggggacctaaatccagagagaagtaagatgatcaggaggctggtgaatactgtgcaatcgttccgccaagctatcaatttggctccagatgcttggagcgccatgctaatccgcactttgttgaaacctgaatcacaaaaatttgttcttgatgtgtttttggccctggctaaccattccagttacaagattccagaaacattctggctatttatgtcaagatttctaaattacttggacaaacaagatatactttaggaacggttaatatatcaattcctttttttttgttatggcttgaatttatttattttagatcggtcgccactggccaatgttgacttaaaaagctgttgctgctgttctccggctggtgctgattccaaaattcatatttttttgtcctgtgataagtgcttttcttttatcatttacagatgatagcatttcctatctatgtagttttagaatgtgcttaatatttgggtaggtggattgcagccctggggaaactctattttattttttcaatattaaaagttgtcttgctttgcattgagatgactggccttttaccatttataacacacacgataaggggttttagtgattaatgacgacactattattgtgattaatacgttttgaaaaagtaacagagacaatttgatttaggtcgtagcaatggtgatttttt

SEQ ID NO: 219556 - DNA, 3112 bp, Zea Mays
gagaccaccaaaggaaaaaaaggggactcgctctcgccaactcccctgctccacagccacaagcccactcggatcccaatccgagccctactcgtcgtcgacgacgcgacggccccgcgtgcgaagccagccagccagccagccagccatcgccgtggaccggggagcccggagggatggaccccgagaagcgcggctacgagctccaaaattttgtggcgcatgatgcggaagttaggtccctgtctattggcaaaaagtctaggcgtgtgttcatcaccggtggcaatgatcgcaaggtcaaactgtgggccattggcaagcaaactccacttctgaccttgtccggccacacaagtgcggtggaggctgtgcagtttgattcagcagaggtgcttgtgcttgctggctcgtcaaatggttccatcaagctctgggacttggaagaagctaaagttgtgcggtctctcactgggcacaggtcaagttgcactgctgttgaattccatccatttggcgagttttttgcatctggttcgtcagatacagacctgaagatatgggacataaagaaaaaaggatacatacacacatataagggtcacagaggagcaattaaaacaatcaggtttacgcctgatggacgatgggttgtcactggtggggaagataacattgtgaaggtgtgggatttgacagctggaaagcttctacatgatttcaagttccatagtggacaaatcaactgtattgattttcaccctcaagaatttttgcttgcaacaggctctgctgataggacagtgaaattttgggatcttgaaacttttgaattgataggttcttctggacctgagggtaccggtgtacgttctatggtctttcacccagatggtaaaacccttttctgtggattagaccaaagcttaaaggtattctcttgggaaccagtaaggtgccatgatgttgttgacatgggttggagtaatttggctgaccttagtatttatgaagggaaactcttgggatgctcctaccatgagtgccgtgttggtctatgggctgctgatatatcacgaatttttttgctgagcttgtgcagtctatggaagataatcctgtgaaaccagttgatagcactgcaaattctcgtcctgcttcagcaatggcacattcaagaagttcatacaaaatcaaggagtctgggattgctcaaagcagggttcgtggctcacatttgactccagcaagtacagataagaccaagaaagataggagcagcactattccacgaagacctgattcgtctttaaagtcatctgttcagagtactaccctgatgaggcgtatgaagcttgttgatagtccttccaccaacacaaaaaatgtggaacgtaatgttgggcagagagacatttcattagcgtctcgtgcagtgatggctaataattctgcaactgctaagaaaagcaatcttacagaatcagctttagtgaaagatatttacactacatctcaggctgtttcagcacctattgttgtgcccagagacattttagaggacaaaacagtaagcaatgttcgtcgagggactggagagacagctgcagtcccagatgattttcggatccctgttcacagaagaaaaccctcacttagtggcagtgctgctgatagtgatagctcatcaagatcagtgttcactgaacctgatgtttgctcagagggtttgtctagcttaaaattctcctttgggctaactccatatcacaagaaagaagaatttggcgatgtggataatgaaggtattgcacaaatagcagaaaagatggaaagaacagtgtcgctggaccattctcagcagttaaatgatgataaatcctttgaatcaccatgctcaacaacagagactgccaaggtcaaatatgttagaggagttgctgtgccactggggaaaacaaagtctcttgttgagagatgggaaaaaagagagacttctagcactgattattcaccacaaactggttcttgtggtgatcgggcatcgagaaatgacaaccatccattccatctggcggaaccaagtacaacatttgaaaaggacctgtcaactgtagatgaagcgatggctcctgtcaatttagtgcggaaccatgatgaattcctaaatgctgtaaaacttcggctgacaaaactagagatgatgcggcatgtctttgaacaaagtggtattaaaggagcaattgctgcagtggcaaagctacctgacaatgctgttcaagcagatgttgttagtgctctcaaaggaaagcttgatcttttcaacctggaatttttctcaaattttctgcctgttcttgctgggttactgtgtagcaagactgaaaggcatgctatggtctctttggaaatgttgttggatcttataaagatttttggaccagtaattcattcagcattatcagcaaatttaggcgttggagttgacattcaggctgagcagaggttgcaacgttgttcacggtgctttaaccatttgcaaaagatccaacagagtctgaatccattgattctgcggggtggtcaaacagcacaacttgcacaagaactaagtctttcattgcaagatttggtggtgatctaggcaagatgatgtacaatgtatacgacagagtagataccattggttttggcgaaaagtgcccacagttgtgtagcttgtaattttgtcatagctttgcaagtgggttttgcaactgtgttttaacattgggctggcattcagcctggtcccctgttgtaaatgtgagcctagccgtgaatgagtctgtaattagccagccacatctgctgtgtgagcagccctgaacaaaaagactagttgaaaggaaacaaccgcaaaggggatcattttggttacaccccaggtggtaggatggctcatgtagcatgcggtgattggcaattccattctttgaaagcatctgtgtttaacgtatattttgtagaagtaaattgagttatgccatagtaacgatgactgattgggctaatatgccttttgtttcttcaactgaccaagaatactaagagtcggctagttttaagtgtc

SEQ ID NO: 219557 - DNA, 4063 bp, Zea Mays
gagaccaccaaaggaaaaaaaggggactcgctctcgccaactcccctgctccacagccacaagcccactcggatcccaatccgagccctactcgtcgtcgacgacgcgacggccccgcgtgcgaagccagccagccagccagccagccatcgccgtggaccggggagcccggagggatggaccccgagaagcgcggctacgagctccaaaattttgtggcgcatgatgcggaagttaggtccctgtctattggcaaaaagtctaggcgtgtgttcatcaccggtggcaatgatcgcaaggtcaaactgtgggccattggcaagcaaactccacttctgaccttgtccggccacacaagtgcggtggaggctgtgcagtttgattcagcagaggtgcttgtgcttgctggctcgtcaaatggttccatcaagctctgggacttggaagaagctaaagttgtgcggtctctcactgggcacaggtcaagttgcactgctgttgaattccatccatttggcgagttttttgcatctggttcgtcagatacagacctgaagatatgggacataaagaaaaaaggatacatacacacatataagggtcacagaggagcaattaaaacaatcaggtttacgcctgatggacgatgggttgtcactggtggggaagataacattgtgaaggtgtgggatttgacagctggaaagcttctacatgatttcaagttccatagtggacaaatcaactgtattgattttcaccctcaagaatttttgcttgcaacaggctctgctgataggacagtgaaattttgggatcttgaaacttttgaattgataggttcttctggacctgagggtaccggtgtacgttctatggtctttcacccagatggtaaaacccttttctgtggattagaccaaagcttaaaggtaggtcgtattctgatcaatgatttcaagtcgcctggtcgcctggtcgatccctgggaccgaccaggcgactagtcgcgattaggcgactagtcgcgattaggcgacgactagggcgattagtcgactcctagtcgttccctggtcgtcctagtctagtagttatacttatatagctatatatataaatgtacatgtatgcaactacattatataaattagaaagtcactacttagcacaggcttaggattagggcagccagcaaccatccactaatttggcagaactgcagagaagggggagatggggcagagcatgaggaaccttgagatgacgagctcatctcctcaatggtgcaggtctgctggagcttgggaaggggcagggtggagactgcagctggtgaaccttaagacagtctccgcatgtggagactgtagcaggcgagcatgggaaggggcagggtggtgtagccgctgatgatgtagccgtcggtgagctgtaggtctgaaggggcagccaccggcgaccaagtgtgaataagggctggaacagtcgagctagcaagagaggagagtaggagacgtagtgcactgtttggcggctaggtattacagaggagaggagagggtagtctaaagtatactgtagatgggttgaaaatggcccaataacaaaaccctagccaggacgaccaggaaacagtaatcgggcgattagtcgccctaatcggcgattagtcggccgaccagcctatctagtcgagtcgtccagctaatcgagcccaaatagccgaccagcccgactaatcgcgacttaatcgcgattagtcggacgacttgaaatcattgattctgataggttcttgattgatatttatttgcttggtacttgagaacatgaatatttccaggtattctcttgggaaccagtaaggtgccatgatgttgttgacatgggttggagtaatttggctgaccttagtatttatgaagggaaactcttgggatgctcctaccatgagtgccgtgttggtctatgggctgctgatatatcactcattggaccctatgctcttggtgtattgcccaaagcgaatttttttgctgagcttgtgcagtctatggaagataatcctgtgaaaccagttgatagcactgcaaattctcgtcctgcttcagcaatggcacattcaagaagttcatacaaaatcaaggagtctgggattgctcaaagcagggttcgtggctcacatttgactccagcaagtacagataagaccaagaaagataggagcagcactattccacgaagacctgattcgtctttaaagtcatctgttcagagtactaccctgatgaggcgtatgaagcttgttgatagtccttccaccaacacaaaaaatgtggaacgtaatgttgggcagagagacatttcattagcgtctcgtgcagtgatggctaataattctgcaactgctaagaaaagcaatcttacagaatcagctttagtgaaagatatttacactacatctcaggctgtttcagcacctattgttgtgcccagagacattttagaggacaaaacagtaagcaatgttcgtcgagggactggagagacagctgcagtcccagatgattttcggatccctgttcacagaagaaaaccctcacttagtggcagtgctgctgatagtgatagctcatcaagatcagtgttcactgaacctgatgtttgctcagagggtttgtctagcttaaaattctcctttgggctaactccatatcacaagaaagaagaatttggcgatgtggataatgaaggtattgcacaaatagcagaaaagatggaaagaacagtgtcgctggaccattctcagcagttaaatgatgataaatcctttgaatcaccatgctcaacaacagagactgccaaggtcaaatatgttagaggagttgctgtgccactggggaaaacaaagtctcttgttgagagatgggaaaaaagagagacttctagcactgattattcaccacaaactggttcttgtggtgatcgggcatcgagaaatgacaaccatccattccatctggcggaaccaagtacaacatttgaaaaggacctgtcaactgtagatgaagcgatggctcctgtcaatttagtgcggaaccatgatgaattcctaaatgctgtaaaacttcggctgacaaaactagagatgatgcggcatgtctttgaacaaagtggtattaaaggagcaattgctgcagtggcaaagctacctgacaatgctgttcaagcagatgttgttagtgctctcaaaggaaagcttgatcttttcaacctggaatttttctcaaattttctgcctgttcttgctgggttactgtgtagcaagactgaaaggcatgctatggtctctttggaaatgttgttggatcttataaagatttttggaccagtaattcattcagcattatcagcaaatttaggcgttggagttgacattcaggctgagcagaggttgcaacgttgttcacggtgctttaaccatttgcaaaagatccaacagagtctgaatccattgattctgcggggtggtcaaacagcacaacttgcacaagaactaagtctttcattgcaagatttggtggtgatctaggcaagatgatgtacaatgtatacgacagagtagataccattggttttggcgaaaagtgcccacagttgtgtagcttgtaattttgtcatagctttgcaagtgggttttgcaactgtgttttaacattgggctggcattcagcctggtcccctgttgtaaatgtgagcctagccgtgaatgagtctgtaattagccagccacatctgctgtgtgagcagccctgaacaaaaagactagttgaaaggaaacaaccgcaaaggggatcattttggttacaccccaggtggtaggatggctcatgtagcatgcggtgattggcaattccattctttgaaagcatctgtgtttaacgtatattttgtagaagtaaattgagttatgccatagtaacgatgactgattgggctaatatgccttttgtttcttcaactgaccaagaatactaagagtcggctagttttaagtgtc

SEQ ID NO: 219558 - DNA, 3159 bp, Zea Mays
gagagaggagacgacaacatctccactcccccacccacccacgccgctccacccctctcgttttcactgcccagagaccaccaaaggaaaaaaaggggactcgctctcgccaactcccctgctccacagccacaagcccactcggatcccaatccgagccctactcgtcgtcgacgacgcgacggccccgcgtgcgaagccagccagccagccagccagccatcgccgtggaccggggagcccggagggatggaccccgagaagcgcggctacgagctccaaaattttgtggcgcatgatgcggaagttaggtccctgtctattggcaaaaagtctaggcgtgtgttcatcaccggtggcaatgatcgcaaggtcaaactgtgggccattggcaagcaaactccacttctgaccttgtccggccacacaagtgcggtggaggctgtgcagtttgattcagcagaggtgcttgtgcttgctggctcgtcaaatggttccatcaagctctgggacttggaagaagctaaagttgtgcggtctctcactgggcacaggtcaagttgcactgctgttgaattccatccatttggcgagttttttgcatctggttcgtcagatacagacctgaagatatgggacataaagaaaaaaggatacatacacacatataagggtcacagaggagcaattaaaacaatcaggtttacgcctgatggacgatgggttgtcactggtggggaagataacattgtgaaggtgtgggatttgacagctggaaagcttctacatgatttcaagttccatagtggacaaatcaactgtattgattttcaccctcaagaatttttgcttgcaacaggctctgctgataggacagtgaaattttgggatcttgaaacttttgaattgataggttcttctggacctgagggtaccggtgtacgttctatggtctttcacccagatggtaaaacccttttctgtggattagaccaaagcttaaaggtattctcttgggaaccagtaaggtgccatgatgttgttgacatgggttggagtaatttggctgaccttagtatttatgaagggaaactcttgggatgctcctaccatgagtgccgtgttggtctatgggctgctgatatatcatctatggaagataatcctgtgaaaccagttgatagcactgcaaattctcgtcctgcttcagcaatggcacattcaagaagttcatacaaaatcaaggagtctgggattgctcaaagcagggttcgtggctcacatttgactccagcaagtacagataagaccaagaaagataggagcagcactattccacgaagacctgattcgtctttaaagtcatctgttcagagtactaccctgatgaggcgtatgaagcttgttgatagtccttccaccaacacaaaaaatgtggaacgtaatgttgggcagagagacatttcattagcgtctcgtgcagtgatggctaataattctgcaactgctaagaaaagcaatcttacagaatcagctttagtgaaagatatttacactacatctcaggctgtttcagcacctattgttgtgcccagagacattttagaggacaaaacagtaagcaatgttcgtcgagggactggagagacagctgcagtcccagatgattttcggatccctgttcacagaagaaaaccctcacttagtggcagtgctgctgatagtgatagctcatcaagatcagtgttcactgaacctgatgtttgctcagagggtttgtctagcttaaaattctcctttgggctaactccatatcacaagaaagaagaatttggcgatgtggataatgaaggtattgcacaaatagcagaaaagatggaaagaacagtgtcgctggaccattctcagcagttaaatgatgataaatcctttgaatcaccatgctcaacaacagagactgccaaggtcaaatatgttagaggagttgctgtgccactggggaaaacaaagtctcttgttgagagatgggaaaaaagagagacttctagcactgattattcaccacaaactggttcttgtggtgatcgggcatcgagaaatgacaaccatccattccatctggcggaaccaagtacaacatttgaaaaggacctgtcaactgtagatgaagcgatggctcctgtcaatttagtgcggaaccatgatgaattcctaaatgctgtaaaacttcggctgacaaaactagagatgatgcggcatgtctttgaacaaagtggtattaaaggagcaattgctgcagtggcaaagctacctgacaatgctgttcaagcagatgttgttagtgctctcaaaggaaagcttgatcttttcaacctggaatttttctcaaattttctgcctgttcttgctgggttactgtgtagcaagactgaaaggcatgctatggtctctttggaaatgttgttggatcttataaagatttttggaccagtaattcattcagcattatcagcaaatttaggcgttggagttgacattcaggctgagcagaggttgcaacgttgttcacggtgctttaaccatttgcaaaagatccaacagagtctgaatccattgattctgcggggtggtcaaacagcacaacttgcacaagaactaagtctttcattgcaagatttggtggtgatctaggcaagatgatgtacaatgtatacgacagagtagataccattggttttggcgaaaagtgcccacagttgtgtagcttgtaattttgtcatagctttgcaagtgggttttgcaactgtgttttaacattgggctggcattcagcctggtcccctgttgtaaatgtgagcctagccgtgaatgagtctgtaattagccagccacatctgctgtgtgagcagccctgaacaaaaagactagttgaaaggaaacaaccgcaaaggggatcattttggttacaccccaggtggtaggatggctcatgtagcatgcggtgattggcaattccattctttgaaagcatctgtgtttaacgtatattttgtagaagtaaattgagttatgccatagtaacgatgactgattgggctaatatgccttttgtttcttcaactgaccaagaatactaagagtcggctagttttaagtgtc

SEQ ID NO: 219559 - DNA, 3149 bp, Zea Mays
gagagagaggagacgacaacatctccactcccccacccacccacgccgctccacccctctcgttttcactgcccagagaccaccaaaggaaaaaaaggggactcgctctcgccaactcccctgctccacagccacaagcccactcggatcccaatccgagccctactcgtcgtcgacgacgcgacggccccgcgtgcgaagccagccagccagccagccagccatcgccgtggaccggggagcccggagggatggaccccgagaagcgcggctacgagctccaaaattttgtggcgcatgatgcggaagttaggtccctgtctattggcaaaaagtctaggcgtgtgttcatcaccggtggcaatgatcgcaaggtcaaactgtgggccattggcaagcaaactccacttctgaccttgtccggccacacaagtgcggtggaggctgtgcagtttgattcagcagaggtgcttgtgcttgctggctcgtcaaatggttccatcaagctctgggacttggaagaagctaaagttgtgcggtctctcactgggcacaggtcaagttgcactgctgttgaattccatccatttggcgagttttttgcatctggttcgtcagatacagacctgaagatatgggacataaagaaaaaaggatacatacacacatataagggtcacagaggagcaattaaaacaatcaggtttacgcctgatggacgatgggttgtcactggtggggaagataacattgtgaaggtgtgggatttgacagctggaaagcttctacatgatttcaagttccatagtggacaaatcaactgtattgattttcaccctcaagaatttttgcttgcaacaggctctgctgataggacagtgaaattttgggatcttgaaacttttgaattgataggttcttctggacctgagggtaccggtgtacgttctatggtctttcacccagatggtaaaacccttttctgtggattagaccaaagcttaaaggtattctcttgggaaccagtaaggtgccatgatgttgttgacatgggttggagtaatttggctgaccttagtatttatgaagggaaactcttgggatgctcctaccatgagtgccgtgttggtctatgggctgctgatatatcactcattggaccctatgctcttggtgtattgcccaaagcgaatttttttgctgagcttgtgcagtctatggaagataatcctgtgaaaccagttgatagcactgcaaattctcgtcctgcttcagcaatggcacattcaagaagttcatacaaaatcaaggagtctgggattgctcaaagcagggttcgtggctcacatttgactccagcaagtacagataagaccaagaaagataggagcagcactattccacgaagacctgattcgtctttaaagtcatctgttcagagtactaccctgatgaggcgtatgaagcttgttgatagtccttccaccaacacaaaaaatgtggaacgtaatgttgggcagagagacatttcattagcgtctcgtgcagtgatggctaataattctgcaactgctaagaaaagcaatcttacagaatcagctttagtgaaagatatttacactacatctcaggctgtttcagcacctattgttgtgcccagagacattttagaggacaaaacagtaagcaatgttcgtcgagggactggagagacagctgcagtcccagatgattttcggatccctgttcacagaagaaaaccctcacttagtggcagtgctgctgatagtgatagctcatcaagatcagtgttcactgaacctgatgtttgctcagagggtttgtctagcttaaaattctcctttgggctaactccatatcacaagaaagaagaatttggcgatgtggataatgaagcctttgaatcaccatgctcaacaacagagactgccaaggtcaaatatgttagaggagttgctgtgccactggggaaaacaaagtctcttgttgagagatgggaaaaaagagagacttctagcactgattattcaccacaaactggttcttgtggtgatcgggcatcgagaaatgacaaccatccattccatctggcggaaccaagtacaacatttgaaaaggacctgtcaactgtagatgaagcgatggctcctgtcaatttagtgcggaaccatgatgaattcctaaatgctgtaaaacttcggctgacaaaactagagatgatgcggcatgtctttgaacaaagtggtattaaaggagcaattgctgcagtggcaaagctacctgacaatgctgttcaagcagatgttgttagtgctctcaaaggaaagcttgatcttttcaacctggaatttttctcaaattttctgcctgttcttgctgggttactgtgtagcaagactgaaaggcatgctatggtctctttggaaatgttgttggatcttataaagatttttggaccagtaattcattcagcattatcagcaaatttaggcgttggagttgacattcaggctgagcagaggttgcaacgttgttcacggtgctttaaccatttgcaaaagatccaacagagtctgaatccattgattctgcggggtggtcaaacagcacaacttgcacaagaactaagtctttcattgcaagatttggtggtgatctaggcaagatgatgtacaatgtatacgacagagtagataccattggttttggcgaaaagtgcccacagttgtgtagcttgtaattttgtcatagctttgcaagtgggttttgcaactgtgttttaacattgggctggcattcagcctggtcccctgttgtaaatgtgagcctagccgtgaatgagtctgtaattagccagccacatctgctgtgtgagcagccctgaacaaaaagactagttgaaaggaaacaaccgcaaaggggatcattttggttacaccccaggtggtaggatggctcatgtagcatgcggtgattggcaattccattctttgaaagcatctgtgtttaacgtatattttgtagaagtaaattgagttatgccatagtaacgatgactgattgggctaatatgccttttgtttcttcaactgaccaagaatactaagagtcggctagttttaagtgtc

SEQ ID NO: 219560 - DNA, 3222 bp, Zea Mays
gagagagaggagacgacaacatctccactcccccacccacccacgccgctccacccctctcgttttcactgcccagagaccaccaaaggaaaaaaaggggactcgctctcgccaactcccctgctccacagccacaagcccactcggatcccaatccgagccctactcgtcgtcgacgacgcgacggccccgcgtgcgaagccagccagccagccagccagccatcgccgtggaccggggagcccggagggatggaccccgagaagcgcggctacgagctccaaaattttgtggcgcatgatgcggaagttaggtccctgtctattggcaaaaagtctaggcgtgtgttcatcaccggtggcaatgatcgcaaggtcaaactgtgggccattggcaagcaaactccacttctgaccttgtccggccacacaagtgcggtggaggctgtgcagtttgattcagcagaggtgcttgtgcttgctggctcgtcaaatggttccatcaagctctgggacttggaagaagctaaagttgtgcggtctctcactgggcacaggtcaagttgcactgctgttgaattccatccatttggcgagttttttgcatctggttcgtcagatacagacctgaagatatgggacataaagaaaaaaggatacatacacacatataagggtcacagaggagcaattaaaacaatcaggtttacgcctgatggacgatgggttgtcactggtggggaagataacattgtgaaggtgtgggatttgacagctggaaagcttctacatgatttcaagttccatagtggacaaatcaactgtattgattttcaccctcaagaatttttgcttgcaacaggctctgctgataggacagtgaaattttgggatcttgaaacttttgaattgataggttcttctggacctgagggtaccggtgtacgttctatggtctttcacccagatggtaaaacccttttctgtggattagaccaaagcttaaaggtattctcttgggaaccagtaaggtgccatgatgttgttgacatgggttggagtaatttggctgaccttagtatttatgaagggaaactcttgggatgctcctaccatgagtgccgtgttggtctatgggctgctgatatatcactcattggaccctatgctcttggtgtattgcccaaagcgaatttttttgctgagcttgtgcagtctatggaagataatcctgtgaaaccagttgatagcactgcaaattctcgtcctgcttcagcaatggcacattcaagaagttcatacaaaatcaaggagtctgggattgctcaaagcagggttcgtggctcacatttgactccagcaagtacagataagaccaagaaagataggagcagcactattccacgaagacctgattcgtctttaaagtcatctgttcagagtactaccctgatgaggcgtatgaagcttgttgatagtccttccaccaacacaaaaaatgtggaacgtaatgttgggcagagagacatttcattagcgtctcgtgcagtgatggctaataattctgcaactgctaagaaaagcaatcttacagaatcagctttagtgaaagatatttacactacatctcaggctgtttcagcacctattgttgtgcccagagacattttagaggacaaaacagtaagcaatgttcgtcgagggactggagagacagctgcagtcccagatgattttcggatccctgttcacagaagaaaaccctcacttagtggcagtgctgctgatagtgatagctcatcaagatcagtgttcactgaacctgatgtttgctcagagggtttgtctagcttaaaattctcctttgggctaactccatatcacaagaaagaagaatttggcgatgtggataatgaaggtattgcacaaatagcagaaaagatggaaagaacagtgtcgctggaccattctcagcagttaaatgatgataaatcctttgaatcaccatgctcaacaacagagactgccaaggtcaaatatgttagaggagttgctgtgccactggggaaaacaaagtctcttgttgagagatgggaaaaaagagagacttctagcactgattattcaccacaaactggttcttgtggtgatcgggcatcgagaaatgacaaccatccattccatctggcggaaccaagtacaacatttgaaaaggacctgtcaactgtagatgaagcgatggctcctgtcaatttagtgcggaaccatgatgaattcctaaatgctgtaaaacttcggctgacaaaactagagatgatgcggcatgtctttgaacaaagtggtattaaaggagcaattgctgcagtggcaaagctacctgacaatgctgttcaagcagatgttgttagtgctctcaaaggaaagcttgatcttttcaacctggaatttttctcaaattttctgcctgttcttgctgggttactgtgtagcaagactgaaaggcatgctatggtctctttggaaatgttgttggatcttataaagatttttggaccagtaattcattcagcattatcagcaaatttaggcgttggagttgacattcaggctgagcaggttgcaacgttgttcacggtgctttaaccatttgcaaaagatccaacagagtctgaatccattgattctgcggggtggtcaaacagcacaacttgcacaagaactaagtctttcattgcaagatttggtggtgatctaggcaagatgatgtacaatgtatacgacagagtagataccattggttttggcgaaaagtgcccacagttgtgtagcttgtaattttgtcatagctttgcaagtgggttttgcaactgtgttttaacattgggctggcattcagcctggtcccctgttgtaaatgtgagcctagccgtgaatgagtctgtaattagccagccacatctgctgtgtgagcagccctgaacaaaaagactagttgaaaggaaacaaccgcaaaggggatcattttggttacaccccaggtggtaggatggctcatgtagcatgcggtgattggcaattccattctttgaaagcatctgtgtttaacgtatattttgtagaagtaaattgagttatgccatagtaacgatgactgattgggctaatatgccttttgtttcttcaactgaccaagaatactaagagtcggctagttttaagtgtc

SEQ ID NO: 219561 - DNA, 3529 bp, Zea Mays
gagagagagagagagagagagagaggagacgacaacatctccactcccccacccacccacgccgctccacccctctcgttttcactgcccagagaccaccaaaggaaaaaaaggggactcgctctcgccaactcccctgctccacagccacaagcccactcggatcccaatccgagccctactcgtcgtcgacgacgcgacggccccgcgtgcgaagccagccagccagccagccagccatcgccgtggaccggggagcccggagggatggaccccgagaagcgcggctacgagctccaaaattttgtggcgcatgatgcggaagttaggtccctgtctattggcaaaaagtctaggcgtgtgttcatcaccggtggcaatgatcgcaaggtcaaactgtgggccattggcaagcaaactccacttctgaccttgtccggccacacaagtgcggtggaggctgtgcagtttgattcagcagaggtgcttgtgcttgctggctcgtcaaatggttccatcaagctctgggacttggaagaagctaaagttgtgcggtctctcactgggcacaggtcaagttgcactgctgttgaattccatccatttggcgagttttttgcatctggttcgtcagatacagacctgaagatatgggacataaagaaaaaaggatacatacacacatataagggtcacagaggagcaattaaaacaatcaggtttacgcctgatggacgatgggttgtcactggtggggaagataacattgtgaaggtgtgggatttgacagctggaaagcttctacatgatttcaagttccatagtggacaaatcaactgtattgattttcaccctcaagaatttttgcttgcaacaggctctgctgataggacagtgaaattttgggatcttgaaacttttgaattgataggttcttctggacctgaggtattgcaagtttttttcttaaatcaagctggatctggttatgaaatcgataatttgaagaccacaaactatggcttctcaaattctttagcatgcatgttctataggcatggtaactacagtacattcttgctgtggccttgtattaatatctttgtctttcttataaatcgtaactgtaagaactttctcagaggaatttagctcgcatttccctacagctgattcagttttataagagttatggtctgacatctagcctgagcttcacgtatgtgttgttccctgttttttaaccgttgctctaaaagcacatgaggagaacatccatcttcctcttctgtgatagcttacatgactcctctctccagggtaccggtgtacgttctatggtctttcacccagatggtaaaacccttttctgtggattagaccaaagcttaaagggaaactcttgggatgctcctaccatgagtgccgtgttggtctatgggctgctgatatatcactcattggaccctatgctcttggtgtattgcccaaagcgaatttttttgctgagcttgtgcagtctatggaagataatcctgtgaaaccagttgatagcactgcaaattctcgtcctgcttcagcaatggcacattcaagaagttcatacaaaatcaaggagtctgggattgctcaaagcagggttcgtggctcacatttgactccagcaagtacagataagaccaagaaagataggagcagcactattccacgaagacctgattcgtctttaaagtcatctgttcagagtactaccctgatgaggcgtatgaagcttgttgatagtccttccaccaacacaaaaaatgtggaacgtaatgttgggcagagagacatttcattagcgtctcgtgcagtgatggctaataattctgcaactgctaagaaaagcaatcttacagaatcagctttagtgaaagatatttacactacatctcaggctgtttcagcacctattgttgtgcccagagacattttagaggacaaaacagtaagcaatgttcgtcgagggactggagagacagctgcagtcccagatgattttcggatccctgttcacagaagaaaaccctcacttagtggcagtgctgctgatagtgatagctcatcaagatcagtgttcactgaacctgatgtttgctcagagggtttgtctagcttaaaattctcctttgggctaactccatatcacaagaaagaagaatttggcgatgtggataatgaaggtattgcacaaatagcagaaaagatggaaagaacagtgtcgctggaccattctcagcagttaaatgatgataaatcctttgaatcaccatgctcaacaacagagactgccaaggtcaaatatgttagaggagttgctgtgccactggggaaaacaaagtctcttgttgagagatgggaaaaaagagagacttctagcactgattattcaccacaaactggttcttgtggtgatcgggcatcgagaaatgacaaccatccattccatctggcggaaccaagtacaacatttgaaaaggacctgtcaactgtagatgaagcgatggctcctgtcaatttagtgcggaaccatgatgaattcctaaatgctgtaaaacttcggctgacaaaactagagatgatgcggcatgtctttgaacaaagtggtattaaaggagcaattgctgcagtggcaaagctacctgacaatgctgttcaagcagatgttgttagtgctctcaaaggaaagcttgatcttttcaacctggaatttttctcaaattttctgcctgttcttgctgggttactgtgtagcaagactgaaaggcatgctatggtctctttggaaatgttgttggatcttataaagatttttggaccagtaattcattcagcattatcagcaaatttaggcgttggagttgacattcaggctgagcagaggttgcaacgttgttcacggtgctttaaccatttgcaaaagatccaacagagtctgaatccattgattctgcggggtggtcaaacagcacaacttgcacaagaactaagtctttcattgcaagatttggtggtgatctaggcaagatgatgtacaatgtatacgacagagtagataccattggttttggcgaaaagtgcccacagttgtgtagcttgtaattttgtcatagctttgcaagtgggttttgcaactgtgttttaacattgggctggcattcagcctggtcccctgttgtaaatgtgagcctagccgtgaatgagtctgtaattagccagccacatctgctgtgtgagcagccctgaacaaaaagactagttgaaaggaaacaaccgcaaaggggatcattttggttacaccccaggtggtaggatggctcatgtagcatgcggtgattggcaattccattctttgaaagcatctgtgtttaacgtatattttgtagaagtaaattgagttatgccatagtaacgatgactgattgggctaatatgccttttgtttcttcaactgaccaagaatactaagagtcggctagttttaagtgtc

SEQ ID NO: 219562 - DNA, 2494 bp, Zea Mays
gacagtgtagtgcctggcagttttcattacgacgacggcctccggccatttggtacaatcagtgccaaaaggtaggcctagattcttaataactaggttctcagaacgatgggtcgaggaacgagaatatggtatgcagtactgtactttaaaaagattctaacactacaagaatgagaatgttcatgtgctttcggaacagaatgatcgtttctaaaacgaggaacacgaagacgttccacgtttccagtttttaatcccaggtttgatggccctgcccctggcataggtgcacatgaaatggtgcgatgggcccctagccctgtgggctgtggctaggataaggaacaaggatctcctgccgaaaaattgcagtgctgatcaccgaccaccacgcccgccggggccgggaagtagatgaagtcatggatttaatctgatcagacactgatcgattgattagtcgcgctacttcaggatgctccccccaaaaccttgatgatcgatgtttacctcaacggatgacgacactgatacgacttgtttttggaggccccgctctatccataggaatcgagacaaggatctagttgtagtagaagaagtgaagggtttgtgcaagagaagacaaatggatgatacgattgaatgttgggatcagccacacgtaagtctaggtagacatctctgctcttcatttgtgcgctatatatttttaccattcgtgtcgactcgccttcgaaaaccaaaccctagaacccgggccgccgccgccgcaggtcctcactggcactgctcgccgcgcgttgtagtggagacgtctaacctcctcgcaagcttctcgtctccggtaaccatggaccgttgtccgtatttgatacatagcccactttcctcgtgccaagcagggtatcgacctagtcgccgccggccggaacgagaagaccgagcgcactgcatacctcaagctcctcctcaagctgtaccgcttcaacgccgtgatcctcaagcggtacttcattagcaagaccaaccgcctgtcacaacccagggacggtggaacgcaagccaccgtcgtgagctgttgccaggcggaagaacaacttccagatgcgtttcaacaggaaacgtgactgacgacaagagggtctacgaagtatctgcagtgaaggtggctgcgtgggcacggattctgagcgcgggtgacgagtgcctcgcctttgaccattgtccattgtccattgtcaggttgatggtcatctattgatgtacgctctattttttgtatctgaatgtgcagaattaatagttttatgaaaaaggcaaacatctttcgtatcaaaatgaactcttgagacattcacattttccttgttctctctcaatgatgagatcaaagcagacgggcggtcagaacctgatgttgtgttgagtgtctgcatttttatgcaatccacttatgggatgcatcagagagtgagaacaaggcatttcacttgcatccatatttgcctattaatatggtgtttatcttgcatgggtaacattgtagtttgcttgagcaaacaatcactcgtcatgttgtgcatatatccttgtaagtgctgtctctttctcatgatcgttgatttgcttacttttgagcatgcacctgcattgattattttcttcttggagatttctgaaggccaaggaggtataactggtgcatagatttatatggttgtcttaccagcccattgcattactacatggttgctttggtgccaaatggtctaaccgaaactttttttgtcatctttctatttgtttgctttcttttgatggttgattttatcatgttatcatatcagtttttttttttgctgatgtgataatttaatacattcttcaagcattgtttactgtactctttctttctttctttcttttgtttcactgctatgtgataatagaatggcagatgatggataatcttatcctacacactgaatctaatgtgttgaccaatactccgcttattgtctgatgccatcaattaacaagatctctgttcattgcttcttgggcatttgaaggaactttgtggactaaaagggagcaaattgagggaaaccgtgaaggactttggctctgcgtttggtgtgccacataaccacacgggcgcaagggaaggaagcttgagaaggcaagggggaggaggaaaacctctgcttccacctcggaagagaagcaacgaaacaacgaagagatgaaagagaatagcatcaaagaggggtgactgggctgtggcaccgaggtaacacggctcggcgtcatagatcttggcgttgaggtgcgtccttcgctggcaacaacagactgacgtggcgtcgacgtggccgagctcaagtcatgattcatggcactgagctagctagcaaggccctttttgaagcaccatgatcattcagccggggacgccgcagatgctcacttgtaacctacacatggc

SEQ ID NO: 219563 - DNA, 940 bp, Zea Mays
cagaaaatgcagctaccgtgctgaattatttcagttgctttttcccattgccgatagtcatttcctcattaagatggggactagaagccagcaggaaaaccgtggtaagtccaattaaatcgcttcgcttttttgttttgttttgccaaacttatacagctgttccttgaaatgcctcaccaggtggctactgttttactgctattcacattatctggccctgtaaaagcgtcaacttatctgctaatgcatggagtagttggtctcatcatgggtactgtttggagattggagaccaactggattgtctccatcatcctctgctccattataacggttaacattcatgcttcgttgacatacatcctgacggcagctggcgtgaacacaattccttccatgggcacaatatatctactctttgggacactgcttctacttaattgtgggttcttcgtcttcctcctgcatgtgatgtatacggtattcctggcgaagcttgggataaagccgtcgctgaggtcaccaagatggctggacagagtgatgtgaaaattttaggagtagggcatcgtacgtagtgactgttcttcctgttctgctgttttagccttgctgtttgtcgcccctacctatactgggacctgtaaccatggggtgcatctgtgcatgcaaacgcgacaagcaaaattcgggattatcaatcaatcatctgtgctactcgtgctctgttgatgatcttcttgttaaggcaaatgcgagaggaagttctggagtgccaataatctacggtgagcctgaaactaatactggcaccgttccatgaaaaaaataaaaaaatgaaaccaggaaggataaaaaacaatactagcaaatacggaacgagagaaactgcaacaaaaaaaaagtgaatcaaggaaagagagcgagtgatagagag

SEQ ID NO: 219564 - DNA, 2137 bp, Zea Mays
gcggagcacggggactcggggagagagataataccgtggacaaaattgggcacgtcttcttctccgcgaacctcgcgtcctcctcgcctgcctgcctacaagtctcccccctcccctccccgtgcctccctcgggcctcgcttctcgcgctcttcctctcttgcctccgcctgcctccaggctccaacaacccgggagggcgccgtccgcccccgcctccgggagcgatgatgatcgcgcgacgcctgctccgatccaataatgcccccgcccaggcaaccagcttattgaagcatgtaactggcaccgcaagtttgcaaggcaatgcggatagcttgttggatggtacagtcagacattttggctcagcaccgtctgcccagcctgaagaaaatgggtgattcttccaggttcaagggccacggcatgctggcgccttttacagctggctggcagagcaatgatttgcaccctctgatcattgagagatctgagggttcctatgtctatgacattaatgggaacaagtatctggactctcttgcaggattatggtgcacagctttaggtggtagcgagcctcgcttagtcaaagcagcaactgagcaattaaacaaactacccttctaccattccttctggaaccgtacaacaaaaccttcgttggatcttgcacaggagatccttagcatgttcactgcaagggaaatggggaaagttttcttcacaaacagtggttcagaagcaaatgactctcaggtcaaactagtatggtattataacaatgcattggggaggccaaacaagaagaaatttattgcgcgatcaaaagcataccatggatctacattgatttcagcgagcctaactggtcttcctgccctacaccagaagtttgatctaccagcaccttttgttctgcacactgactgccctcactactggcgatatcatcttcctggcgagacagaagaagattttgcgactagacttgccaccaatttagagaacctcattctcaaagaaggaccagaaacaattgctgctttcattgctgaacctgtgatgggtgctggtggtgtcatccctcctccaaagacctattttgacaaggttcaagcaatcgtgaagaagtatgacattcttttcatagcagatgaggttatcactgcatttggaaggctgggaactatgtttggatgcgattactataacatcaagccagatctagtttcactggccaaggctctttcaaacgcctacgtacccatcggggcaactcttgttagcccagagatatcagatgtgatccattcccagagcaataagcttggttcatttgctcatggattcacgtactccggccatccggttgcctgtgctgtggccattgaagctctgaaactttatcgcgaaagggacattcccggccatgtcaagcaaatcgccccaaagttccaggacgggattagggcgctggcagacagtccgattatcggggagatacgtggcttggggatgattatggggaccgaattcacaaacaacaagtcaccgactgatctgttccctgccgaatggggggtcggtgccatcttcggcgaagagtgccagaagcgcggcatgctggtgagggtcgctggcgacgccatcatgatgtcgccgacgctgatcatgacgcccggcgaagtcgacgagttggtgcgcatctacggggaagccctcaaggccacggaggagagggtggcagccctgcagtccaagaagaactagccaaaagggcggcgacgacgataacgataaacgccgggcgacgacggaccatatttgatgtacaggtgaataaacagccaagttcgtggctgcgagatggcaatagcgcgccggtctatgttcttgctctgtcgccaagcaaatggtggctcaactttttaaacatgtcatagatgtttttttcttcccttcctttcccttaaggaatggcaatacatctcaaatgtttgctgccctgtagttcctgaagataatgggtttcgtgtatatcgtgagtattagtagtgttcggatacatagctttgtaaaggcaaagcaataataaagtgaaggaactgcagtttcgagtctgcaagcatatata

SEQ ID NO: 219565 - DNA, 2322 bp, Zea Mays
ccagacacgaaaatacacagcatagcagtcgtcgtatagatatacagtgaacaagtgatcgttggtccatggcagcctcgccgctgccgagatgggcgccgacaccaagcccgaccagaccactcagggtgtcgagcgccggcggccaaacagccgtgtcttcgtcatcatggagctgggcattctgccgctcgttcatcggctccgccgtcgtctacccgccgtggaggcgctctacaccaccgccaccgccaccgccagcgccagcgggtgatccggcggcggccaatgctgctgcggacgatggtcgtcgtcacggccggttttgctctcatccgttggactgtgttggagccagagactgcagccttccagaggacgccggcggcggccgtgaggtgttcctgacatgggaggatctttcggtgacagcgtcgtcgtcgactggcgggaaggcgaaacccgcggtaattctcgacaagatcagcgggtacgcgcgccctggtgaggtgctggccgtcatggggccttcggggtgtggcaagacaaccctacttgatgccctagctggacgacttggttctgacaagagaaggacggcgggtaacatcttgatcaatgggcgacgagagaaacttgcctttggaacatctgcctacgtgacccaagagacgctgctgatggcgacgctgacggtgacggaggccgtccactactcggcgcagctgcagctgccggactcggtgccgccggccgacaagcgggagcgcgccgaccgcgccatcaagcagatggggctcgccgcggtggccgggcaccggatcggcggccgcgtgtgcaaggggatcagcggcgggcagcgccggcgcgtgagcatctgcgtcgagctgctggcgtcgccggcgctggtgttcctcgacgagcccaccagcgggctcgacagcgccgcgtcgttccacgtcatgagccgcatcgccgggctcgcgcgggccgagagggtcacggtcgtcgccaccatgcaccagcccagcagcgaggtgttccagctcttccatggcctctgcctcatggcgtacgggaggatggtgtattttgggccagcgtcggatgccatccagttctttgattcgaatggttacccatgtcctatgagaaggaacccttcagaccacttcttgatgatgataaacaaagatttcgagagaagtttggcaataagaaacgaagcattatttatgatgaaacagcagggcgcagctttcacaaagaaaaggcaagctactttcttgaccaaatgtgtggtgttaaccaagagatcagtaatcaacatgcatcgagacatgggctactactggttgcggttcggtatttatatagccatctgtgtgagcattggcaccatcttcttcaacgttggctatggttttgcatcgatccaagcaagagcgtctatgttaatgtttacatcaaccctattgacaatgatgtcaatcgggggattcccctcgtttgtcgaggacatgaaggtgttcagaaaagagcagctgaatgggcattacggtgctactgcatttgtcatcgctaacacggtctcatcaacactgtacctggggatcatctccataataccgggcgcagtatgctactacttgaccgggctccagaggcgcttggaccacttcctctacttcgcggcggtgctatgggcttgcacgatgctggtcgaagggctgatgatgatcgtcgctgcccttgtgcctgatttcctgctgggcataattactggctcagggatacagggcctgctaatgctcaacgctggtttcttcaggcttccacacgacctccccaaacccttgtggaagtacccgacgtactacatctcctaccacaagtacgctacgcaggggctctacaagaacgagttcctaggtttagtgttcgatgatggtgtgttaggaaaggggctcactgttagtggtgactatatactgaggaccagcttgcaggtcgagatgggctactcgaagtgggtggaccttgcaatattgcttgccatggtcttcatctatcgggtccttttcttagtcactattaaagtaggtgaggcggtcaaacccatgattaaatgcatgtcgattaaagtttaagaagggttttatatgttttcttttcttttcttttcttttcttttctttactttagccagagatagatatgatatgatgccgccgtcagttggctgcacatcatcaatgcattgtaacagtataagcttgttcaacctccaacaaataatggaccttgacaaattgttgggag

SEQ ID NO: 219566 - DNA, 2413 bp, Zea Mays
cgttggtccatggcagcctcgccgctgccgagatgggcgccgacaccaagcccgaccagaccactcagggtgtcgagcgccggcggccaaacagccgtgtcttcgtcatcatggagctgggcattctgccgctcgttcatcggctccgccgtcgtctacccgccgtggaggcgctctacaccaccgccaccgccaccgccagcgccagcgggtgatccggcggcggccaatgctgctgcggacgatggtcgtcgtcacggccggttttgctctcatccgttggactgtgttggagccagagactgcagccttccagaggacgccggcggcggccgtgaggtgttcctgacatgggaggatctttcggtgacagcgtcgtcgtcgactggcgggaaggcgaaacccgcggtaattctcgacaagatcagcgggtacgcgcgccctggtgaggtgctggccgtcatggggccttcggggtgtggcaagacaaccctacttgatgccctagctggacgacttggttctgacaagagaaggacggcgggtaacatcttgatcaatgggcgacgagagaaacttgcctttggaacatctaataatgttacaagcagcggtggatggtgcaccatgcatacctgtcttctcattgcattgaaggcctacgtgacccaagagacgctgctgatggcgacgctgacggtgacggaggccgtccactactcggcgcagctgcagctgccggactcggtgccgccggccgacaagcgggagcgcgccgaccgcgccatcaagcagatggggctcgccgcggtggccgggcaccggatcggcggccgcgtgtgcaaggggatcagcggcgggcagcgccggcgcgtgagcatctgcgtcgagctgctggcgtcgccggcgctggtgttcctcgacgagcccaccagcgggctcgacagcgccgcgtcgttccacgtcatgagccgcatcgccgggctcgcgcgggccgagagggtcacggtcgtcgccaccatgcaccagcccagcagcgaggtgttccagctcttccatggcctctgcctcatggcgtacgggaggatggtgtattttgggccagcgtcggatgccatccagttctttgattcgaatggttacccatgtcctatgagaaggaacccttcagaccacttcttgatgatgataaacaaagatttcgaggaacttgaggaagaagggtccaccgcccttctgttaccaagtgcgactgaagtcatagaaactttggtagattctttaatgtctcagagaagtttggcaataagaaacgaagcattatttatgatgaaacagcagggcgcagctttcacaaagaaaaggcaagctactttcttgaccaaatgtgtggtgttaaccaagagatcagtaatcaacatgcatcgagacatgggctactactggttgcggttcggtatttatatagccatctgtgtgagcattggcaccatcttcttcaacgttggctatggttttgcatcgatccaagcaagagcgtctatgttaatgtttacatcaaccctattgacaatgatgtcaatcgggggattcccctcgtttgtcgaggacatgaaggtgttcagaaaagagcagctgaatgggcattacggtgctactgcatttgtcatcgctaacacggtctcatcaacactgtacctggggatcatctccataataccgggcgcagtatgctactacttgaccgggctccagaggcgcttggaccacttcctctacttcgcggcggtgctatgggcttgcacgatgctggtcgaagggctgatgatgatcgtcgctgcccttgtgcctgatttcctgctgggcataattactggctcagggatacagggcctgctaatgctcaacgctggtttcttcaggcttccacacgacctccccaaacccttgtggaagtacccgacgtactacatctcctaccacaagtacgctacgcaggggctctacaagaacgagttcctaggtttagtgttcgatgatggtgtgttaggaaaggggctcactgttagtggtgactatatactgaggaccagcttgcaggtcgagatgggctactcgaagtgggtggaccttgcaatattgcttgccatggtcttcatctatcgggtccttttcttagtcactattaaagtaggtgaggcggtcaaacccatgattaaatgcatgtcgattaaagtttaagaagggttttatatgttttcttttcttttcttttcttttcttttctttactttagccagagatagatatgatatgatgccgccgtcagttggctgcacatcatcaatgcattgtaacagtataagcttgttcaacctccaacaaataatggaccttgacaaattgttgggag

SEQ ID NO: 219567 - DNA, 885 bp, Zea Mays
atcgcagctccccttcgatgtcgcacgcccgcgcctccccgctgtggcgctgtcccctccctggcacccaccctcacaaagcatcagcctctccaatcagacgcgagccacccaccgcgcgacctcagggtgcctgtgcctgctcccgctgttccttcctcatggccaccgcctgccacctcgccgcgccgctcggcctcgccccgttgccccgcggctgcgcctctgctggcgtcgtggccgtcgtccggtgcggctccaagatcccgagaggcgttgctgtcagggcgacgtccggcggcgagggcgccacggaggaggtgccggagattgtgaaggctgcgcaggacgcgtgggacaaagttgaggacaagtacgccgtggccaccatcggtgtcgctgccatcgtcgcgctctggacggtagtaggtgccatcaaggccatcgacaagcttcctcttctgcctggtgtccttgagattgttggaattgggtatacagggtggttcacataccgtaacctcgtcttccagccagacagggaggctctgatcggcaaaatcaagagcacttacaaagaaatcaccgggagcagcaactgatcgaacatcatttacaagatgggttcttaagcatatggtagaattgcatccgtaagcactgaagctgccatgcaagtgaaagtgcttctggtcccgacctcagtcagagaaaaaaaactctgcagttgagcaagccgttttactttgtttcagtgtaatatttatgacgtattcccagttctttttccggactactgtttactacgaaaatcccgatctgtgtaaaaatgtgctgcaacaaattcaaaagaaaacacaaatagtacaacctcatgatgttcgt

SEQ ID NO: 219568 - DNA, 773 bp, Zea Mays
cgacgaaacgccggaaaacgctacagccggaccgtccggacgagatgcagagggtggaagcagccggcggcagagtcgtcaactggaacggctaccgcgtgctgggagtcctggcaacctccaggtccatcggcgactactacctgaagccgtacgtgagcgcggagccggaggtgacggtggtggagcggacggagcgggacgagttcctcatcctggccagcgacgggctgtgggacgtggtctccaacgaggcggcgtgcaagatcgccaggagctgcctgagcgggcgcgcggcctccaggttccccgggtccgtggccggccgcaccgccgcggacgccgccgcgctgctcgcggagctggccttgtcccgcggcagcagggacaacatcagcgtcgtcgtggtcgagctgcggcggctccagacggaccagatgacgagggtttagtttgctgagactgagttgagttgagttgagagcgtaccgagtagtagatgatgatgacattgttaagtatttgagcagcgtgtgctgagaagctgtggggggattaagagagtctccctcccgccttcagcacttggttcatggttcgaattgaacgggcacggtgatgcgttgttgtacatagggagcgtttgtcggatgtttgcttctgtcggtgtactaattaattagtagtagcattatgcaattttatattgccttggacagtgtttgtgctaaatcttcctttccaccgatgtgttagtacgaacacgatggtag

SEQ ID NO: 219569 - DNA, 1292 bp, Zea Mays
cacacccgtgtcttccaccaagaggaagccgccgccgatgccgcctccgcctgcatacccgctcccgcccgcgcccgccgcgcttgccggtgcccccgccccggccaaggtttgtgtcgctactcgctagactagaattccgcgcgcggacctttgccggccgagccgttctgcggcatctcgacggggacaaccatgcgaatttccttggcgtccacgttgacgccacctgagccaccaccggtgaaggccggctggccgctgacctccgagacaggggaggcgcccgagctccacaacggccgcgggcctcgacgactgggctaaggccgagcgctcgtcgaagttggactgccgctgcgtcagccccctcgaccgctgcgacaccgacaaccagcgcaccgtgacgtggagcctatcgtcctccgccacctcggcctccatctcggcgcgcccgccctacagcgacaacacgtccgggtccacatgcagcgacgcgatggctgccgtggtgtcagggaactggtccacgatgagcgtccgcgcggcgcagaacttgaagaggaacagcagcagtgtgtaccatatgatgcactggagggcaggcttgagcacgcggccagcctcgcgaggacgaccagcttctgcagcgtgtccgctgccaggaaccggagattcatggcgtacaggtcgttggtggagatgaagtggaaggatttgaatcaaggttcatttattttcaggcgtggaaagtattgcagatagatgtctctattttcacgtcatcattagttgatgttcagccttaaagattgattactctcaagttattgatacaacatacatatttaagtatgcaaatttaccgactactgcatcaccttccttgaacagtctgtgcaaggctgttttggagtatttagttcgagaagaaggagaaccacataattgcttaaaggatgcagaagctgcaatgaatctagttcttgcaaagcttaagaatgagtttaatgaccccattgaaattgctgcaagtattgtaagcgccaaaaaaagatgttcttaaatcttaccattagtatagatgatgccaccttacttctttgtggtaccttcctaggtaactgaatctgattttgtgaagttgctcgctcatagaattctagtgtcttattatgactatggatgagacttttgtgatgtaattgatgagactatggatttaaatattattatgtgattgtgtgtaagatgttttatatgaaaatatattgtgctatataactgttgat

SEQ ID NO: 219570 - DNA, 690 bp, Zea Mays
ggtggtattgttttctgatgaaatgaatattattaccccataagtggacacaggccagttgaaccaatacgaacccgatcaactacatcgatgcatcaccaacccaagcatcccaatccaaacaacttgtaatttgaaactagagattgcgaactgtacttaaatcaaatacttcactattggtctctagagaggaagctctgccaaccattactaataactgagaagcccaaccaatgtgcctctaagcatattcccaacaggttgaagaagggtcacgagcaaagagggcatttactatccttttcaatcttcaccgttggaagacgctcctttctattggtctactacagcacgaatgtgctactgacaataacccattctaaaaagaacttgagctatgcgcttgcttttggacttagcagacccggttgctccactgttattttggggagattttcaattatactaaatgatgatgcaagtgcctcctactcaaactggtgttctgaaggcttcagaatgactgatggctgtttgaaaaggttcttcgtcaaacactcactgcatctgaatcacattaatgagaaaattggagcatttgttcgatcctcattggaactcaagctcgggggcatcatttcttctagcttctggaagccaaacaagcacaaggtgcagagactgtaa

SEQ ID NO: 219571 - DNA, 2034 bp, Zea Mays
gctaggatgggcagcggacaggtggttctcgtcggccgggtgacgccgggaagctcgatccagaaggagctggtgaaggaggccaagctctgcgccgccatggtcgtggtgcttggcgccaataagaagtactccttcggagggtcgtcctgcctggccaagtactgcgccaagaagctgccgccgacaaccaccgtcgtcgccatccaggacggcaaggccgtcttcgtccgggaggcgcccaggccgccacttggagcagagccaaagccggtgctccgcacggtgctgcacccgagcgtggggctggagcccaaggtgatcatcccgaacccgaaccggcgcgcgcggtccatgtccatggacttggacgccccatgctgcggtcacggcgccgcggacgcgccggcaagcaggtgcttggacgacgccaccaaaggcgacggcggcgtggcacccgagcagaggctcgggtggccgctgctccgccgcgcgcacgccgccgccgccgcctcagctgcccctgtacagacgcccggcggcaagaatcatgagccgcggaagcagtcggtggtgcactgggtgatgagcctgccccggcggtccgcgccgtcggagtccgccgagccgcatgccggggcggggctcgagtcggagctcaaggcaatgcttggcggcagtggcgcgcggtgccggtggttccgctacgaggagctctacgactccaccaaccacttctccgcagagaacctgatcgggaacggagggaacagcagggtgtacaggggcagcctcgcctgcggccggcaggtggcgatcaagttgtgcaaggcgtcggcggaggcgtccaaggacttcctccgggaggtggacatcatcaccaagctgcagcaccaccggatcgtccccttgatcggcgtctgcgtggaaggccgcaacctcatctccgtttaccgctacctccccaggggcagcctcgaggacaatctacacggggaaaggtcaaagccggcgctgtcgtgggagaaccggtacaaggctgcgctggggatcgcggaggctctgagctacctgcactccggcagcccgcggccggtgatccacagggacgtcaagtcgtccaacatcctcctcgcagaagagttcgagcctcagctatccgatttcgggctggccatctgggcgccgacgaatccgacgtccgtgacgcacagcgacgtcgtcggcacattcgggtacctggcgccggagtacttcatgtacgggaaggtgaccgacagggtggacgtgtacgcgttgggcgtcgtcctgctggagctcctgtccggccggaagtccatcagcagcgacgggtcgtcacccaagggccaggagagtctcgtcatgtgggcaactccggtgcttagcagcggcaacatctgtgacctgctggacccgaggctggacgtgaagcacgacgaggtggaggtcaggcggatggcctctgccgcgtcgctctgcctccggaggtcggctcgactcaggccgccgatatcgcagatactgagcatactacgaggagaaagcgcggcgagcatcgccgaccagggcgcgacggagccggactgcgtggacgacgaggcgtaccccgccgcgaacgtgaggtcgcacctgggcctcgcgcttctcgacgtggaggactcggagtccatctccagcacggagcacagcagcggcctcagcccgttggaggagtacctgcgagaacgttggagccgatcgtccagcttcgactgatgattcatgcccgcgctgcgattttgtttgtgggcatgtgttttagtttttttttccctctccgccggtaattcacatgtttatcgtatggtttggttaccggggccgtgtgtacagtggacagtcaaaaatcaccagagcgagccacatcttcggcgacaaagacgcgattggttgagcttgacctgcctcgcacctgccggccaggcaagttgcgtacaagtgacaagtcgcatgtgttttgtggttctctgccca

SEQ ID NO: 219572 - DNA, 3218 bp, Zea Mays
aacctccaccaaggaattctttgcccaatgcgctcatcgtccccgtcacacctctgcccacgcaccatcgccgatcctattgcccactacaatttccccatttctctcacgtaagtaggccacaccatcgcgtcatctctgctccgcctccttcccgccggcttcccgccgtcctttcgctgccgctgccattaccgccactgccgcaccggctggccgcgctaaaacagcagccgcgcccgcgctacgctgaccggcgacggcggccggcaagactgcccgttcgtccggtcccttcactccaccttcgcgcaacggcacaaggcggcaagggaccggacggggccggcctcgtgctttttgtgcgtggttggagtggttgagcgagccgatggcgacgatcccgggcggcgtggcgccatgacggcagccatttcaatacgcgccccccagcagctgaaacctgacaagctaaccagattttaggtggttacccgtgccgtgtcgcctgcctcgcacacccctcgcccttcgcctcttttccaccctggacccaggatatagttcccgctctcgtcgcttgcgcttgtatcttcctcgtctcaggcctccccgccgcgcctttcggttcgggttcagcgaattcagccacgaagcgagcgggcggccggagggttcctggtaacggaactcgctcgctttccagtttccaggtcaggccaggcgacgaccgccgcctcggcagttttctattccagcgtcgcggttccgggtcagaaattggttgcaggctcgcagccagccagtagcccggcgagatcgtcttgtgacagcggcaagtccacggcggttagcaggttgagcgaaccagtggcctggctacttaccagcttgccgtgccatgtgcaactgcggttcttcctgctgatctcgggagctgcaagcccggctctcggccaccgttcgtgggcgtcatggcggcggaccacggggagggcgtcgggcggtgcatactggtggggctgcacatggacgccgtcggcagggacctgctccagtgggcgctccaccaggaggtcaggcggggcgaccgcatcgtcgccgtgcacatttaccgcaagtccgacaagacgaacacactgaagctgatcaggacgctggacgactacctggcggaatacgaggctctctgcaaccagaaacaggtggttctcgtcggccgggtgacgccgggaagctcgatccagaaggagctggtgaaggaggccaagctctgcgccgccatggtcgtggtgcttggcgccaataagaagtactccttcggagggtcgtcctgcctggccaagtactgcgccaagaagctgccgccgacaaccaccgtcgtcgccatccaggacggcaaggccgtcttcgtccgggaggcgcccaggccgccacttggagcagagccaaagccggtgctccgcacggtgctgcacccgagcgtggggctggagcccaaggtgatcatcccgaacccgaaccggcgcgcgcggtccatgtccatggacttggacgccccatgctgcggtcacggcgccgcggacgcgccggcaagcaggtgcttggacgacgccaccaaaggcgacggcggcgtggcacccgagcagaggctcgggtggccgctgctccgccgcgcgcacgccgccgccgccgcctcagctgcccctgtacagacgcccggcggcaagaatcatgagccgcggaagcagtcggtggtgcactgggtgatgagcctgccccggcggtccgcgccgtcggagtccgccgagccgcatgccggggcggggctcgagtcggagctcaaggcaatgcttggcggcagtggcgcgcggtgccggtggttccgctacgaggagctctacgactccaccaaccacttctccgcagagaacctgatcgggaacggagggaacagcagggtgtacaggggcagcctcgcctgcggccggcaggtggcgatcaagttgtgcaaggcgtcggcggaggcgtccaaggacttcctccgggaggtggacatcatcaccaagctgcagcaccaccggatcgtccccttgatcggcgtctgcgtggaaggccgcaacctcatctccgtttaccgctacctccccaggggcagcctcgaggacaatctacacggggaaaggtcaaagccggcgctgtcgtgggagaaccggtacaaggctgcgctggggatcgcggaggctctgagctacctgcactccggcagcccgcggccggtgatccacagggacgtcaagtcgtccaacatcctcctcgcagaagagttcgagcctcagctatccgatttcgggctggccatctgggcgccgacgaatccgacgtccgtgacgcacagcgacgtcgtcggcacattcgggtacctggcgccggagtacttcatgtacgggaaggtgaccgacagggtggacgtgtacgcgttgggcgtcgtcctgctggagctcctgtccggccggaagtccatcagcagcgacgggtcgtcacccaagggccaggagagtctcgtcatgtgggcaactccggtgcttagcagcggcaacatctgtgacctgctggacccgaggctggacgtgaagcacgacgaggtggaggtcaggcggatggcctctgccgcgtcgctctgcctccggaggtcggctcgactcaggccgccgatatcgcagatactgagcatactacgaggagaaagcgcggcgagcatcgccgaccagggcgcgacggagccggactgcgtggacgacgaggcgtaccccgccgcgaacgtgaggtcgcacctgggcctcgcgcttctcgacgtggaggactcggagtccatctccagcacggagcacagcagcggcctcagcccgttggaggagtacctgcgagaacgttggagccgatcgtccagcttcgactgatgattcatgcccgcgctgcgattttgtttgtgggcatgtgttttagtttttttttccctctccgccggtaattcacatgtttatcgtatggtttggttaccggggccgtgtgtacagtggacagtcaaaaatcaccagagcgagccacatcttcggcgacaaagacgcgattggttgagcttgacctgcctcgcacctgccggccaggcaagttgcgtacaagtgacaagtcgcatgtgttttgtggttctctgccca

SEQ ID NO: 219573 - DNA, 2297 bp, Zea Mays
aatgacttgtggataatattcaggaaaattacttcatgatggttttgaagctggtggttctaatactccttcaaacattgacccatggttgatcattggggatgaatcaaatattattgtggcaacagatcggtcatcatgttttgctagtaacccaattgcacttcgaatggaagtactttgtggagctagtgaaactaatgcttgcccatcaggaggagttggaatctacaatcctggttactggggcatgaacattgaaagaacaaatgtctatagagttaccatatacatcaggtcatcagaatcggtggagctaatggtttctttaacaagttcagatggtcttcaaaatctagcctctcatacaatcatgggagacaaagaagatttcgttgagtggacgaaggttgaatttgatttgcaatcaaattatataaatactaattcaagacttcagcttacaaccaccaaaagtggcataatttggtttgatcaagtatcacttatgccatcagatacttatatggggcatggtttccgtaaagatcttgcctctatgctggcaaatctgaagcctcgatttctaaaatttccaggtggcaactatgtaatgggaaattaccttataaatgcattccgctggagtgaaactgttggaccatgggaagagagacctggccacttcaatgatgcttgggcctattggactgatgatggacttgggttttttgaatttcttcaactagcagaagaccttggcgcttgccccgtttgggtggtaaatgatggggccagcatctatgaaggagttccatcagcaacaatagctgcatttgtaaaggatgttgttaatggtattgagtttgccaggggagaccccgagactgcatggggttcagttcgtgcagcaatggggcatccagagccctttcagctttattacgtttcaataggaaatcaagaatgttcaaagtactattataaagataactatgtgaagttctactctgcaataaaagcatcctatccagacatcaaaatcatatcaagctgtgacagatctgctatttcatcagacaacccagctgatttgtatgatgtccatgtctatacttcatcaggtgatatgttttccaaatctagaatgtttgataatacagcccgtaccggacccaaggcaattgttagtgaatatgctgtaactggaaatgatgctggccgaggaacactaatagctgctttagctgaagctgcatttctcattggattagaaaggaacagcgacgtggttgagatggcaagttgtgctccactctttgtaaacgacaatgaccaaaggtggaacccagatgctatagtctttaactcatggcagcactatggatgtccaaattactggatgctgcactttttcaaagattcaagcagcgccacacttcatccgtccactattcaactaccgaactacgaccaactggtcacatctgctatcacttggaataacccacatgatgggaacacttacatgaaaataaaggttgtaaattttggaagcaaagctgttagtctgaatatatctgtaactgggttggaaactgatattcagacatttggatccataaagacggttctcacgtcgggttggctgcgggatgagaactccttccaacagcccgacaaggtggtgccggcggcaagtccaataaccaacgcgggcaagcaaatgggtgttatattgaactcgtactccctgacctcatttgatctcctcttggactcggagtctcaggttcgagcctccatccaagcttatgattagtgtgagatgtgtcgtgtgcgtgcccacaatactcaataccgagatacgggtccccccaaggctccccacaaggctttcaatagaaaatacgatatttgtgaattattgtgaagtacaggcgtacagctggctatgtgtatgagattcaacaaatggtttctacgaccctaataaaggtataaaagcacctttcctcggatatcacacatccgttgtagtctgcactcttgacattttctcttttttagagcatgtacagtgtacctaactaccgcaaactttttgtcctggtgcactacagcgaatgtgccatatataagaataaaaagaagggaaatataaccgtatccatttgtgtgtgtaaccatgtaatcaaggcgtagggatggaggttatagactcaactgatatgttcttgttgggggtttactctgtcgaaggtccttataaaattttcactttagcataaacaaat

SEQ ID NO: 219574 - DNA, 3034 bp, Zea Mays
attatcatccgtttggccgcttcatttctctccccgcttcggtgctgcctgctggccgaccgccgaagcgacaaccgaggccaccgatcagttgactcccgtctcctcgtcgcagggtctcctcacacgagcacacgaacatcgagccctccccgcaggagcataagacgcttcgcttggttttagccaatggggcacagctagagtattatacagggacaactggttacgcagacagtgcactgtgcatggtgttgcttcctggatggacaaggagaaaacgacacttgtgggttgcttgcccgcgactggagtgcaactctaacaagtaatcttcagacaatatgatacataaggatgctgctatcttcttctcatcggtttgatttgacttcacttctactcacacatcattgctctgatccaaatgctggttcctatccttgcagttttctaaaacattgctggggttgcagcatgtgtacttgggcatagagggattgttacatcgagctagtgctttggtctctgctgtagcagagcgcaatgggcatccgggcttgttcggtttgctggttgttctatgtgctggttcttgtctgttccttgtgtcagatactttatgttggatcagtggcggctcaaactgctcagttgactgtggatgcttcacctcagaatgctcagataatccctggcaatatgtttggcatcttctttgaggaaatcaaccatgctggtgctggtggattgtgggcagagcttgtaagcaacagaggttttgaagctggtggttctaatactccttcaaacattgacccatggttgatcattggggatgaatcaaatattattgtggcaacagatcggtcatcatgttttgctagtaacccaattgcacttcgaatggaagtactttgtggagctagtgaaactaatgcttgcccatcaggaggagttggaatctacaatcctggttactggggcatgaacattgaaagaacaaatgtctatagagttaccatatacatcaggtcatcagaatcggtggagctaatggtttctttaacaagttcagatggtcttcaaaatctagcctctcatacaatcatgggagacaaagaagatttcgttgagtggacgaaggttgaatttgatttgcaatcaaattatataaatactaattcaagacttcagcttacaaccaccaaaagtggcataatttggtttgatcaagtatcacttatgccatcagatacttatatggggcatggtttccgtaaagatcttgcctctatgctggcaaatctgaagcctcgatttctaaaatttccaggtggcaactatgtaatgggaaattaccttataaatgcattccgctggagtgaaactgttggaccatgggaagagagacctggccacttcaatgatgcttgggcctattggactgatgatggacttgggttttttgaatttcttcaactagcagaagaccttggcgcttgccccgtttgggtggtaaatgatggggccagcatctatgaaggagttccatcagcaacaatagctgcatttgtaaaggatgttgttaatggtattgagtttgccaggggagaccccgagactgcatggggttcagttcgtgcagcaatggggcatccagagccctttcagctttattacgtttcaataggaaatcaagaatgttcaaagtactattataaagataactatgtgaagttctactctgcaataaaagcatcctatccagacatcaaaatcatatcaagctgtgacagatctgctatttcatcagacaacccagctgatttgtatgatgtccatgtctatacttcatcaggtgatatgttttccaaatctagaatgtttgataatacagcccgtaccggacccaaggcaattgttagtgaatatgctgtaactggaaatgatgctggccgaggaacactaatagctgctttagctgaagctgcatttctcattggattagaaaggaacagcgacgtggttgagatggcaagttgtgctccactctttgtaaacgacaatgaccaaaggtggaacccagatgctatagtctttaactcatggcagcactatggatgtccaaattactggatgctgcactttttcaaagattcaagcagcgccacacttcatccgtccactattcaactaccgaactacgaccaactggtcacatctgctatcacttggaataacccacatgatgggaacacttacatgaaaataaaggttgtaaattttggaagcaaagctgttagtctgaatatatctgtaactgggttggaaactgatattcagacatttggatccataaagacggttctcacgtcgggttggctgcgggatgagaactccttccaacagcccgacaaggtggtgccggcggcaagtccaataaccaacgcgggcaagcaaatgggtgttatattgaactcgtactccctgacctcatttgatctcctcttggactcggagtctcaggttcgagcctccatccaagcttatgattagtgtgagatgtgtcgtgtgcgtgcccacaatactcaataccgagatacgggtccccccaaggctccccacaaggctttcaatagaaaatacgatatttgtgaattattgtgaagtacaggcgtacagctggctatgtgtatgagattcaacaaatggtttctacgaccctaataaaggtataaaagcacctttcctcggatatcacacatccgttgtagtctgcactcttgacattttctcttttttagagcatgtacagtgtacctaactaccgcaaactttttgtcctggtgcactacagcgaatgtgccatatataagaataaaaagaagggaaatataaccgtatccatttgtgtgtgtaaccatgtaatcaaggcgtagggatggaggttatagactcaactgatatgttcttgttgggggtttactctgtcgaaggtccttataaaattttcactttagcataaacaaat

SEQ ID NO: 219575 - DNA, 1078 bp, Zea Mays
ttagtttttacccattggcatcgcccgtctgtactgtacaacatccgatccgaaacctagcaacacccccggacagacgggcgcgaactcaaaccctagaaacggtagccatggattcgggaggcggaggagggagcggcgcgcacaaggcggcctcgggctccgcgccctcgccggcgcctaaccccacggcgatgctttcggcgctcatgagcaagcgcgccaagctccaggaggagctccgctccatcgagcgccagggctagggatcgaacccatgacctggtgaaagggaccctgccgccttcacaacttgggtttatgatatggagaccacctacctacaggagactaatcaatttggaagtgtgctgaagggtttcgaatcttttttgtcatcctcaaaaaacacctctaaccttaagcgctctcggaaatttcaggctgacgagaggttattctccctgtcatccgttacttctccagcggttgatgaacatttggctggacgagatggtaagctttctttgatttccttcttgtttgaaatttaatccatggtgctaaagaaagcacacttcattttttggtacttgtataatcctggcagatggaagagagtatggagcaggtcgttctaagggtggaagcacccctgcgaacgggcaaggcaaaccgaagaagggagggcgccctggcgggcgagacggcaagagactacggccgtcgaatgacccagacctggacgacgaagatgactactaactcctccatcatgtaggcctactgtagcgggttaacttcaatttagcgtctagcagcacatgattctttacgaattgcttcccttctcgtttgttttgcttggttgcatcttcgcttccttccccaactcttccgatttgtaatataacataggtcaatgaaaattagccagattgttaaaattttgtgcaaactttgttctcagacggtagctttttctggatttccgagttaatatatcttcgttacatccttgaatcctagtgaccgaggcgtatttggatttgtagtgtgttagacattcttcagcaag

SEQ ID NO: 219576 - DNA, 857 bp, Zea Mays
ttagtttttacccattggcatcgcccgtctgtactgtacaacatccgatccgaaacctagcaacacccccggacagacgggcgcgaactcaaaccctagaaacggtagccatggattcgggaggcggaggagggagcggcgcgcacaaggcggcctcgggctccgcgccctcgccggcgcctaaccccacggcgatgctttcggcgctcatgagcaagcgcgccaagctccaggaggagctccgctccatcgagcgccaggtttatgatatggagaccacctacctacaggagactaatcaatttggaagtgtgctgaagggtttcgaatcttttttgtcatcctcaaaaaacacctctaagttgatgaacatttggctggacgagatgatggaagagagtatggagcaggtcgttctaagggtggaagcacccctgcgaacgggcaaggcaaaccgaagaagggagggcgccctggcgggcgagacggcaagagactacggccgtcgaatgacccagacctggacgacgaagatgactactaactcctccatcatgtaggcctactgtagcgggttaacttcaatttagcgtctagcagcacatgattctttacgaattgcttcccttctcgtttgttttgcttggttgcatcttcgcttccttccccaactcttccgatttgtaatataacataggtcaatgaaaattagccagattgttaaaattttgtgcaaactttgttctcagacggtagctttttctggatttccgagttaatatatcttcgttacatccttgaatcctagtgaccgaggcgtatttggatttgtagtgtgttagacattcttcagcaag

SEQ ID NO: 219577 - DNA, 793 bp, Zea Mays
attcaactgaagaagcacagtgctggtttatgatatggagaccacctacctacaggagactaatcaatttggaagtgtgctgaagggtttcgaatcttttttgtcatcctcaaaaaacacctctaagctgacgagaggttattctccctgtcatccgttacttctccagcggtacgggcattactgctaaatgttgctgaatagcacacagcttcgaattattctttccctatggctttctaaagtttgaagtttgttaatttttcttctcccttttcctttcctgtgcatatacaggttgatgaacatttggctggacgagatgatggaagagagtatggagcaggtcgttctaagggtggaagcacccctgcgaacgggcaaggcaaaccgaagaagggagggcgccctggcgggcgagacggcaagagactacggccgtcgaatgacccagacctggacgacgaagatgactactaactcctccatcatgtaggcctactgtagcgggttaacttcaatttagcgtctagcagcacatgattctttacgaattgcttcccttctcgtttgttttgcttggttgcatcttcgcttccttccccaactcttccgatttgtaatataacataggtcaatgaaaattagccagattgttaaaattttgtgcaaactttgttctcagacggtagctttttctggatttccgagttaatatatcttcgttacatccttgaatcctagtgaccgaggcgtatttggatttgtagtgtgttagacattcttcagcaag

SEQ ID NO: 219578 - DNA, 1394 bp, Zea Mays
cgagactcgggaagaatccattgcgtgttccaaatccgctggcgtagcgtagaacacagcatctccggtagcgtcaccgtaggcctcgcaagtaaactgacctgccttctccgctttcccctccgtctccgtcgggagtcgagacaaagggagccagagttagtcccggcgccgtgtcgcgagcggaaggagaaggactgaaggaggcgacgatgcaggtgaagcagaaggtctacgagttctacaaaggcacggtggagcgggtcacggccccgcgcaccgtctccgcgttcctcgagaagggcgtcctctccgtccccgagttcattctcgccggcgacaacctcgtcgccaagtgccccacctggtcctgggaagcgggcgatccaagcaagaggaagccgtatctccccgccaataagcagttcctcgtcacccgtaatgtgccctgtttaagacgtgccatctcggttgaggaagagtatgatgcagcaggagcagaggtggttctcgatgaggatggcgaaggctggcttgcaacacatggagtgcaagaagaggaggaagacattccctctatggacaccttggacatagggagatctgatggaataaagtctatcccctcttactttagcggtggcaaggatgaagaggaggaagatatacctgacatggatacttatgaagacacaggggataatttggctgctgctgaaccatcatactttatcgcagaagaaccagaagatgacaacattcttcataccagaacatatgatgttagcataacgtatgacaagtactaccaaactccacgtgtctggctaactggatatgacgagtcaagaatgccattaatgcctgaacttgtgtttgaagacatcagccaagaccacgcacgaaaaacggtgactattgaggaccatcctcacttattggctgggaagcatgcatcagtgcacccatgcaaacatgcagctgtgatgaaaaagatcatcgacgttccaatgtcggggggagtggaaccagaagttgacaagtaccttttcatatttttgaaattcatagcgacagtcataccgactattgagtacgattatacaatggacgtcgaccttggcagtacaagctgattattggttggcttgaagcttgtcacttgtctcgggaaaaggaagcaccctaccagaaggcgcaggaagaaggctgaattgcgtgtttgtggttgaacatttgtgcatatgtgcttgttccttggatcggtttgcatttgtgaacaaactctgaaaagctcaaaggcaagacccatcttgtacattctgtgacgctgtcagcttgtgaatccattcgttaatataaatctcaacaacccgttcggcgtgcgtgggaac

SEQ ID NO: 219579 - DNA, 2311 bp, Zea Mays
ttaatagaggccatgcggccgccgccgtccgcatcaccatcaccacctatcgtcggagaaccacagaatccaccgcatcgcagagacgagtagaggttagatttaggctgaggtaagatggtgtgcatccggcaggcgaccatcgaagacctgctggcgatgcaggcgtgcaacctgatgtgcctgccggagaactaccagatgaagtactacttctaccacatgctctcgtggccgcagctcctcttcgtcgccgaggactacggaggcagcatcgtcggctacgtgctcgccaagatggaggaggacccctccgagccctgccacggccacatcacctccctcgcggtcctccgctcccaccgcaagctcgggctcgccactaagctcatgtccgccgcgcaggccgccatggaccaggtcttcggcgctgagtacgtgtcactccacgtccgccgatccaaccgcgctgccttcaacctctacacctctaccctcgggtaccagatccaggacatcgaggccaagtactatgccgatggggaggacgcgttcgacatgcgcaagctgctccggcagccacagcccaagaagcaccaccaccaccaccatcacggccccggtgggtgctgctcccacgacgcaccagttgcggcgactggttcttctccccagtcttctggttcacccgataagaaggctatcacttgatgtagggtaagccttttcctttcaagctctagatgttatgctctctactaacatattgctagtcaccaccgcgttttcggtgtgattatactgtgattttgtttgacagatcaaactagtagtttcgttgtagaatgtgtagtatgtaaatgtgcctctcctcacctttggtttcttgagaatgttcactctcaaggcagcccagtcatggaggcacatagcaattattggtgagtttaacgtggaagcttactgttttgttgtggtattgcttctaaaatctctcactaaatcagccaacgctgcggttgcttgtccttagcttgtttagtgttcgctggttattgttatgataagttattttcttcagctttcacttacctttgttattggcaacatacttctgtatgctccgcccttctggcttggtaggagttgcctgcacggagcctgcccaaacacgatcttagttggggttccacatgagtgcttttacgacattttgaactagatgcgtgatttattcttcttgacttaaattttcaatatttatatatttggcagatcatagatggaaaaatgtgcttaaaattttcttgcttttgatgatgtgttgcttaattgtgaggtgcagacaactccaagtcgctgctctccagggagaacctacttggagtcctacaatcaaatgagatctgaggcattttctgatatgtattttttgcgtgcactgtagttcttgtttaaattttcgctgatgttatgttcagctctttcttatctttcactgttacatttgaaagattgtgaaacttggacgccttcaattttcaccatcacagtagccaatgacgagttgtcccaacatgtgaggtgtaggtaactccaagccctgtttcagggagaacctacttggggtcctacattcaaatgagatacctgggcatttactgatgtttataaataaggcctaatgttttgtcttggtttgttgcatgcattattctgtttgagaattgttctttgatgactgatttagtatgcttaggtagctgtgtgttattgttcatgtaatgattatttgttgttgagatgtttatgccttttcttgtgtctagtgttttatcagcaaaacaaattactttgtggcactgccagtgatgatttgtctgcaaaatggatgtcctgtggactcaagtcccctgtttcagggagaacctactcgaggaaacatgactcgtatctacagagaggaatcaccaagccaattgtactcatctttcctctcactgggtatacaatatagtagttgtagcggtctttccgtagtagaacggagaaagacctgtgcagtgagtatttgtgtacttggccgatggctcgaatcgtctgacctaatcagcgagaatggcaaccaaatatgcttcgtacttgaaacctgtgttgtttttagacatgtgcgaattttcacagttcatttgattggtgatgcctgacaatttggtcagatctgataccgcggaatatataatgcaagtttgaaacctgtaatgcaattgttttgttattggatcacttacagaggaagagtgcctttttc

SEQ ID NO: 219580 - DNA, 2127 bp, Zea Mays
ttaatagaggccatgcggccgccgccgtccgcatcaccatcaccacctatcgtcggagaaccacagaatccaccgcatcgcagagacgagtagaggttagatttaggctgaggtaagatggtgtgcatccggcaggcgaccatcgaagacctgctggcgatgcaggcgtgcaacctgatgtgcctgccggagaactaccagatgaagtactacttctaccacatgctctcgtggccgcagctcctcttcgtcgccgaggactacggaggcagcatcgtcggctacgtgctcgccaagatggaggaggacccctccgagccctgccacggccacatcacctccctcgcggtcctccgctcccaccgcaagctcgggctcgccactaagctcatgtccgccgcgcaggccgccatggaccaggtcttcggcgctgagtacgtgtcactccacgtccgccgatccaaccgcgctgccttcaacctctacacctctaccctcgggtaccagatccaggacatcgaggccaagtactatgccgatggggaggacgcgttcgacatgcgcaagctgctccggcagccacagcccaagaagcaccaccaccaccaccatcacggccccggtgggtgctgctcccacgacgcaccagttgcggcgactggttcttctccccagtcttctggttcacccgataagaaggctatcacttgatgtaggacaactccaagtcgctgctctccagggagaacctacttggagtcctacaatcaaatgagatctgaggcattttctgatatgtattttttgcgtgcactgtagttcttgtttaaattttcgctgatgttatgttcagctctttcttatctttcactgttacatttgaaagattgtgaaacttggacgccttcaattttcaccatcacagtagccaatgacgagttgtcccaacatgtgaggtgtaggtaactccaagccctgtttcagggagaacctacttggggtcctacattcaaatgagatacctgggcatttactgatgtttataaataaggcctaatgttttgtcttggtttgttgcatgcattattctgtttgagaattgttctttgatgactgatttagtatgcttaggtagctgtgtgttattgttcatgtaatgattatttgttgttgagatgtttatgccttttcttgtgtctagtgttttatcagcaaaacaaattactttgtggcactgccagtgatgatttgtctgcaaaatggatgtcctgtggactcaagtcccctgtttcagggagaacctactcgaggaaacatggtacataatatgacatcatctgattaaactgaggcattacagaagaaccttatttccttgtcagtttttgcttcgtgctctttccttgtattctgaaagtttttctgcttggtcataaagaatcgtaaagcttggttgatgtcatataacgatccaagcagttgtctttcagtgatgtttctgtctgcaaaatggatgtgctatgtatccaagtccctgttttaggcagaacctacttggagaaacagcatcgaatgtgacatgaatacagagactgagattgtagtgctgctttattgttatgttctatttctctctttcagttgaagtttcgtggaatcgtagttattttttgtcttgactatgcatcgtgcaatttaaatattgattgatgaacctggaattcatttttttgtgcacctaactagcttctgaaccttgcagactcgtatctacagagaggaatcaccaagccaattgtactcatctttcctctcactgggtatacaatatagtagttgtagcggtctttccgtagtagaacggagaaagacctgtgcagtgagtatttgtgtacttggccgatggctcgaatcgtctgacctaatcagcgagaatggcaaccaaatatgcttcgtacttgaaacctgtgttgtttttagacatgtgcgaattttcacagttcatttgattggtgatgcctgacaatttggtcagatctgataccgcggaatatataatgcaagtttgaaacctgtaatgcaattgttttgttattggatcacttacagaggaagagtgcctttttc

SEQ ID NO: 219581 - DNA, 2118 bp, Zea Mays
tagaggccatgcggccgccgccgtccgcatcaccatcaccacctatcgtcggagaaccacagaatccaccgcatcgcagagacgagtagaggttagatttaggctgaggtaagatggtgtgcatccggcaggcgaccatcgaagacctgctggcgatgcaggcgtgcaacctgatgtgcctgccggagaactaccagatgaagtactacttctaccacatgctctcgtggccgcagctcctcttcgtcgccgaggactacggaggcagcatcgtcggctacgtgctcgccaagatggaggaggacccctccgagccctgccacggccacatcacctccctcgcggtcctccgctcccaccgcaagctcgggctcgccactaagctcatgtccgccgcgcaggccgccatggaccaggtcttcggcgctgagtacgtgtcactccacgtccgccgatccaaccgcgctgccttcaacctctacacctctaccctcgggtaccagatccaggacatcgaggccaagtactatgccgatggggaggacgcgttcgacatgcgcaagctgctccggcagccacagcccaagaagcaccaccaccaccaccatcacggccccggtgggtgctgctcccacgacgcaccagttgcggcgactggttcttctccccagtcttctggttcacccgataagaaggctatcacttgatacaactccaagtcgctgctctccagggagaacctacttggagtcctacaatcaaatgagatctgaggcattttctgatatgtattttttgcgtgcactgtagttcttgtttaaattttcgctgatgttatgttcagctctttcttatctttcactgttacatttgaaagattgtgaaacttggacgccttcaattttcaccatcacagtagccaatgacgagttgtcccaacatgtgaggtgtaggtaactccaagccctgtttcagggagaacctacttggggtcctacattcaaatgagatacctgggcatttactgatgtttataaataaggcctaatgttttgtcttggtttgttgcatgcattattctgtttgagaattgttctttgatgactgatttagtatgcttaggtagctgtgtgttattgttcatgtaatgattatttgttgttgagatgtttatgccttttcttgtgtctagtgttttatcagcaaaacaaattactttgtggcactgccagtgatgatttgtctgcaaaatggatgtcctgtggactcaagtcccctgtttcagggagaacctactcgaggaaacatggtacataatatgacatcatctgattaaactgaggcattacagaagaaccttatttccttgtcagtttttgcttcgtgctctttccttgtattctgaaagtttttctgcttggtcataaagaatcgtaaagcttggttgatgtcatataacgatccaagcagttgtctttcagtgatgtttctgtctgcaaaatggatgtgctatgtatccaagtccctgttttaggcagaacctacttggagaaacagcatcgaatgtgacatgaatacagagactgagattgtagtgctgctttattgttatgttctatttctctctttcagttgaagtttcgtggaatcgtagttattttttgtcttgactatgcatcgtgcaatttaaatattgattgatgaacctggaattcatttttttgtgcacctaactagcttctgaaccttgcagactcgtatctacagagaggaatcaccaagccaattgtactcatctttcctctcactgggtatacaatatagtagttgtagcggtctttccgtagtagaacggagaaagacctgtgcagtgagtatttgtgtacttggccgatggctcgaatcgtctgacctaatcagcgagaatggcaaccaaatatgcttcgtacttgaaacctgtgttgtttttagacatgtgcgaattttcacagttcatttgattggtgatgcctgacaatttggtcagatctgataccgcggaatatataatgcaagtttgaaacctgtaatgcaattgttttgttattggatcacttacagaggaagagtgcctttttc

SEQ ID NO: 219582 - DNA, 1137 bp, Zea Mays
ccgccgtccgcatcaccatcaccacctatcgtcggagaaccacagaatccaccgcatcgcagagacgagtagaggttagatttaggctgaggtaagatggtgtgcatccggcaggcgaccatcgaagacctgctggcgatgcaggcgtgcaacctgatgtgcctgccggagaactaccagatgaagtactacttctaccacatgctctcgtggccgcagctcctcttcgtcgccgaggactacggaggcagcatcgtcggctacgtgctcgccaagatggaggaggacccctccgagccctgccacggccacatcacctccctcgcggtcctccgctcccaccgcaagctcgggctcgccactaagctcatgtccgccgcgcaggccgccatggaccaggtcttcggcgctgagtacgtgtcactccacgtccgccgatccaaccgcgctgccttcaacctctacacctctaccctcgggtaccagatccaggacatcgaggccaagtactatgccgatggggaggacgcgttcgacatgcgcaagctgctccggcagccacagcccaagaagcaccaccaccaccaccatcacggccccggtgggtgctgctcccacgacgcaccagttgcggcgactggttcttctccccagtcttctggttcacccgataagaaggctatcacttgatgtaggacaactccaagtcgctgctctccagggagaacctacttggagtcctacaatcaaatgagatctgaggcattttctgattcgtatctacagagaggaatcaccaagccaattgtactcatctttcctctcactgggtatacaatatagtagttgtagcggtctttccgtagtagaacggagaaagacctgtgcagtgagtatttgtgtacttggccgatggctcgaatcgtctgacctaatcagcgagaatggcaaccaaatatgcttcgtacttgaaacctgtgttgtttttagacatgtgcgaattttcacagttcatttgattggtgatgcctgacaatttggtcagatctgataccgcggaatatataatgcaagtttgaaacctgtaatgcaattgttttgttattggatcacttacagaggaagagtgcctttttc

SEQ ID NO: 219583 - DNA, 1122 bp, Zea Mays
gtccgcatcaccatcaccacctatcgtcggagaaccacagaatccaccgcatcgcagagacgagtagaggttagatttaggctgaggtaagatggtgtgcatccggcaggcgaccatcgaagacctgctggcgatgcaggcgtgcaacctgatgtgcctgccggagaactaccagatgaagtactacttctaccacatgctctcgtggccgcagctcctcttcgtcgccgaggactacggaggcagcatcgtcggctacgtgctcgccaagatggaggaggacccctccgagccctgccacggccacatcacctccctcgcggtcctccgctcccaccgcaagctcgggctcgccactaagctcatgtccgccgcgcaggccgccatggaccaggtcttcggcgctgagtacgtgtcactccacgtccgccgatccaaccgcgctgccttcaacctctacacctctaccctcgggtaccagatccaggacatcgaggccaagtactatgccgatggggaggacgcgttcgacatgcgcaagctgctccggcagccacagcccaagaagcaccaccaccaccaccatcacggccccggtgggtgctgctcccacgacgcaccagttgcggcgactggttcttctccccagtcttctggttcacccgataagaaggctatcacttgatgtaggacaactccaagtcgctgctctccagggagaacctacttggagtcctacaatcaaatgagatctgagactcgtatctacagagaggaatcaccaagccaattgtactcatctttcctctcactgggtatacaatatagtagttgtagcggtctttccgtagtagaacggagaaagacctgtgcagtgagtatttgtgtacttggccgatggctcgaatcgtctgacctaatcagcgagaatggcaaccaaatatgcttcgtacttgaaacctgtgttgtttttagacatgtgcgaattttcacagttcatttgattggtgatgcctgacaatttggtcagatctgataccgcggaatatataatgcaagtttgaaacctgtaatgcaattgttttgttattggatcacttacagaggaagagtgcctttttc

SEQ ID NO: 219584 - DNA, 802 bp, Zea Mays
atgccgctcacctgggctcatcttccagccgccctctccgcccagcagcagagcacaccatcctctcaactcggatccccaagccctcgcctccagctcttgccacggcatccatcccctgctcggacctccacccggccgcgtcctcgccggtggccagcgccgctgcatcgcccttcctagcgtcggccttggcaccgcttccccgagtgccccagtcgagctcgcccatcctctgctctagccctttctccacgccgtcgctgagctcgcccctcccctcagccatggacacgacgacctgcagcccttcttggtggccaagcccatcttcctgctcgcgccccctctttttccacctctgcgcgtatcagctcgtccaacccccatggtgtttcctccctctcggctcccttgctccctccccatggcgttccccctggatgttggtgatctgttccccacggtgcaggcaaatgttctttccctccctgcagcagcaccttggtggttgtcaagcagcacgtcgcgcttgcgcagcctcggtcacgacgttgttcaccccgctaaccattggtgtcatacctcatgtgtcatgtgttcgccgaaatgcctaaacatgtagtctgtcgtcgtcgtatccacagtcaattttagtcatggcttccatttgttagtaaatctgcacttttaggagactcggagttcgtcctagatgcaaaagtaccttgctggttatggagaggtcagctgaaggttggaggatcaggtggtgttttggaggtagatttaaacattttgg

SEQ ID NO: 219585 - DNA, 652 bp, Zea Mays
ccccccccgcgattattccaagctccccgagcccatggccgcaatggctccagctgccgtgtcgttcctggcgatggcgctgctgttgctcagtgacgcggaggccaagttcctgcccaacaacatcaccgtcgttggctccgtctactgcgacgcctgctccaacaataccttctccaagcacagcttcttcctgaaagtatgtgttgcccaagttcattatgcactggaatttacgggtgatactgcttcgagctgaaatgggccctcacagtcgggtgttatgtcagtcgccattcagtagcatgtgcagatgaactgtcgtcaaagcatggcaagcctataaccagattaccagaagtccagcactagattaccatggctttcatctttacattaaactaagatctaagcattgtcctgaccgtcttgtaatcaaattatttactgttagactctaaatagctttatgggcagtttgtgtgtctgagtgcactttttttttaaaaaaaacaagacttctagagcaacgtacctttttcagatttttaaagatatactccaataaaaccgctgttttttttgggaaggaaaacagtacaaccagtgatgaattaattttacattctgtggccatggcgtgtacaaaaat

SEQ ID NO: 219586 - DNA, 1495 bp, Zea Mays
tagcattcaggccttcgcatgctgtggtttccaatagtggtgtcattcctgttgcacctagcctggacactatagatgattgctttgatctttcaaagatacctgctaggagacttactcaggtggtgacaaaatctgtggagaagctctttggaagcaggaattcaaagataagcatatggagtggataaattcagttaagcctgctgtggatgcacgcatagtcagtgatttgtctgaggatggtgattcagatattgatggctgccaaaatgtgaggaaagaagcgcgctctgctctaagtggacttcttaaggatgatgggattctggtgattccaactgctttggggtgccccccgaagcttaacgctaaggaactctcgtctgaaagctacaattctcagacactacgccttttgtctttagctagcatgtcagggtgttgccaggtttccattcctttgggtacacatgataagtgccccatttcagtttcgttgattgctaggcatggtggtgatcggtttttgttggacaccacacaaaccatgtatacaaccatccaagagcaagtggagatactagcgaaatctagtgtttcaagtaaacaggcgatgaatgaagaagcagctgaagctgctaaagagaaaggtaatgctgcatttaaggaaaaacaatggcaaaaggcagtaaatttctacactgaagcaataaagttaaatggaaaagtggctacatactacagcaacagagctgctgcctttctagaactaactagctaccgtcaggctgaggcagattgcacaagtgccatcgaacttgattccaagagcgtgaaagcttatttacggagaggcactgcaagggagatgctaggttattataaggaggccgttgatgatttcaaccacgcccttgttctagaaccaatgaacaagacggctggtgttgccatcaacaggttaaagaagctgtttccttgaatatgaagctgcatgaagatatgataacctcatattttgtgcacacacaaggggtgggattgaagtacctgagttcaaccgacggatgctgatcacagtttgagctagtgggaacggatttcaacactgagatcaggttaagggtcaatttagcggtttctctccccacccaaagttttggaaaagcaaaataaagaaggttttttgggaaccggaaagcagtttacgggtgtccgccatccccaccatgtataatatagtttcgccaattatttgttcagacgctttgccaatcgaactttttctgccatgcttacctgtacccatctctccttgccgttctgagcggcagcttttttgcgggctcgctctgaaaacggctgccaccagtgaggtcgctcgtggaggctgttaggcggccatgtgctgacgcgcagtcgcttcgccggctgaacctttcagccctttcagtttcggttgtttgctagttgctgtcagcgtcactgaaat

SEQ ID NO: 219587 - DNA, 1672 bp, Zea Mays
tagcattcaggccttcgcatgctgtggtttccaatagtggtgtcattcctgttgcacctagcctggacactataggttggtttgcaaaggatccaagtgttttgcatcgtgttgggcatcttcttcttagacttccttatgctggagacttactcaggtggtgacaaaatctgtggagaagctctttggaagacaagtccggcatgtgaatctcgaaaattatttgagttcaagaatatccagcctgggtaactattcaaatgggcataagaatggggattcaaagttccctctgttgctagcactttgtaactccatgatatcacttcacaagcaggaattcaaagataagcatatggagtggataaattcagttaagcctgctgtggatgcacgcatagtcagtgatttgtctgaggatggtgattcagatattgatggctgccaaaatgtgaggaaagaagcgcgctctgctctaagtggacttcttaaggatgatgggattctggtgattccaactgctttggggtgccccccgaagcttaacgctaaggaactctcgtctgaaagctacaattctcagacactacgccttttgtctttagctagcatgtcagggtgttgccaggtttccattcctttgggtacacatgataagtgccccatttcagtttcgttgattgctaggcatggtggtgatcggtttttgttggacaccacacaaaccatgtatacaaccatccaagagcaagtggagatactagcgaaatctagtgtttcaagtaaacaggcgatgaatgaagaagcagctgaagctgctaaagagaaaggtaatgctgcatttaaggaaaaacaatggcaaaaggcagtaaatttctacactgaagcaataaagttaaatggaaaagtggctacatactacagcaacagagctgctgcctttctagaactaactagctaccgtcaggctgaggcagattgcacaagtgccatcgaacttgattccaagagcgtgaaagcttatttacggagaggcactgcaagggagatgctaggttattataaggaggccgttgatgatttcaaccacgcccttgttctagaaccaatgaacaagacggctggtgttgccatcaacaggttaaagaagctgtttccttgaatatgaagctgcatgaagatatgataacctcatattttgtgcacacacaaggggtgggattgaagtacctgagttcaaccgacggatgctgatcacagtttgagctagtgggaacggatttcaacactgagatcaggttaagggtcaatttagcggtttctctccccacccaaagttttggaaaagcaaaataaagaaggttttttgggaaccggaaagcagtttacgggtgtccgccatccccaccatgtataatatagtttcgccaattatttgttcagacgctttgccaatcgaactttttctgccatgcttacctgtacccatctctccttgccgttctgagcggcagcttttttgcgggctcgctctgaaaacggctgccaccagtgaggtcgctcgtggaggctgttaggcggccatgtgctgacgcgcagtcgcttcgccggctgaacctttcagccctttcagtttcggttgtttgctagttgctgtcagcgtcactgaaat

SEQ ID NO: 219588 - DNA, 1699 bp, Zea Mays
  misc_feature (1)..(2): n is a, c, g, or t
nntagcattcaggccttcgcatgctgtggtttccaatagtggtgtcattcctgttgcacctagcctggacactataggttggtttgcaaaggatccaagtgttttgcatcgtgttgggcatcttcttcttagacttccttatgctggtattcgccaaccgagaattttttacatagcagatgattgctttgatctttcaaagatacctgctaggagacttactcaggtggtgacaaaatctgtggagaagctctttggaagacaagtccggcatgtgaatctcgaaaattatttgagttcaagaatatccagcctgggtaactattcaaatgggcataagaatggggattcaaagttccctctgttgctagcactttgtaactccatgatatcacttcacaagcaggaattcaaagataagcatatggagtggataaattcagttaagcctgctgtggatgcacgcatagtcagtgatttgtctgaggatggtgattcagatattgatggctgccaaaatgatgatgggattctggtgattccaactgctttggggtgccccccgaagcttaacgctaaggaactctcgtctgaaagctacaattctcagacactacgccttttgtctttagctagcatgtcagggtgttgccaggtttccattcctttgggtacacatgataagtgccccatttcagtttcgttgattgctaggcatggtggtgatcggtttttgttggacaccacacaaaccatgtatacaaccatccaagagcaagtggagatactagcgaaatctagtgtttcaagtaaacaggcgatgaatgaagaagcagctgaagctgctaaagagaaaggtaatgctgcatttaaggaaaaacaatggcaaaaggcagtaaatttctacactgaagcaataaagttaaatggaaaagtggctacatactacagcaacagagctgctgcctttctagaactaactagctaccgtcaggctgaggcagattgcacaagtgccatcgaacttgattccaagagcgtgaaagcttatttacggagaggcactgcaagggagatgctaggttattataaggaggccgttgatgatttcaaccacgcccttgttctagaaccaatgaacaagacggctggtgttgccatcaacaggttaaagaagctgtttccttgaatatgaagctgcatgaagatatgataacctcatattttgtgcacacacaaggggtgggattgaagtacctgagttcaaccgacggatgctgatcacagtttgagctagtgggaacggatttcaacactgagatcaggttaagggtcaatttagcggtttctctccccacccaaagttttggaaaagcaaaataaagaaggttttttgggaaccggaaagcagtttacgggtgtccgccatccccaccatgtataatatagtttcgccaattatttgttcagacgctttgccaatcgaactttttctgccatgcttacctgtacccatctctccttgccgttctgagcggcagcttttttgcgggctcgctctgaaaacggctgccaccagtgaggtcgctcgtggaggctgttaggcggccatgtgctgacgcgcagtcgcttcgccggctgaacctttcagccctttcagtttcggttgtttgctagttgctgtcagcgtcactgaaat

SEQ ID NO: 219589 - DNA, 726 bp, Zea Mays
atggctgagaatctggcgcccgagaagcgccactccttcgtgcacaacgggcagaaggtgttcgagtgggaccagacgctggaggaggtcaacatgtacatcgagctcccgaagggtgtgccaaccaagctatttcactgcagcatccaggctagccacgtcgaggtcggcatccgcggcaacccgccatacctcaaccatgacctgacacacccagtgaagactgactcgtcgttctggacaatagaagacggtgagatgcatataacactgcaaaaaagagagaaggggaaaacatggtcatctccaatacaagggcaagggattttggatccatatgctgcagatcaagagcaaaagcggcttatgctccaaaggtttcaggaagagaaccctgggttcgacttttcacaggctcagttcagtggaacctgccctgacccaagaaccttcatgggagggatacgctccgagtgaagcaccctacctgcctatgtacgtttctactatatcctcggcatcttgatagatgcagcaggcgtgcttattatgtctgtaaatcggttggtgtctgttatggaaataattgtgatgtgtgaccatttgtgtgcaagcacattttgcgtgcttaattctagtttatagttgtgatcttcattcaggagctgtttgtttcagcgttttcacccggtgggtaaatgggtaacatttagtgcatgtttggga

SEQ ID NO: 219590 - DNA, 287 bp, Zea Mays
ctcccacccggctgccagccatggctgagaatctggcgcccgagaagcgccactccttcgtgcacaacgaaggtgttcgagtgggaccagacgctggaggaggtcaacatgtacatcgagctcccgaagggtgtgccaaccaagctatttcactgcagcatccaggctagccacgtcgaggtcggcatccgcggcaacccgccatacctcaaccatgacctgacacacccagtgaagactgactcgtcgttctggacaatagtattgttgactctttctggccgtcg

SEQ ID NO: 219591 - DNA, 1434 bp, Zea Mays
gttttaggttagctagaaggaaagcggagatgcttcagtctccaaaatttcatgtgtcgagaacaaggcttatcatctacaatttgcctaagactatgaccattaatgacgtaaagaagctttgcagagaagcagtcatttctcgtgctacaaaacaaaatcctgtcatccggaaggtgaatatcctgaagaatgaaaagaaaggcatacagaagcattcacgcggtgtagcctttgttgattttcaagaacatgaacacgctcttgttgctctaagggttctaaacaacaatcctgttccatcttcgtcagatccaatcgtgaaggcaaacagtgccagcagcttcccgccgacggctcacacccacacgggcacatgaggtggccagctcttcggcagctgcggccactggcacgtgtgatgcttctgtggcttcaatggtttattcgcgcatgcgaggctccatgagacagtggtgatggactgatggtgtctcgtgatgcgcttggcgaggcagctatggccggcggagcagatggaggcggcacaactatgtggggttgagaaacttttggttcagaacgtcgcccaattgtagagtttgcgcttgaggatgttgaaaaggtgaggcttcagaagattcgaatggaacggcatcgcaagtcagcagcagaaactgcagaagttcagcagaccccttcaggggatcaacctgcaagtgaaggccgtaacgcagataacagcaggactttcagaaaaggaaacaagcggaaatcacacagtttaccatctaaaccctccgactctgttgaagggctggccaaggatcctctagttcctggagttcgaaacgcgaaagctgcaaagagagcaaggaagtcaaatgtggggaccattttgccggaccgaggtctaacagctgcaaccccaaacactgctcagaatcaagttgcgtcaagtgagcttgatcaggcagctgctccaaagaaaagaaaaaacagaaaagacggtcaggcagagcaaaagagaggaaaggttacaaaaaggacaaggaaagaaccttccggggaaggaggcgtggacaagtcgctggtggagcagtaccgtttcaagttcttgcaacatggtgtgagcaagaccaagaccaagaccaaaggatagttgacttgggaactgtgggaagtgggattgatgttgaagagcagcacggtgtcccggaccaccgtataacgtttcgaagagcaagtctccacaaactttctgaggccaaaatttcgattgtgatgcttaatagttttgtgtccatctgtactgatatttataactgatctagttacagccgtataattatgaatcatcttatcatacaccgtttatggcttcatgatgacctgcctgtgtctgaaattcctgtgttggtatttctaacggaa

SEQ ID NO: 219592 - DNA, 710 bp, Zea Mays
taccagctgctgctgggttgacagcagtggcccctttttcagcatttgcaagctctcctcgaagcctctcaatctcactagccacagcaatcatatttttctccattgctttactttgttcgaggttatcagagtgtgccttcttttcaaaatcaaccgcagctctgccgttctggatctcccggcgcatggtttcaatctggggacggacggaatcggtcttactcgcctcagccttcttgtgcgcgagcttctcccgtaggacctggagcctgttgacgaggtcggtgcgcgccgcggcgagcacctggacgtcggcgtggacctggtcgatctccgcgcgcgcagcggcgatggcccgcgcctcagcctccatatgcgccgcctggtcggccagggagcgcacctcgccctcccgctcggcgcgcgccctggtggcggcgacggagaccgcccggagctcgtgttgcgccgctatgagctgctgctggagtgcgacgtgggtggcagcgaaccgctggttgtcgacgaggagctcctggatatcctggtcccgggcggcgaggcgctcctcgatgagggcgaaggccgggtgcgccgcggaggcgcgcaggtgctgcgcgaggaggccctcatcgcgcgaggacgcggggacggcggccggcgcggcccccggcgcccgtccgaggaggggcgggttgggatcgtga

SEQ ID NO: 219593 - DNA, 1236 bp, Zea Mays
atcgactgcgggagcttatccgcactccgaccggtgccacctccaagctgagcccgctcctagactcccagtcccctccgcagtccgcaccgccgcctcgccatggaggcagctgccgccgccttcttgtcccctccccgcgtcgccctcgacgtccgcacactcttctccccgccccgttgcctccccgtctcgccctcatcccagctccgcctcgctgcccgcccccgcgcgctcgccggcgccaagccgcggttcctgagcccccatcgagaacccgccgtcgacggcggtcgcggcgccagggatgtcgtcgcgatggtggtgccgttcctgaggggggccgcgtgggagcagccaccgccggacttggcctcgttcctgtacaagaaccggatcgtgtacttggggatgtgcctcgttccgtcggtcacggagctcatgctcgccgagtttctctacctccagtatgacgacgccgagaagccaatctacatgtacatcaattccactggcaccaccaagaatggcgagaagttaggctatgagacagaagctcttgcagtatatgatgctatgaggtaaccgtgccgcacttccatcatcgacaataatgataaaacagccaattggtcgctttcaaggtcaggcaacagacgttgacattgcaagaaaagagattcgaaatgtcaagatagaaatggttaagctgctggcaagacacattggtaaaccaatggaagagattgctcgggacatcaggcgtcctaaatactttagccccagtgaagctgtggattatggcatcatcgacaaggtgatatacaacgagaaaatccaggaagatggcggtgttgtgtcagaactcaaaagatcaaatttgatatagcgttctttttccacaagtagacacgtctttgtatgtttagtggtcattcacgtgtgtttgagtattgagtagttaccactcgatcactcagtacctggttgtagaggcgtagagcacatagccaatgcattgaacaagcatttccttcccccctctgccgtttcaacgctgtattgcccttacccaacgggcgtgctgaaagatgaattttggtaggttgttgatcgttggtgccctgtttgcgtgtttgttttagcccgcggggaagcatatagtttgatcgtggcaatttggcgtgtggattgttacaatctggaccatgattgtttcagcgcagcttattatag

SEQ ID NO: 219594 - DNA, 2396 bp, Zea Mays
gccatgcaaaggccacgagcggaggcaagggtggtgaagtcgaggccccgcgtccaagccagaggggaaggatccggtcgtcgtacggccggtgcctggctggcagcaactgtcgtcgacggcgagggggcccgagtgaaggtctgatgtgcgtcaagatgagtcgttcgtattgcagaagtcgccaaagatagaccaacgtacaagcaaataaagcagagataagttacattgtgacaagctgacacttttacaatttacatctaatagtgtaatttgccttattttgtgaccaagggttggcgaggctttgttgattttttacaacttctattaagtatcaagatagatgcctcttaactctaaaagaacgattgctaggtcgacatgtagtccaaagaccgaaatgtacaggctaaactaaaggatcgatctaggacgacataggtgatatataaaatctataaacgcatgcttaatattgtgcaactaattaggtgattatgaccacaagatctaacaggattgtttggaaggtataacacaatctccactactattggttggcgatcaccaaagtgcggatgccactaattggcttctatgtacactcatgcagtactaaagatatgatgtttctgaatacataaatatatgggagatccattcccaatttatgatcataagcatatttggtgcttttgtatatgatgcgtacctaaattttggttagcatttatcctgacacattatgtacctgaagtattttttgtttgtccaactcttgatacaaattttattttatttctttgattgttgacattcatggacctgacgaacctgaagttcagagctgtctccaaagtccaaacaaccagaatatatagacataagtaactaccgacctttgtgaaaaatgattcttattggaaatatccagtgcaaagctcacccaccaaaaaaacctgatgtattcttctttccctagctgttgcaaagaggtgagaactgtttggggctttcactacccaattaaaatattaagtagcaaactgagcaccattactttgagcccaatgcaagttaataatacaatttattataatagtacatctactatcgcaccaaaaagacttactcaaatggcaacaaatcgcgcccaagggcgcgcccagttactattctttctatatataagagcagggagcaaagctgtgattccgtggagccacgtcactttaataatttttggccattcgattctatctcaacggccaggtggcaaacacacggaattcttcaccctacaccaaattcttctggactcttctagctgccgcgagggccattggggaactcccatcgctactcgccagtggctgagacagagcccgggcttctttcgtcggtgtcctcttggaccgcgccacgcagttctctaagctcactatccccttctcgaagaaggttgtggccgtatgggaaggcggtgaagaaggagaatacagaggagaagcttgctggcggcgacaggaagccgatatacatgcatgtgtgaccccagcaggttcacgccacggactgccacatctcgccgagcagaatggcgagaagttaggctatgagacagaagctcttgcagtatatgatgctatgaggtatgttaaagttcctattttcactctgtgtgtcggtaatgcatggggagaagctgctttactcttagctgctggcgctaaaggtaaccgtgccgcacttccatcatcgacaataatgataaaacagccaattggtcgctttcaaggtcaggcaacagacgttgacattgcaagaaaagagattcgaaatgtcaagatagaaatggttaagctgctggcaagacacattggtaaaccaatggaagagattgctcgggacatcaggcgtcctaaatactttagccccagtgaagctgtggattatggcatcatcgacaaggtgatatacaacgagaaaatccaggaagatggcggtgttgtgtcagaactcaaaagatcaaatttgatatagcgttctttttccacaagtagacacgtctttgtatgtttagtggtcattcacgtgtgtttgagtattgagtagttaccactcgatcactcagtacctggttgtagaggcgtagagcacatagccaatgcattgaacaagcatttccttcccccctctgccgtttcaacgctgtattgcccttacccaacgggcgtgctgaaagatgaattttggtaggttgttgatcgttggtgccctgtttgcgtgtttgttttagcccgcggggaagcatatagtttgatcgtggcaatttggcgtgtggattgttacaatctggaccatgattgtttcagcgcagcttattatag

SEQ ID NO: 219595 - DNA, 2562 bp, Zea Mays
ttttcagccatgcaaaggccacgagcggaggcaagggtggtgaagtcgaggccccgcgtccaagccagaggggaaggatccggtcgtcgtacggccggtgcctggctggcagcaactgtcgtcgacggcgagggggcccgagtgaaggtctgatgtgcgtcaagatgagtcgttcgtattgcagaagtcgccaaagatagaccaacgtacaagcaaataaagcagagataagttacattgtgacaagctgacacttttacaatttacatctaatagtgtaatttgccttattttgtgaccaagggttggcgaggctttgttgattttttacaacttctattaagtatcaagatagatgcctcttaactctaaaagaacgattgctaggtcgacatgtagtccaaagaccgaaatgtacaggctaaactaaaggatcgatctaggacgacataggtgatatataaaatctataaacgcatgcttaatattgtgcaactaattaggtgattatgaccacaagatctaacaggattgtttggaaggtataacacaatctccactactattggttggcgatcaccaaagtgcggatgccactaattggcttctatgtacactcatgcagtactaaagatatgatgtttctgaatacataaatatatgggagatccattcccaatttatgatcataagcatatttggtgcttttgtatatgatgcgtacctaaattttggttagcatttatcctgacacattatgtacctgaagtattttttgtttgtccaactcttgatacaaattttattttatttctttgattgttgacattcatggacctgacgaacctgaagttcagagctgtctccaaagtccaaacaaccagaatatatagacataagtaactaccgacctttgtgaaaaatgattcttattggaaatatccagtgcaaagctcacccaccaaaaaaacctgatgtattcttctttccctagctgttgcaaagaggtgagaactgtttggggctttcactacccaattaaaatattaagtagcaaactgagcaccattactttgagcccaatgcaagttaataatacaatttattataatagtacatctactatcgcaccaaaaagacttactcaaatggcaacaaatcgcgcccaagggcgcgcccagttactattctttctatatataagagcagggagcaaagctgtgattccgtggagccacgtcactttaataatttttggccattcgattctatctcaacggccaggtggcaaacacacggaattcttcaccctacaccaaattcttctggactcttctagctgccgcgagggccattggggaactcccatcgctactcgccagtggctgagacagagcccgggcttctttcgtcggtgtcctcttggaccgcgccacgcagttctctaagctcactatccccttctcgaagaaggttgtggccgtatgggaaggcggtgaagaaggagaatacagaggagaagcttgctggcggcgacaggaagccgatatacatgcatgtgtgaccccagcaggttcacgccacggactgccacatctcgccgagcaggtggtgccgttcctgaggggggccgcgtgggagcagccaccgccggacttggcctcgttcctgtacaagaaccggatcgtgtacttggggatgtgcctcgttccgtcggtcacggagctcatgctcgccgagtttctctacctccagtatgacgacgccgagaagccaatctacatgtacatcaattccactggcaccaccaagaatggcgagaagttaggctatgagacagaagctcttgcagtatatgatgctatgaggtatgttaaagttcctattttcactctgtgtgtcggtaatgcatggggagaagctgctttactcttagctgctggcgctaaagccaattggtcgctttcaaggtcaggcaacagacgttgacattgcaagaaaagagattcgaaatgtcaagatagaaatggttaagctgctggcaagacacattggtaaaccaatggaagagattgctcgggacatcaggcgtcctaaatactttagccccagtgaagctgtggattatggcatcatcgacaaggtgatatacaacgagaaaatccaggaagatggcggtgttgtgtcagaactcaaaagatcaaatttgatatagcgttctttttccacaagtagacacgtctttgtatgtttagtggtcattcacgtgtgtttgagtattgagtagttaccactcgatcactcagtacctggttgtagaggcgtagagcacatagccaatgcattgaacaagcatttccttcccccctctgccgtttcaacgctgtattgcccttacccaacgggcgtgctgaaagatgaattttggtaggttgttgatcgttggtgccctgtttgcgtgtttgttttagcccgcggggaagcatatagtttgatcgtggcaatttggcgtgtggattgttacaatctggaccatgattgtttcagcgcagcttattatag

SEQ ID NO: 219596 - DNA, 2962 bp, Zea Mays
ggcgacaatgaggccaaagctgcggctgcgccaaaatagaagagaaggacccggacgtcgcacggccgcgcccggcggttagcagctgcagctaccgccgacagcaaggaggcccaatcggagggcgtcagcgcgttaatgggacagcgtcagcggcagcggcgacatcgacggggacaacttttgtaccagcagctacggcgttggcgtcctgctcaacttccacatgccgcagccactcacccgtagcttcaccgcgccgcgccgcgccgcgccccacccggacgccgtcgtccccctccggctgttggagccccaacgtcgcatccggctatagcaagaggggcttcgagcttttttcagccatgcaaaggccacgagcggaggcaagggtggtgaagtcgaggccccgcgtccaagccagaggggaaggatccggtcgtcgtacggccggtgcctggctggcagcaactgtcgtcgacggcgagggggcccgagtgaaggtctgatgtgcgtcaagatgagtcgttcgtattgcagaagtcgccaaagatagaccaacgtacaagcaaataaagcagagataagttacattgtgacaagctgacacttttacaatttacatctaatagtgtaatttgccttattttgtgaccaagggttggcgaggctttgttgattttttacaacttctattaagtatcaagatagatgcctcttaactctaaaagaacgattgctaggtcgacatgtagtccaaagaccgaaatgtacaggctaaactaaaggatcgatctaggacgacataggtgatatataaaatctataaacgcatgcttaatattgtgcaactaattaggtgattatgaccacaagatctaacaggattgtttggaaggtataacacaatctccactactattggttggcgatcaccaaagtgcggatgccactaattggcttctatgtacactcatgcagtactaaagatatgatgtttctgaatacataaatatatgggagatccattcccaatttatgatcataagcatatttggtgcttttgtatatgatgcgtacctaaattttggttagcatttatcctgacacattatgtacctgaagtattttttgtttgtccaactcttgatacaaattttattttatttctttgattgttgacattcatggacctgacgaacctgaagttcagagctgtctccaaagtccaaacaaccagaatatatagacataagtaactaccgacctttgtgaaaaatgattcttattggaaatatccagtgcaaagctcacccaccaaaaaaacctgatgtattcttctttccctagctgttgcaaagaggtgagaactgtttggggctttcactacccaattaaaatattaagtagcaaactgagcaccattactttgagcccaatgcaagttaataatacaatttattataatagtacatctactatcgcaccaaaaagacttactcaaatggcaacaaatcgcgcccaagggcgcgcccagttactattctttctatatataagagcagggagcaaagctgtgattccgtggagccacgtcactttaataatttttggccattcgattctatctcaacggccaggtggcaaacacacggaattcttcaccctacaccaaattcttctggactcttctagctgccgcgagggccattggggaactcccatcgctactcgccagtggctgagacagagcccgggcttctttcgtcggtgtcctcttggaccgcgccacgcagttctctaagctcactatccccttctcgaagaaggttgtggccgtatgggaaggcggtgaagaaggagaatacagaggagaagcttgctggcggcgacaggaagccgatatacatgcatgtgtgaccccagcaggttcacgccacggactgccacatctcgccgagcaggtggtgccgttcctgaggggggccgcgtgggagcagccaccgccggacttggcctcgttcctgtacaagaaccggatcgtgtacttggggatgtgcctcgttccgtcggtcacggagctcatgctcgccgagtttctctacctccagtatgacgacgccgagaagccaatctacatgtacatcaattccactggcaccaccaagaatggcgagaagttaggctatgagacagaagctcttgcagtatatgatgctatgaggtatgttaaagttcctattttcactctgtgtgtcggtaatgcatggggagaagctgctttactcttagctgctggcgctaaaggtaaccgtgccgcacttccatcatcgacaataatgataaaacagccaattggtcgctttcaaggtcaggcaacagacgttgacattgcaagaaaagagattcgaaatgtcaagatagaaatggttaagctgctggcaagacacattggtaaaccaatggaagagattgctcgggacatcaggcgtcctaaatactttagccccagtgaagctgtggattatggcatcatcgacaaggtgatatacaacgagaaaatccaggaagatggcggtgttgtgtcagaactcaaaagatcaaatttgatatagcgttctttttccacaagtagacacgtctttgtatgtttagtggtcattcacgtgtgtttgagtattgagtagttaccactcgatcactcagtacctggttgtagaggcgtagagcacatagccaatgcattgaacaagcatttccttcccccctctgccgtttcaacgctgtattgcccttacccaacgggcgtgctgaaagatgaattttggtaggttgttgatcgttggtgccctgtttgcgtgtttgttttagcccgcggggaagcatatagtttgatcgtggcaatttggcgtgtggattgttacaatctggaccatgattgtttcagcgcagcttattatag

SEQ ID NO: 219597 - DNA, 3946 bp, Zea Mays
aagttcaagccatggggtccacgtgccggatttctcttctttgttccctgctccctctcccccaatcctctcttgtagccacggccgcatgctcgcgcgcccgcgccgcctttctacttccaagtgcagctcgcctcggcttgccagcgccatcttttcttcctcccactccctcacctgaccggtctgattctgggtcgatgtcggtcgccatggtccgacccatggtcggaggatagcggagaccagtgaaggccttgcgcagaagagtggcggggaggagaagcgacggagaagcgcgctgccgcgctcacatggccgaccaaggtaggcatgtgcgtgcagacatttgaattcatgaaccagatctcgacaatttggattctaagtaaaaatgggcagggtcgctctctcccaacaatagtcctgccattcgttgccatgtacccaacgagcgtccagcaccaagaaaacaagagagagaaagagtgggtgtgagcaccgaactgtcgaactgagcatggagctcgccttgggggccatggccagcttggcccccaagctgggcgacctgctcatgaaggagtatgtcgtgcacaagggcctcaagcttgacatcgagtccctctccagggagcttgtgatgatgaacaccgccctcgtccacgcatcccgggttccacctgaccagctcactgaggtggaaaagctctgggcacgccacatccgggagctgtcgtatgacatggaggacgccatcgacgatttcatcctgcgtgtggttggtggtggcaactctgctaccgaagacaccaaagtcttcaaggagatccttggcaaggtcagcgccgtgatgtcaatgaagaagttcaaggatcggcgtcagatctccgacaaggtcaaagacataaaaaaactctctaacgagttggctgaactttatgccaagtacacagtaagaggtgcgggtgctgatctcgccgcgagcaccggcattgacccccgtgtcatcaatctgtacaagaaagagtcggatctcgttggcatccaggagtcaagggacaaagttatcaagatgctatctatagggaccaaagatgacgatgtgcaggcgtctgatcagaatctaaagatagtgtctatagtcggagttggaggattaggtaagactactctagccaaaacagtacatgatatgctagagaagcaattcggttgttctgctttcatttctgttggtaggactcctaatctgaataagtcatttaagaagatgctagtggaactcgatcgcaattataagcaagttgacatggccagatgggatctagaccaatttgtaaacgaactgcatgaattcttacagaacaagaggtacttgatcgttgttgatgacatatgggatgatgactcatgggaagcgatcagatatgccttgaaggacaataattgtgggagtagaatagtcatgactactcgtaattccggggttgtcacgaaagaagaagaggtttacagattaaaacctctttctgatgaaaactccaaaaaattgttctacaaaagaatagagagtcaggaaggagaaagccttgacggtgaactatctagtaaaatcatacacaaatgtggcggcctgccattggctatcattgcaatagctagtttgttggctgaaagaccatgtgaggagtggtcaagagtgtatgactcgattggtcttgggaataatggtgacaatacgacaaagatactgtcatacagctactatgatctgccttcttatctcaagccatgtctgttgcaactaagtattttttccagaagactatctcattgatacaaagcgtctgatatggatgtggataagtgaaggcctagtccatcttgagaaagagggtagcctatttgaggttggagaaaggtacttcaaggaacttgtgaatagaagcatgatccagccgatacagggaaaaaatagctggtttgaagaagagttccgtattcacgacgttgtgtttgatctcatccgtaagttgtcgaaagatgaagacttcgtaacccttttggacagcaacagacaacattcatgtccggatagtttaagaagagagaagaaaacaggagtgcctcgttctgattggaagcaacgtcgactggttatcctaaatcaacgtgtgcattccagaggtgttgaggtcagcatggacatgccagaggtgttgaggacacttaacattgtacactgtaacgttacaattatggccccacttcataacttcagagtttgtcgtgtgctatgtctagtaggcagctatgtacccatcagcctaaagcatctagggaagctgttgcatctcaagttcctacagatatctgacacgactgttgatgagcttcctaaggaaattgggcacctgaggtctcttcaggcactgatattaggctatactggactagacgagctaccatcgactgtttcctcgcttactcagttgatgtgcctgacagctagcgggttcaaaaggttgccagctgacaggatggggaacttaacgtccctggaggagctacggttagagagcatagttggtcagtgtgccgcccaatccctagtggcagagcttggcaagctaacaaggttgagggtggtcagcatcaccttttcagaggagctagaagagagtttgcaagaagcactggtcaaatctctgttcaacctgcggggactccaggaactatcgctttcttctaaaatgtggcagcagggaagcactatgtggggagactgggagccaccaaggcagcttcggggcctgatcgttcaaggcattgtcttctcacgacagcctcgatggatcaaccgctcctgcctgccacacctctgcttcttatgtctgatggtgcacgctgttgaagcacaggacctagataacctagggaggttgccagagctccggtacctcaagctagagggtgtcatctggcctccaaggtatgctgttagcctggacaacttcaagaatctaagattttgcgatgtgggtacaacgctcgagtttcatatgggcgccatgccgaggcttgaagagctgcaatttgaagtttatgcagggtactggagttgggaacacaatggtgtgctgttggagcagttcccaacgaaggatgtgatcgaagatcttgacttgggcctggataacttgctttcacttgagcaagtaatagtcaaagtcaactgcttaggtgctactgctgcacaagtgcaggagctggaggctgtggccatgcgtgccgtggaaaatcatgccaaccgtccaaccataaaaatggatcgattatatgaagaaaatatcttatctgatgaaaagctggaggctctgcttcagcagcacattcaactagaaggcggcgtgctccagctgaaggataaacctgacgctttcttcatcagccagctacggttgtatcgacatcttcagaaagccgttatttcctacgactgtgcgggtgccagcatgtgtgaggtgctgaaagtggaagcagcttgtagacatgcagccgaggttcatcctaaccatccaagtattgaactgatcagaacaaataccgatgaaatggcctcctcatctgaccatcctagcacagagcccaggaattgatgactcggtttgtccaatccttccaacccaacagtaggtgtaaacgtgagttgtttaagtacggaagagacaggtcctgttcagccagatgattacaagcattcgcagggcttgttagatttgtggttcttagtctaaaatcacattgaacagggagatgaacacaagtgatgtagtttatgtgttatctacatttgtctctatttttttaagatggtcatatatttcctcgaaagtgaccttgattgattatgtgtgaagtgtatttttttaatgacatgggt

SEQ ID NO: 219598 - DNA, 3733 bp, Zea Mays
aagttcaagccatggggtccacgtgccggatttctcttctttgttccctgctccctctcccccaatcctctcttgtagccacggccgcatgctcgcgcgcccgcgccgcctttctacttccaagtgcagctcgcctcggcttgccagcgccatcttttcttcctcccactccctcacctgaccggtctgattctgggtcgatgtcggtcgccatggtccgacccatggtcggaggatagcggagaccagtgaaggccttgcgcagaagagtggcggggaggagaagcgacggagaagcgcgctgccgcgctcacatggccgaccaaggtaggcatgtgcgtgcagacatttgaattcatgaaccagatctcgacaatttggattctaagtaaaaatgggcagggtcgctctctcccaacaatagtcctgccattcgttgccatgtacccaacgagcgtccagcaccaagaaaacaagagagagaaagagtgggtgtgagcaccgaactgtcgaactgagcatggagctcgccttgggggccatggccagcttggcccccaagctgggcgacctgctcatgaaggagtatgtcgtgcacaagggcctcaagcttgacatcgagtccctctccagggagcttgtgatgatgaacaccgccctcgtccacgcatcccgggttccacctgaccagctcactgaggtggaaaagctctgggcacgccacatccgggagctgtcgtatgacatggaggacgccatcgacgatttcatcctgcgtgtggttggtggtggcaactctgctaccgaagacaccaaagtcttcaaggagatccttggcaaggtcagcgccgtgatgtcaatgaagaagttcaaggatcggcgtcagatctccgacaaggtcaaagacataaaaaaactctctaacgagttggctgaactttatgccaagtacacagtaagaggtgcgggtgctgatctcgccgcgagcaccggcattgacccccgtgtcatcaatctgtacaagaaagagtcggatctcgttggcatccaggagtcaagggacaaagttatcaagatgctatctatagggaccaaagatgacgatgtgcaggcgtctgatcagaatctaaagatagtgtctatagtcggagttggaggattaggtacttgatcgttgttgatgacatatgggatgatgactcatgggaagcgatcagatatgccttgaaggacaataattgtgggagtagaatagtcatgactactcgtaattccggggttgtcacgaaagaagaagaggtttacagattaaaacctctttctgatgaaaactccaaaaaattgttctacaaaagaatagagagtcaggaaggagaaagccttgacggtgaactatctagtaaaatcatacacaaatgtggcggcctgccattggctatcattgcaatagctagtttgttggctgaaagaccatgtgaggagtggtcaagagtgtatgactcgattggtcttgggaataatggtgacaatacgacaaagatactgtcatacagctactatgatctgccttcttatctcaagccatgtctgttgcaactaagtattttttccagaagactatctcattgatacaaagcgtctgatatggatgtggataagtgaaggcctagtccatcttgagaaagagggtagcctatttgaggttggagaaaggtacttcaaggaacttgtgaatagaagcatgatccagccgatacagggaaaaaatagctggtttgaagaagagttccgtattcacgacgttgtgtttgatctcatccgtaagttgtcgaaagatgaagacttcgtaacccttttggacagcaacagacaacattcatgtccggatagtttaagaagagagaagaaaacaggagtgcctcgttctgattggaagcaacgtcgactggttatcctaaatcaacgtgtgcattccagaggtgttgaggtcagcatggacatgccagaggtgttgaggacacttaacattgtacactgtaacgttacaattatggccccacttcataacttcagagtttgtcgtgtgctatgtctagtaggcagctatgtacccatcagcctaaagcatctagggaagctgttgcatctcaagttcctacagatatctgacacgactgttgatgagcttcctaaggaaattgggcacctgaggtctcttcaggcactgatattaggctatactggactagacgagctaccatcgactgtttcctcgcttactcagttgatgtgcctgacagctagcgggttcaaaaggttgccagctgacaggatggggaacttaacgtccctggaggagctacggttagagagcatagttggtcagtgtgccgcccaatccctagtggcagagcttggcaagctaacaaggttgagggtggtcagcatcaccttttcagaggagctagaagagagtttgcaagaagcactggtcaaatctctgttcaacctgcggggactccaggaactatcgctttcttctaaaatgtggcagcagggaagcactatgtggggagactgggagccaccaaggcagcttcggggcctgatcgttcaaggcattgtcttctcacgacagcctcgatggatcaaccgctcctgcctgccacacctctgcttcttatgtctgatggtgcacgctgttgaagcacaggacctagataacctagggaggttgccagagctccggtacctcaagctagagggtgtcatctggcctccaaggtatgctgttagcctggacaacttcaagaatctaagattttgcgatgtgggtacaacgctcgagtttcatatgggcgccatgccgaggcttgaagagctgcaatttgaagtttatgcagggtactggagttgggaacacaatggtgtgctgttggagcagttcccaacgaaggatgtgatcgaagatcttgacttgggcctggataacttgctttcacttgagcaagtaatagtcaaagtcaactgcttaggtgctactgctgcacaagtgcaggagctggaggctgtggccatgcgtgccgtggaaaatcatgccaaccgtccaaccataaaaatggatcgattatatgaagaaaatatcttatctgatgaaaagctggaggctctgcttcagcagcacattcaactagaaggcggcgtgctccagctgaaggataaacctgacgctttcttcatcagccagctacggttgtatcgacatcttcagaaagccgttatttcctacgactgtgcgggtgccagcatgtgtgaggtgctgaaagtggaagcagcttgtagacatgcagccgaggttcatcctaaccatccaagtattgaactgatcagaacaaataccgatgaaatggcctcctcatctgaccatcctagcacagagcccaggaattgatgactcggtttgtccaatccttccaacccaacagtaggtaaacgtgagttgtttaagtacggaagagacaggtcctgttcagccagatgattacaagcattcgcagggcttgttagatttgtggttcttagtctaaaatcacattgaacagggagatgaacacaagtgatgtagtttatgtgttatctacatttgtctctatttttttaagatggtcatatatttcctcgaaagtgaccttgattgattatgtgtgaagtgtatttttttaatgacatgggt

SEQ ID NO: 219599 - DNA, 1510 bp, Zea Mays
aatactgagacagggcgcttgtcagcaagaacaccaaatctacagaaccaacctgcccttgagaaggataggtataggattcgccaagcttttgttgcagccccgggaaattctcttatcgttgcagattatggtcaggcgggtggtgatttccattctaggacagccatgaatatgtatcagcatatccgtgatgctgtccaagaaaagaaagttcttcttgagtggcaccctcaacctggtcaagagaaacctccagtgccgctattgaaggatgcttttggcgctgagaggaggaaagctaaaatgcttaatttttccattgcttatggaaagacagctgttgggctatcccgggactggaaggtttctgttaaagaggcaagagatacactgaagctctggtacagggatagaaaagaagtgttagcttggcaaaaaagtcagaagaagcttgcaagcgagaagggtgaagtctacactttgcttgggcggtcgcgccattttccttacctgactcagtatggtcctggccaacgaggtcatattgagcgtgctgctataaatgcaccagtgcagggaagtgcagcagatgttgctatgtgtgccatgcttgagatcgaaaggaatgtccgccttaaggagcttggttggaggctcttattgcaggtgcatgatgaagtgatactggaagggccttcagagtctgctgaggtggccaaggctatagtggtggagtgtatgtccaaacctttctacggaaccaacatcttgaacgtcgacctggctgtcgacgccaagtgtgcaaagagctggtatgctgccaaatagactgaggagacgctgtcacctgccacaaggttgatgacaccagtgcaatcgagaccccactgttcggataaaaaatggtggacccgtcgtcatgcagactgcggttccaggaccttgagtttgttgtggtggtaacccaggccctgacaagacaacacgcccatttcttggctgcagcagaacagcggaagacacggaggactctgctgccagcacctggagttgcgcggtgccaaagcataccagacagaattcgagatggcttggatctcgagtgaactagcgcggtgccaaagcatgctgttttgttcataatctcacttgttcagcgtgctggtgcgttaggttagtttacagatttgttctggtgcagtgaggccaattatggtccctgcggttggtatcgatcttggattgtgcattgcatgtagtaccatactgcatctacactgggaccatttttcagataacagaaacattcagcttcatcctcgaaagagaatcagaccaacttgttacaaaaaacagtttcaaacgactggatcaagtttacataacaaaaccgtctcaaaattcaattctacaacaaaaaaaaggagggcacattcgtctactcaaaattgaaactgtgatttgatgactcatgagtccatgccccccaaatataaggctctctttc

SEQ ID NO: 219600 - DNA, 1622 bp, Zea Mays
ggcctcaccccttcccacggaggcccccgagtcgccattgcttgccctcgctcggctcgatccccactctaccgtgccagccaccaaccccgcccgcgcctccgctactaaagccgaggcctcacccaccaggccaccgccatgctcctccccttcctcagatcccacccgctcctccaccacgccgctcgcctgtcctccccgcgcactcgcctgatcctccgccgcgacttgctcccgctcgcgcgctcccggcctatccgcatggcggcccattccggctccggctccggcgccagctcccctgccccagcgccgcctgctgccgtggtgcaaaagtcaaagatcaaattttgccctgcttgtggaagtccaacgaaattggccatacctgatggtgatgagaagatgagggctgtttgttcttcttgtggaggagttcactacgaaaacccaaaaatggttgttggttgccttgtggagcacgataataaggttctcctttgcagaagaaagattgaaccggcttatggtctttgaggtgggggagtctgctgctgaaggagcctctagagaaacattagaagaagcatgtgcagatgtagagataatctcaccttttgctcagttggatattccactgattggtcaaagttacattattttccgagcaagactgaagacccccaatttttcacctggagcagagtcgctggaatgtgcactttttgctctcgatgatataccattcgattctctagcattttcttcaatcgttgtcaccttgaggatgtatactgaagatgtgaggtctggaaacatcaaatatcactattgcattataaacaaaagattaggagccagcccgtcagaccttcggagtttcgatattgataaccatatagctgtgtgaggttttaaaggttctaaaacccttggcgattgaggggaatggttttggcatacaacaggcacacggccacacaacaaaaacatcgccatcagatagaccagtgttgaatgctgaatccccatgggagccttttttggcgcctctctgcggattggaacagatttagagggtggaacagatttagagggtgtttgatttttatggactaatttttagtttctctattttattctattttagactctaaattgacaaatacggaaactaaaataggattttagtttctgtatttggtaatttagtattcagtaatttagagactaaaatgaaataaaatgaagaaactaaaaattagtacttagaagccaaacactcccttaaagtaggtgctggaactgtaaatggttcgtatcctaaagcctggtttagcccttttaggagattctgcgtttggatgggagttgggaggactgagaattgtatcatagtgcagcaaatcttggttgtaggattgagctatcctgcatgccatacttgtggcgcttcttcagcgaccgcatgctgtgatctggttacaattgaattatgtgagctcttttttaaccatttatttcagttgtaaagcttgtgttgcattatttttttatcataactgagtgctgaatacaccttcaggcttgctcgttcgtggttatttgcaccctcaaaa

SEQ ID NO: 219601 - DNA, 1878 bp, Zea Mays
gccgacctcaggcctcaccccttcccacggaggcccccgagtcgccattgcttgccctcgctcggctcgatccccactctaccgtgccagccaccaaccccgcccgcgcctccgctactaaagccgaggcctcacccaccaggccaccgccatgctcctccccttcctcagatcccacccgctcctccaccacgccgctcgcctgtcctccccgcgcactcgcctgatcctccgccgcgacttgctcccgctcgcgcgctcccggcctatccgcatggcggcccattccggctccggctccggcgccagctcccctgccccagcgccgcctgctgccgtggtgcaaaagtcaaagatcaaattttgccctgcttgtggaagtccaacgaaattggccatacctgatggtgatgagaagatgagggctgtttgttcttcttgtggaggagttcactacgaaaacccaaaaatggttgttggttgccttgtggagcacgataataaggttctcctttgcagaagaaagattgaaccggcttatggtctttggacacttcctgctggttatttagaggtgggggagtctgctgctgaaggagcctctagagaaacattagaagaagcatgtgcagatgtagagataatctcaccttttgctcagttggatattccactgattggtcaatagagttacattattttccgagcaagactgaagacccccaatttttcacctggagcagagtcgctggaatgtgcactttttgctctcgatgatataccattcgattctctagcattttcttcaatcgttgtcaccttgaggatgtatactgaagatgtgaggtctggaaacatcaaatatcactattgcattataaacaaaaggtaaatcgtccctttttgtagtaactgatcattgttgtcgttcgtaactctgattgcttttacaaagtaagtttatgaatcttgctctagtttccttgtctcactgcaaattttctgcagcactcacctatatgacaatcttgcagcatgttcaagtttacgaatactactctagtttcctatatggtctataacttgttttgtgcaacttgatttacagattaggagccagcccgtcagaccttcggagtttcgatattgataaccatatagctgtgtgaggttttaaaggttctaaaacccttggcgattgaggggaatggttttggcatacaacaggcacacggccacacaacaaaaacatcgccatcagatagaccagtgttgaatgctgaatccccatgggagccttttttggcgcctctctgcggattggaacagatttagagggtggaacagatttagagggtgtttgatttttatggactaatttttagtttctctattttattctattttagactctaaattgacaaatacggaaactaaaataggattttagtttctgtatttggtaatttagtattcagtaatttagagactaaaatgaaataaaatgaagaaactaaaaattagtacttagaagccaaacactcccttaaagtaggtgctggaactgtaaatggttcgtatcctaaagcctggtttagcccttttaggagattctgcgtttggatgggagttgggaggactgagaattgtatcatagtgcagcaaatcttggttgtaggattgagctatcctgcatgccatacttgtggcgcttcttcagcgaccgcatgctgtgatctggttacaattgaattatgtgagctcttttttaaccatttatttcagttgtaaagcttgtgttgcattatttttttatcataactgagtgctgaatacaccttcaggcttgctcgttcgtggttatttgcaccctcaaaa

SEQ ID NO: 219602 - DNA, 1888 bp, Zea Mays
aacgtgttaggcggccgacctcaggcctcaccccttcccacggaggcccccgagtcgccattgcttgccctcgctcggctcgatccccactctaccgtgccagccaccaaccccgcccgcgcctccgctactaaagccgaggcctcacccaccaggccaccgccatgctcctccccttcctcagatcccacccgctcctccaccacgccgctcgcctgtcctccccgcgcactcgcctgatcctccgccgcgacttgctcccgctcgcgcgctcccggcctatccgcatggcggcccattccggctccggctccggcgccagctcccctgccccagcgccgcctgctgccgtggtgcaaaagtcaaagatcaaattttgccctgcttgtggaagtccaacgaaattggccatacctgatggtgatgagaagatgagggctgtttgttcttcttgtggaggagttcactacgaaaacccaaaaatggttgttggttgccttgtggagcacgataataaggttctcctttgcagaagaaagattgaaccggcttatggtctttggacacttcctgctggttatttagaggtgggggagtctgctgctgaaggagcctctagagaaacattagaagaagcatgtgcagatgtagagataatctcaccttttgctcagttggatattccactgattggtcaaagttacattattttccgagcaagactgaagacccccaatttttcacctggagcagagtcgctggaatgtgcactttttgctctcgatgatataccattcgattctctagcattttcttcaatcgttgtcaccttgaggatgtatactgaagatgtgaggtctggaaacatcaaatatcactattgcattataaacaaaaggtaaatcgtccctttttgtagtaactgatcattgttgtcgttcgtaactctgattgcttttacaaagtaagtttatgaatcttgctctagtttccttgtctcactgcaaattttctgcagcactcacctatatgacaatcttgcagcatgttcaagtttacgaatactactctagtttcctatatggtctataacttgttttgtgcaacttgatttacagattaggagccagcccgtcagaccttcggagtttcgatattgataaccatatagctgtgtgaggttttaaaggttctaaaacccttggcgattgaggggaatggttttggcatacaacaggcacacggccacacaacaaaaacatcgccatcagatagaccagtgttgaatgctgaatccccatgggagccttttttggcgcctctctgcggattggaacagatttagagggtggaacagatttagagggtgtttgatttttatggactaatttttagtttctctattttattctattttagactctaaattgacaaatacggaaactaaaataggattttagtttctgtatttggtaatttagtattcagtaatttagagactaaaatgaaataaaatgaagaaactaaaaattagtacttagaagccaaacactcccttaaagtaggtgctggaactgtaaatggttcgtatcctaaagcctggtttagcccttttaggagattctgcgtttggatgggagttgggaggactgagaattgtatcatagtgcagcaaatcttggttgtaggattgagctatcctgcatgccatacttgtggcgcttcttcagcgaccgcatgctgtgatctggttacaattgaattatgtgagctcttttttaaccatttatttcagttgtaaagcttgtgttgcattatttttttatcataactgagtgctgaatacaccttcaggcttgctcgttcgtggttatttgcaccctcaaaa

SEQ ID NO: 219603 - DNA, 3665 bp, Zea Mays
  misc_feature (3665)..(3665): n is a, c, g, or t
ccgaaaccaggcagtggtgtggagtggacacaacacaacaggagaggaggaaaagggaaaacggaaattcactgctactactccgtctccgtactagcacgcccataacctctctctctctcctgcctctcaccgcatcgtcttcctctccccccaccacaccccccacccgccgatccatcccccaaaagccgaagccgaaaccgaaacctccctccgcacgccacctgctaccacacacacacccgcgccgccgcccccacggccggccgcgcggaggtgactcgagaaggacgcaggaaccaaggagagagtttggtgaggggatcagagacgtaacccgcccggacccgggctgcattagccggaatcccatcccaggcgagcctctctctcccctcctcgaaccaggcgcaggcgagcgtctctgcccgcccgcctgctgctaccgccaaaacgcctcctttgttgccatccgccgatgccgtaatccgccgcccaaagctcttcctttttccctctctctcgcccgcggccgcactccctgccccagtgcctgccgtggcgagcccaaccccaatgccttttaaacccctccccgctccctcactgatccccaccgcctcccaatgccgccctccttcccctccctcccgctcccggaggccgttgccgccaccgcccacgccgcgctgctcgcgctcgccgcactcctgctcctcctccgcgccgcgcgcgcgctcgcctcccgctgcgcgtcatgcctcaaggcgccgcgccgccgcgggggccccgccgtcgtcgtgggcgacggcgccggcggcgccctcgcggcggcgactgccggcgcctggcacagggccgtgctggcgtcctgcgcctacgccctgctctcgcaggtcgccgtgctgagctacgaggtggccgtcgccggctcgcgcgtctcggcgcgggcgctgctgctgccggccgtgcaggcggtgtcctgggccgcgctgctggcgctcgcgcttcaggcccgcgccgtcggctgggccaggttccctgcgctggtgcggctctggtgggtggtctccttcgcgctctgcgttgtcattgcgtacgacgactccaggcgcctgataggccagggcgcgcgcgctgtggattacgcgcacatggttgccaacttcgcgtccgtgccggccctgggcttcctgtgcttggttggtgtcatgggttccaccggtttggaattggagtttacggaggatggcaacggcctgcatgagccgctgctgctcggcaggcagcgcagagaggcagaggaggagctcggctgtctgagggtcactccctacgctgatgctgggatcctcagccttgcaacattgtcatggcttagtccgttgctctctgttggtgcgcagcggccacttgagttggctgacatacccttgctggcgcacaaggaccgtgcaaagtcatgctataaggcgatgagcgctcactacgagcgccagcggctagaataccctggcagggagccatcactcacatgggcaatactcaagtcattctggcgagaggccgcggtcaatggcacatttgctgctgtcaacacgattgtgtcgtatgttggaccttacttgatcagctattttgtggactacctcagtggcaacattgctttcccccatgaaggttacatccttgcctctatattttttgtagcaaaactgcttgagacactcactgcccgacagtggtacttgggtgtggacatcatggggatccatgtcaagtctggcctcactgccatggtgtataggaagggtctccgactgtcaaacgcctcacggcagagccacacgagtggtgagattgtgaattacatggccgtcgatgtgcagcgtgtgggggactatgcatggtatttccatgacatctggatgcttcccctgcagatcattcttgctctcgccatcctgtacaagaacgtcgggatcgccatggtttcaacattggtagcaactgtgctatcgatcgcagcctctgttcctgtggcaaagctgcaggagcactaccaagataagttaatggcatcaaaagatgagcgcatgcgcaagacttcagagtgcttgaaaaatatgaggattttgaagcttcaggcatgggaggatcggtaccggctgcagttggaagagatgaggaacgtggaatgcagatggcttcggtgggctctgtactcacaggctgcagttacatttgttttctggagctcgccaatctttgtcgcagtcataacttttgggacttgcatattactcggtggccagctcactgcaggaggggttctatccgctttagcaacgtttcggatcctccaagagcctctgaggaacttcccggatctcatctctatgatggcacagacaagggtgtctttggaccgtttgtctcattttctgcagcaagaagaactgccagatgacgcaactataaatgttccacaaagtagtacagataaggcagtcgatattaaggatggcgcattctcttggaacccatacactctgacccctacactttctgatatacaccttagtgtagtgagaggcatgagagtagcagtctgtggtgtcattggttctggtaaatcaagtctactatcgtctatactcggggagatacccaaattatgtggccatgtcaggataagtggcacagcagcgtatgttcctcagactgcatggatacagtctggaaatattgaggagaatattctgtttggcagtcaaatggatagacaacgttacaagagagtcattgcagcttgctgtcttaagaaagatcttgagctgctccagtacggagatcagactgttattggtgatagaggcattaatttgagtggaggtcagaaacaaagagttcagcttgctagagcactctaccaagatgctgatatttatttgcttgatgatcccttcagtgctgttgatgctcatactgggagcgaactgtttaaggttcttaaggatggccatatcacacaagctggaaagtatgatgatcttctgcaagctggaactgatttcaatgctctggtttctgctcataaggaagctattgaaaccatggatatatttgaagattccgatagtgatacagtttcttctattcccaacaaaagattgacaccaagtatcagcaatattgataacctgaaaaataagatgtgtgaaaatggacaaccatctaatacacggggaattaaggaaaaaaagaagaaagaagagcgtaagaagaagcgtactgttcaagaggaggaaagggaacgtggaaaagtgagctccaaagtttatttgtcatacatgggggaagcttacaaaggtacactgataccactaattatcttggctcaaaccatgttccaagttcttcagattgcgagcaactggtggatggcatgggcaaacccacaaacagaaggagatgctcccaagacagatagtgtggtccttctggttgtttatatgtcccttgcctttggaagttcactatttgtgttcatgagaagccttcttgtggctacgtttggtttagcagctgcccagaagctttttataaaaatgcttaggtgtgtctttcgagctccaatgtcattctttgacaccataccn

SEQ ID NO: 219604 - DNA, 3705 bp, Zea Mays
gcctacgccgcggacgcgacgtcgccgcctgtcatgcacagccagtccgcacccggcccgagggtgggatgccgcgcccacctccaccttccgtccttcccccacaccttcaccacggctccactccactctccagttctccactccccccgcccccatctcggcctcctctccaccccccttggcctgtcgcgaaacgattgcccgacacgggtccccaaccaagatggcctagccggagaggttgaaccagcgcaatgccggcgccagcgagcggcggcggtggcggggaccacctccgcggccacgcgcacctgaccaactgcatccacctgcgccaccaccacgcccacgcccacgcccacggcgcgtccgggcggaggcgcagccccacggggtcctcggcgtcggcgtcggccgcgctgatgcgggacctcctggccctgcagcgctcgcgctcgctgcgggacccatccacccgccgctccgtcgacgactccgcttccaacaaccgggtcgccgccgacccggacgacgccgaccactcccgcgccggcgcgatcaagacgctcctcgaccagctcacggagaacccgcaccccaagcccggccgccggccccggcgccggttcaggcgaagcgctacccgtcgcgtcgcccagcccgctgccgccccccgcgtctccgtcaactccagctcccaggaggccgtctgcggcaacaggtacctcttcggcggcaccggcggagccgacggcggtgtcgagctgatgcagcagcagcagcaggtgtcgcacgagtcgcacaacgtgtgcggcatcccgtggaactggtcgcgcatccaccaccgcggcaagtccatcctcgacatggccggccggagcctctcgtgcggcctgtccgaccccaagtcgacgtcggcggcgcggaggtccgaacccgccacctccgccgcctcgtgcggccacgtcaacgggtcacgctcgcacccgcatttcccggtcaccgcgaggctgacgtcctcgagcagttcagactccgactctctgcctctgcttgtcgacggcgtgcgcaacgccgtcggtggcatttccagcagcttctccggggagctcgggattttctccaagagcagcgagctggactccgacctcgcgtccgaggcacggtctgggcagaagtcgcggggctcgcaccgtgcccgacaccggagctttacgcagaagtatgctccaaggactttcaaagacgtcgtcggccagagcttggtggtgcaggcgctgtccaatgccattctgaagaagaagatcggactggtgtatgtcttctatgggccacatggcacgggcaagacctcgtgcgccagggtgttcgcaaaggctttgaattgccattccccggagcacccgaggccctgtgattcatgtgcctcttgtattgcacacaatctgggcaagagcaggagcttgctggagattggaccggttggtaatatagatctggatggcattgtggatatccttgacaatgtgatgctctcgccggtgaaatcccagcacagggtgtttataattgatgactgcaacacattgccgcctgatacatggagtgtcatatccaaggtcgtcgaacgtgcacctaggcgtgtggtttttattctcatcagccctaatcttgatctccctcatataatcgtgtcgaggtgccaaaagttctttttccccaaactgaaggagtgcgacattatcagcactttgcagtggatttctaccagcgaaggcctggatgttgatagagatgccttgaaacttattgcttcccggtcagacgggtcactgagggatgccgagatgactctggatcaactcagtctgcttgggcagacaatttcgatgtcccttgttcaagaacttgttggcttggtttctgatgataaattggttgatttgcttgatttagcactatctgctgatacagtgaacacagtgaaaaccttgcgagatatcacagaaacaggtgttgagccactggccctgatgtctcaacttgctacaataatcactgacatccttgctggcacctatacattaacacgagaaagagttcggaggaaattcttcaaacgtccaaccttatcaaaggatgatatggaaaagctgcgccaagccttgaaaacactctctgaagctgaaaaacagttgagggtctctaatgacaagatgacatggcttacagctgctcttcttcagcttgcacctgataaacaatacgtattaccgagttcatccccgagcacaagtcttattcaagcaacaacatggcaaacaattaccatgttggaaggagacctggggaacataccccagacagccatgtgttgccaaccggtgctacaagagtgaatgaaggatctaggtatggcaaaactgacagtgaaatgatttggcaggctgtgctagagaatgttcagtcagactcattaagaagattgttagccagagagggtcgactgatatccgtcagcctaggcacagctccaactgtacaattaatattcaactctcgagtaaataaatctaaagctgagaagtataggggccaaattctgcaggcatttgaatctgttctttcttctaccataatacttgaaattcgatatgaatctaaggatgatctggcagcaggccatgctccagttatttctgcctaccctgaggatggctcctcaaatctggtattaaggaggtcttttactaaacatagttcagtttcttcggggggcgagaacttaattaggaggcttcagaaagatagtgtggtccaacttggtagctcaaatcagacacgctggatgcaatctgatccacatatattgactgaaggtgaaattattgaagttggatctcaaatggattggcgtgctgaacaagatagtggcattgttatggcaaacagaagacaagaggctgtctcgggagaaggtttgtcatcacagaatcaagaaatttctcagggaggaaaaattgtgaataatggagatggtcggcaaaagaacattgtgagaggcaaggtatctcttgctaatgttattaaccaggcggaatcttgttcccaacaaggtggctggtctagacacaaagctgtatcaattgcagaaaagctagagcaagataatttgagattggagcctagatccagtttgctttgttggaaagcttcaagcacctctagacggaagctgtctgcactgaagatcaggacacgaagatcacgagctttatcaaggctcgccttgtgcggaaggtgtatttcagtgagatctccaagatgaagcattagggggtcaatcgccccagattttacatgtagctaacttagcagggcacccataatccataatttattctctgtagttgtagcagcgacctagaggtgtcattctgtagcacattgtgtaacatgtaggagagagataaacacatatccccattctttctattgaaacaccagaaatagttgctcttgctccataattcgttaatctgaacttctgaagccatgccaaggccttatattgatcctctgttgtcatattgataaaaatagggcatgtgaggcttgcggctgcgagcaccagaaagctttccaaggcaccactgtatttcttcggcatagggcgaattacgtcatatggtatggtttttg

SEQ ID NO: 219605 - DNA, 1941 bp, Zea Mays
tattttttcatctcgtcaccctagtagaatcattgtcatcttcgttgccctgctagtcccgtagcttctctccctcctcgctcctcggctcctcgcttgtcgctcctcctcagccctcaccgcgttccccgagcacctcgtcatcatggtcaatggcctcgtcgggagcgcggacgattggaagttcgcggcagagcagtttgtgaggcggatgccggacaaggtgatcgtgcaccgaagtcagtgcaactctgccactcagacatttgatggtgttgatttaatgggtgaaaggttagcaaatgaggttctatcagttgtagagcaaagacgaggtgtgaagaaaatctcgtttgtggcacattctcttggtggccttgttgccagatatgctataggaaggctctatgaacctaatagtagaaggaaatcttctgggggggagagcagagatgatgttgtgcacttgaatggtcacattgctggtttagaacctatgaatttcataacatttgcatcaccacatttgggttcaagtggaaacaaacagctaccttttttatgtggccttcctttccttgagcgaagagcttcagaagctgcgcatttgattgttgggagaactggaaagcatttattccttacagacaatgatgatggtagacgcccacttctccttcgaatggttgatgactctgatgatttacagttcagatcggcgttgcgttctttcaaacggcgcgtagcatatgctaatgctaattttgaccatatggttggatggagaacatcatcaatccgacgtcagcatgagttgccaaaacatcgtcttcttgttcgtgatgaaaagtatccacatattgtttatgttgaaaaggaagttacagacaacaatgaaacgaaggcccatgctgatcattatgatccagaagaggagatgataagaggccttacgcaagttccgtgggaacgtgttgatgtgagcttccagaaaagcacccaaagattagttgcgcataacacaattcagaataatcgactattcggccaatgtcaggtgaaaagctattggctaaactcggatggagcagacgtgatcaaccacatgatggacaatttcatcgtctagtccatggaggcatgaagcctacgttgtgtcgatggaggttcagtctacgctgtgggtttgacgaatgtccgtcgaaatttgttgatcagtgaccattcaattttgcctcggccaatttttccttctaggttgcagtttcccatcccaggaaatgtggttgattctttaggcccgtttgctgcaggcgcagagcagagccccgccctcgatgcttatcatcctgcaccatcagcaaggctagttcgttcaactgtatcataatctgtcccctcctttgtatacttgtattccgcaactaagctagtaaatagatgttgctggaaatagaattcttctatctggttcaattggagttgaagttcgaactgaaacttgccatattcttgtgatccatcgacgtgcttattgggcacggtacggtacttcaatcaagctgtttttttaggaacttgaagtttttttttttgggaattgtatggataacaggatcgctcttcagagagctcctgtcgttcttaaagagaagctatattctatgttgaaagtaattcttgcgattttttttttgtttttgaaaatgtattcttgcgatttcaatagactctaggtataacgtgattgtggcgtgtggcgtggagcgaatgaggagcgttttttcagctcgtagtcttctaattcatttcaagcaatcattgataggataagtacagaatcatttctcagaaaataactacttgttagagcagcttctggattagtatagaagctgttctaagagctataccaaataaataggcacgaggcttctcgca

SEQ ID NO: 219606 - DNA, 1864 bp, Zea Mays
gtgaactccctcaccgtgctatatacataaatgtcagagatatgaagatgcatttaatagatttgtcgatgagataaacacccttgcagcttatcaatggtgggaaggatctatttacagtattctttgtatacttgcgtaccccgtggcttggtcatggcagcagtggcgtaggagaaagaaattacagagacttcgtgaatttgttcgctctgaatatgatcattcatgcttacggtcttgccgttcacgtgcactctatgaaggcctcaaggtgactgcaaccccagatttaatgctagggtatttagatttcttccttgggggagatgaaaagaggcctgatcttccacctcgtcttcgtcaaaggtttccaatgtctcttatctttggaggcgatggaagttacatgactccgtttttacttaatagtgatagtgtgcttactagtcttatgagccaggctgttccctcatggatatggcaccgtcttgtagctggattgaatgcacagctgcgtttggttcgctgtggaaatctgaaagtaacgtgtcttccagtcatcaactggcttgaaactcacgcgaatccttctttagctgagaatggtatccgcgttgatcttgcctggtttcaagctacagcactagggtactgccaatttggtcttcttgtttatgctgttgaaggagatgctgcacttactgaacctgatgggagccctagaataaaaacagagcaacagacaccaacacaaaacatgcttgttgagactcaactcagtcagtccaggattaaggatgctctaatgcgcagaaggatcactggtggagttctcgatagtaatagcttaaggacgctaaacgacaggagagatttattttacccattttctcttatcttgcacaattcgaaaccagttgggcaccaggatcttgttggtctggtaatctcaatactgcttcttgcagatttcagcttagttttgcttacttttctccagctgtattcgtattctatggtcgatgttctcttggttttgttcattctacctcttgggattttgtcgccttttcctgctggtataaatgctctatttagtcatggaccgaggcgatcagcaggccttgctcgtgtatatgcattgtggaacataacttcactggtcaatgtcgttgtggctttcatatgtggttttgtacattataagtcatcaaccaaaacacacccaagcgtgcagccctggaacctgggaacggatgaaagcagttggtggctcttcccaactggactcatggtgttgaaatgcattcaagcaaggcttgttgattggcacgttgctaatttagagattcaagaccgtgcggtatatagcaacgacccaaacatcttttggcagtcatgacacctggtgtaactgaggtccttctggaaagctttttacaactcgattttttgtgagttgataaaaggaaagagtgcgggcagcaaggcctttctttattgaccagaccaaagaagcagctacagaggttatatagacgcatacttccgcatcccccgctgataatgtgcagttgcaaccggtgttctgttgtatatataaaaggtgttcttgatccattctttgtaggatttagacaccatagagtttataaacaatgtcaaaagctaacctaagagagacatcggagggatgtggatttgttgttctattgctaccgtgccctggcccttgatgtttgttgagatgggcagaggggggcaactaaaagtcagggagacgcaaaagcctcttgtatgtgatcagatgggtaaaacaagttattatattattaacatgctccagggttttcactaacag

SEQ ID NO: 219607 - DNA, 2195 bp, Zea Mays
gggaacatacaaaaatgttactggatcttctaaatctttatgctttccatgccctcctggtgaactccctcaccgtgctatatacataaatgtcagaggaggtgctgctgaaactccatgtccctacagatgcatgtctgacagatatcgcatgcctcactgttatacagctctggaggagttaatatatacttttgggggaccttggctatttggtctttttctttcaggcctccttatcttgttagctcttgttttaagtgttgctcgtatgaaatttgttggcactgatgagttacctgggccagcaccaactcagcaagggtcccaaattgatcattcctttcccttcctagaatcactaaatgagatatgaagatgcatttaatagatttgtcgatgagataaacacccttgcagcttatcaatggtgggaaggatctatttacagtattctttgtatacttgcgtaccccgtggcttggtcatggcagcagtggcgtaggagaaagaaattacagagacttcgtgaatttgttcgctctgaatatgatcattcatgcttacggtcttgccgttcacgtgcactctatgaaggcctcaaggtgactgcaaccccagatttaatgctagggtatttagatttcttccttgggggagatgaaaagaggcctgatcttccacctcgtcttcgtcaaaggtttccaatgtctcttatctttggaggcgatggaagttacatgactccgtttttacttaatagtgatagtgtgcttactagtcttatgagccaggctgttccctcatggatatggcaccgtcttgtagctggattgaatgcacagctgcgtttggttcgctgtggaaatctgaaagtaacgtgtcttccagtcatcaactggcttgaaactcacgcgaatccttctttagctgagaatggtatccgcgttgatcttgcctggtttcaagctacagcactagggtactgccaatttggtcttcttgtttatgctgttgaaggagatgctgcacttactgaacctgatgggagccctagaataaaaacagagcaacagacaccaacacaaaacatgcttgttgagactcaactcagtcagtccaggattaaggatgctctaatgcgcagaaggatcactggtggagttctcgatagtaatagcttaaggacgctaaacgacaggagagatttattttacccattttctcttatcttgcacaattcgaaaccagttgggcaccaggatcttgttggtctggtaatctcaatactgcttcttgcagatttcagcttagttttgcttacttttctccagctgtattcgtattctatggtcgatgttctcttggttttgttcattctacctcttgggattttgtcgccttttcctgctggtataaatgctctatttagtcatggaccgaggcgatcagcaggccttgctcgtgtatatgcattgtggaacataacttcactggtcaatgtcgttgtggctttcatatgtggttttgtacattataagtcatcaaccaaaacacacccaagcgtgcagccctggaacctgggaacggatgaaagcagttggtggctcttcccaactggactcatggtgttgaaatgcattcaagcaaggcttgttgattggcacgttgctaatttagagattcaagaccgtgcggtatatagcaacgacccaaacatcttttggcagtcatgacacctggtgtaactgaggtccttctggaaagctttttacaactcgattttttgtgagttgataaaaggaaagagtgcgggcagcaaggcctttctttattgaccagaccaaagaagcagctacagaggttatatagacgcatacttccgcatcccccgctgataatgtgcagttgcaaccggtgttctgttgtatatataaaaggtgttcttgatccattctttgtaggatttagacaccatagagtttataaacaatgtcaaaagctaacctaagagagacatcggagggatgtggatttgttgttctattgctaccgtgccctggcccttgatgtttgttgagatgggcagaggggggcaactaaaagtcagggagacgcaaaagcctcttgtatgtgatcagatgggtaaaacaagttattatattattaacatgctccagggttttcactaacag

SEQ ID NO: 219608 - DNA, 1540 bp, Zea Mays
ccccttcgtacttgctcccagccaaatcattcacgtatccatcttcaagccagccgtctccttatccctgcgatgccgctcacctgggctcatcttccagccgccctccgcccagcagcagagcacaccatcctctcaactcggatccccaagccctcgcctccagctcttgccacggcatccatcccctgttcggacctccacccggccgcgtcctcgccggtggccagcgccgctgcatcgcccttcctagcgtcggccttggcaccgcttccccgagcgccccagtcgagctcgcccatcctctgctctagccctttctccacgccgtcgctgagctcgcccctcccctcagccatggacacgacgacctgcagcccttcttggtggccaagcccatcttcctgctcgcgccccctctttttccacctctgcgcgtatcagctcgtccaacccccatggtgtttcctccctctcggctcccttgctccctccccatggcgttccccctggatgttggtgatctgttccccacggtgcaggcaaatgttctttccctccctgcagcagcaccttggtggttgtcgagcagcacgtcgcgcttgcgcagcctcggtcacgacgttgttcaccccggtgtcatgtgttcgccgaaatgcctaaacatgtagtctgtcgtcgtcgtatccacagtcaattttagtcatggcttccatttgttagtaaatctgcacttttaggagactcggagttcgtcctagatgcaaaagtaccttgctggttatggagaggtcagctgaaggatcaggtggtgttttggaggtagatttaaacattttggaggtggattgaagctttgactggactgaagtttattgcatctggagaacatcatttggctctacctctattttattggggaacttggtacagccatccatggtatcagaatatgacctgggaggagaaggggacctgttcaaagctccagaagccatcatcgaggaaccgctgctcctgaactgtctgtctgattctgttcatttgttgctgtgtaggctgggcttgtgccaagcttgaatcctcttgtgaaggagtttctcaatgctgctgatgacaagcggaaggaagtcctctctaaaatagaagaggatgttgctaagctcagcggttctgcagccaactaagaagctacaagtgaatgccgaggagagcagcgatgacttggctaacccaccgaaggtagaggagaagcttggtgctgtccctcatggcctgtccaccgactctgaggttgcccagagggaagccgagtctatctctaggaagactctcaggagctcagccgagaagtttgagttccaagctgaggtttccagactcatggacatcatcatcaactcactctacagcaacaaggatatcttcctgagggagctcatatctaatgcctctgatgtatgtactacatactgacccctgtgtttgttctgcattgtggatgctccaaattaactgggtgttctacatgtctgtaggc

SEQ ID NO: 219609 - DNA, 1477 bp, Zea Mays
gccagccgtctccttatccctgcgatgccgctcacctgggctcatcttccagccgccctccgcccagcagcagagcacaccatcctctcaactcggatccccaagccctcgcctccagctcttgccacggcatccatcccctgttcggacctccacccggccgcgtcctcgccggtggccagcgccgctgcatcgcccttcctagcgtcggccttggcaccgcttccccgagcgccccagtcgagctcgcccatcctctgctctagccctttctccacgccgtcgctgagctcgcccctcccctcagccatggacacgacgacctgcagcccttcttggtggccaagcccatcttcctgctcgcgccccctctttttccacctctgcgcgtatcagctcgtccaacccccatggtgtttcctccctctcggctcccttgctccctccccatggcgttccccctggatgttggtgatctgttccccacggtgcaggcaaatgttctttccctccctgcagcagcaccttggtggttgtcgagcagcacgtcgcgcttgcgcagcctcggtcacgacgttgttcaccccggtgtcatgtgttcgccgaaatgcctaaacatgtagtctgtcgtcgtcgtatccacagtcaattttagtcatgtaaatctgcacttttaggagactcggagttcgtcctagatgcaaaagtaccttgctggttatggagaggtcagctgaaggatcaggtggtgttttggaggtagatttaaacattttggaggtggattgaagctttgactggactgaagtttattgcatctggagaacatcatttggctctacctctattttattggggaacttggtacagccatccatggtatcagaatatgacctgggaggagaaggggacctgttcaaagctccagaagccatcatcgaggaaccgctgctcctgaactgtctgtctgattctgttcatttgttgctgtgtaggctgggcttgtgccaagcttgaatcctcttgtgaaggagtttctcaatgctgctgatgacaagcggaaggaagtcctctctaaaatagaagaggatgttgctaagctcagcggttctgcagccaactaagaagctacaagtgaatgccgaggagagcagcgatgacttggctaacccaccgaaggtagaggagaagcttggtgctgtccctcatggcctgtccaccgactctgaggttgcccagagggaagccgagtctatctctaggaagactctcaggagctcagccgagaagtttgagttccaagctgaggtttccagactcatggacatcatcatcaactcactctacagcaacaaggatatcttcctgagggagctcatatctaatgcctctgatgtatgtactacatactgacccctgtgtttgttctgcattgtggatgctccaaattaactgggtgttctacatgtctgtaggc

SEQ ID NO: 219610 - DNA, 656 bp, Zea Mays
gcttgggcttgtcatcgtggattatgtgttgggggggaacttggtacagccatccatggtatcagaatatgacctgggaggagaaggggacctgttcaaagctccagaagccatcatcgaggaaccgctgctcctgaactgtctgtctgattctgttcatttgttgctgtgtaggctgggcttgtgccaagcttgaatcctcttgtgaaggagtttctcaatgctgctgatgacaagcggaaggaagtcctctctaaaatagaagaggatgttgctaagctcagcggttctgcagccaactaagaagctacaagtgaatgccgaggagagcagcgatgacttggctaacccaccgaaggtagaggagaagcttggtgctgtccctcatggcctgtccaccgactctgaggttgcccagagggaagccgagtctatctctaggaagactctcaggagctcagccgagaagtttgagttccaagctgaggtttccagactcatggacatcatcatcaactcactctacagcaacaaggatatcttcctgagggagctcatatctaatgcctctgatgtatgtactacatactgacccctgtgtttgttctgcattgtggatgctccaaattaactgggtgttctacatgtctgtaggc

SEQ ID NO: 219611 - DNA, 667 bp, Zea Mays
gcaactcccgctattgtaccagccctgcttcaaacccgtgacatggggaacttggtacagccatccatggtatcagaatatgacctgggaggagaaggggacctgttcaaagctccagaagccatcatcgaggaaccgctgctcctgaactgtctgtctgattctgttcatttgttgctgtgtaggctgggcttgtgccaagcttgaatcctcttgtgaaggagtttctcaatgctgctgatgacaagcggaaggaagtcctctctaaaatagaagaggatgttgctaagctcagcggttctgcagccaactaagaagctacaagtgaatgccgaggagagcagcgatgacttggctaacccaccgaaggtagaggagaagcttggtgctgtccctcatggcctgtccaccgactctgaggttgcccagagggaagccgagtctatctctaggaagactctcaggagctcagccgagaagtttgagttccaagctgaggtttccagactcatggacatcatcatcaactcactctacagcaacaaggatatcttcctgagggagctcatatctaatgcctctgatgtatgtactacatactgacccctgtgtttgttctgcattgtggatgctccaaattaactgggtgttctacatgtctgtaggc

SEQ ID NO: 219612 - DNA, 705 bp, Zea Mays
ccacatcgagccaatgaatctagccgtccgctccctgttgcctcccaagccaaccatatccactctcggcgccgccgcgcatctctcccctcttcttgcccttccttccccccaggccccaacccacgcagcctcactaggggtctaccggcggcggcgacgagatggtgcagcgcctcacctaccgaaagcgtcacagctacgcgacaaaatccaatcagacccgggtcgtgaagaccccaggttcgccccatctggtgggaagcttgtgtaccaatacaccaagaagagggcgagcggtcccaagtgccccgtcaccgggaagaagatccaggggaattatccgtgctttcttggttgaggagcagaagattgtcaagaaggtcctgaaaatacagaaaaccaaggacaagacagctgcaaagtagagctccaggaatggaatggaagcctagacactgcgagaagtaattttggtggatggaaaatctgtttgccttgtgtcgagcatttagcctgtgagacatgcctgttgaagtgtttgagtttagagactggaatccctttctcctttgaattgttgctatgtcgggacatctgctcccccagttgctttgttatgaattgagatcatatctgggtaagataatcttgtctaacaccttggcttgtagcatctttttcgtccatgttgcttttcatttc

SEQ ID NO: 219613 - DNA, 1108 bp, Zea Mays
  misc_feature (1)..(2): n is a, c, g, or t
nntataaataaataacatgtcccgtttgtatctgttgacttttttctccaattacatttcaatagtttttgggaggaatgtatctcgataggatatgttaaatcagtatctgtactcagctggatgaatatgtcccattactcagctggttgaatatgtctcgaagcacatagatttgggtttgtggacccattctacactagatatatctgggggttactctgcctttacactactatttcttaatagagatagtgctaagacctgtggtgttgccttatctgtttaaaatggcagattcttaaatcttcggtgtgctatgaacttctgcagtatgacattataatgattcccttttagttaaaattccacgacaataatattcgctaagaatttcttggcagcgatggaaatatttatttgtaacatgccaatcaaaagctatggtattgttttcattttattgggttatcttttgcttatttagatcaaggcgatcatggaaaccaaatgttcaggagaagcgtcttttcagctatgttcatgatcagcacattagagtcaaggttaccacacacgcacttcgatgtattgacaaagctggtgggatagatgaatacctcctgaagacaccttacaataaaatggataccgagatggggatagtgtggaaagcaaatatcgaaaagatgtattcagatttggctgaaatagaagtaggcttcttccctcccgaggttgaggctaagattaaaaagggcttagacgaggttcgagctgcgaagagggactttcgcagggaaggaagacgagctttggcaaagcaaagccagctagaagcaagtagtgttggtgatgaccaaacgagtgaagtcatagatacaaagcaagtatttgccgctaaagtctgagcctaaacctatgtgcctgtattgaatgatcaaaggaggcggcaaatcattggatgcacctgggcaaataatggaaggcttgctacttgcgcactaactgtacccccttttcgggagcagcagtgcgcggaacttccaatttgacgccttccgatatattacgtggatcacttgttaaggctgctggaaaatgtttc

SEQ ID NO: 219614 - DNA, 1171 bp, Zea Mays
aaaaatccccaaatctctccactcccagccgctgcacctggcttcttcgccactctctcctctcctcgttcactctgccaggtggccggccgcccctgctcccatctcccacagccgccgccgccctcagctcctcagccacctcccatggcctcgtctccctgctgcagcgaagccgaccaccgtttcctgcagcctcgatagctcccccccccccccccccccccatgccgtccctgctcacctcaccttcgtcggccgtccttggacgccgtgctcggcgcccgagctccctacgccggccaccatccttcccatggcaggagctccgatcggcccctgctgaccttggcactcggcgtggctccaagcagcgccttctcccccaggaccggctcaccgtcagccgcgagctcctctccctcacgtcccctacagacaagcagtgtcgccggtgagcagcagccacagcaactccgcgctccgccggcttgcggttttgtcaagcccagtagacagcagcaaccccgatgtcttcacgtcgtgcgctccaccccgatttgcgcagcccctgcgcgacgtcgtccacccgctagatgttgacgctgtgccacgcgcaccaagcgttcgacgaaatgcccaaccaacggacagcacgcgggtctcgaacccgattcggctaggttgttcgatttgtattttgtggtctactctaattacgctttggtcgatgtcgcatatatatgtgtgtgaatatgtttgtatggattcgagttagggaaggagaagaaagcgaagtagaaaagaacccggatgtttcttaggttttcagaggattgtggttgtattggatgtgtgttgaaaatgcctcctcgcaaagagtgtatggtcccatgcatgcgatgtgtgatttttgttggtgaatgcgaaataagtttagtgtttcaaaacggttaattgatagtctctgttagtgctattgtgttgatttttgttgtgtggcgaattgatgcttcgttttaacaagtcactacattttatatctagcgggtgattaaatgccacatcggttagaggttctgtatgagtattatcgttgcctaaaatcatttgggagcgagtagtactgataggtatgtttccgtggaaatcgaagaatgatccgatgaac

SEQ ID NO: 219615 - DNA, 1283 bp, Zea Mays
cttgaattgatgtttggagcgtaattatcggttcttctatatgtttgtattctcgacgacattgctctgcctctatgtatttgccttctgttgggtgtatgtgatcaagattagagctgctgagcaatcgtcagtttggaaggccttgctgaagacaccagcatcagttgctctgattatctactgttttctctgtgtatggtttgtgggtggtttatctgtcttccatttatacctgatgagcactaaccagacaacatatgagaatttcagatatcgctatgatcggcgcgataacccatataacaaaggtgttctgaacaattttctagagatattctgcactgctatccccccttcgaagaacaatttccgggcaagggtgacagcggggcaagggctgcagcaaacgcgctcacagtccaggggtttcatgagccccagcatgggcaagcccattggagatcttgaaatggacaggaagccagtagcaccttgggacgagccaaggacggcggctgatatcagggacttggaagcagggcttggggtcatgttcgatgagaaagagggcagggtagctcatgcatccccagatctgagcagagaccttccagcagagttcgtggaaggccgatctggtatgcactcgaggcagtcaagctgggttcagagaggagacgcaatcgaagcgtcggcggtgcaaatggctaatgcgcgcaccacggaagctagcaacaatgttgcctggagcggtacacattaacccaaaaaatgataaaaagaaaaggaggaactatggtgtgttggcgatgtctccaagtgaacccccgtgtgtttgttgccacgtgtgctgctccgggtaaggccctggatcattctgtaatgtataaatcctaagcacaagcttgctgctattgtttcatccctggtagcgtaccaggtccctgcggctgctgctgctgtcttgtgtgtgtttgtttgggtgacaaattgatgaagtggccgacgagcttaagctcccgccaggttcggatgatgtatacaaaattgttgtcaggttccaacggatgctgtgcttggtttgccacaccagcgctgcgtgctttgggtactcgcaagtggcatctgggcaccccgctcccatgcaaacttgttcttggtgtaagcctggaaatctgctctgtatggttggcattgttgtatttgcagatgtggacatggtacttgctagtgtagaagaatgacattgctgagaaattggcttggaactttttgcagga

SEQ ID NO: 219616 - DNA, 1762 bp, Zea Mays
aggccttccaaatatcctcccaaggcccaaagaggatagaaccttgaaaggaattcttcttgcagggaagattcatatttgggcctgatgtgagatctgtgtttctcactatgatcctcatcatcgcaccagtggttgtcttctgtctgtttgttgcaaggcatctcataaatgatttccccgatagctggggaatctcagtgatggtagtagtggttgtcttcactatttatagatcctggtataataccccggaattctcatcctcctgaacctgaatccattgatgggatcaacgacacgggtgttcagactccacaacaatttcgtttgcctcgcacaaaggaagtacttgtaaatgggatcagtgtacgggtcaaatactgtgatacttgcatgctgtaccgaccacctcgatgctcacactgttccatttgcaataactgtgtggaacggtttgatcatcactgtccatgggtcggccagtgcataggactgcgtaattatcggttcttctatatgtttgtattctcgacgacattgctctgcctctatgtatttgccttctgttgggtgtatgtgatcaagattagagctgctgagcaatcgtcagtttggaaggccttgctgaagacaccagcatcagttgctctgattatctactgttttctctgtgtatggtttgtgggtggtttatctgtcttccatttatacctgatgagcactaaccagacaacatatgagaatttcagatatcgctatgatcggcgcgataacccatataacaaaggtgttctgaacaattttctagagatattctgcactgctatccccccttcgaagaacaatttccgggcaagggtgacagcggggcaagggctgcagcaaacgcgctcacagtccaggggtttcatgagccccagcatgggcaagcccattggagatcttgaaatggacaggaagccagtagcaccttgggacgagccaaggacggcggctgatatcagggacttggaagcagggcttggggtcatgttcgatgagaaagagggcagggtagctcatgcatccccagatctgagcagagaccttccagcagagttcgtggaaggccgatctggtatgcactcgaggcagtcaagctgggttcagagaggagacgcaatcgaagcgtcggcggtgcaaatggctaatgcgcgcaccacggaagctagcaacaatgttgcctggagcggtacacattaacccaaaaaatgataaaaagaaaaggaggaactatggtgtgttggcgatgtctccaagtgaacccccgtgtgtttgttgccacgtgtgctgctccgggtaaggccctggatcattctgtaatgtataaatcctaagcacaagcttgctgctattgtttcatccctggtagcgtaccaggtccctgcggctgctgctgctgtcttgtgtgtgtttgtttgggtgacaaattgatgaagtggccgacgagcttaagctcccgccaggttcggatgatgtatacaaaattgttgtcaggttccaacggatgctgtgcttggtttgccacaccagcgctgcgtgctttgggtactcgcaagtggcatctgggcaccccgctcccatgcaaacttgttcttggtgtaagcctggaaatctgctctgtatggttggcattgttgtatttgcagatgtggacatggtacttgctagtgtagaagaatgacattgctgagaaattggcttggaactttttgcagga

SEQ ID NO: 219617 - DNA, 2020 bp, Zea Mays
tgactttagagccttgctctaccaatccaggaaacctcagatggctggggagagagtgcagctagtccctagtcccattcgctgaagtaggaaataacaaaattgccttgcaaagacacaattaatgagcagatgattgatggattcatcctcttgatgacataacatgcataggtccaaatatgcgccaccaactacataaaaaaggagcatttgctaggcgcccaggccttccaaatatcctcccaaggcccaaagaggatagaaccttgaaaggaattcttcttgcagggaagattcatatttgggcctgatgtgagatctgtgtttctcactatgatcctcatcatcgcaccagtggttgtcttctgtctgtttgttgcaaggcatctcataaatgatttccccgatagctggggaatctcagtgatggtagtagtggttgtcttcactatttatgatttgacgttgcttctttgtacctctggtagagatcctggtataataccccggaattctcatcctcctgaacctgaatccattgatgggatcaacgacacgggtgttcagactccacaacaatttcgtttgcctcgcacaaaggaagtacttgtaaatgggatcagtgtacgggtcaaatactgtgatacttgcatgctgtaccgaccacctcgatgctcacactgttccatttgcaataactgtgtggaacggtttgatcatcactgtccatgggtcggccagtgcataggactgcgtaattatcggttcttctatatgtttgtattctcgacgacattgctctgcctctatgtatttgccttctgttgggtgtatgtgatcaagattagagctgctgagcaatcgtcagtttggaaggccttgctgaagacaccagcatcagttgctctgattatctactgttttctctgtgtatggtttgtgggtggtttatctgtcttccatttatacctgatgagcactaaccagacaacatatgagaatttcagatatcgctatgatcggcgcgataacccatataacaaaggtgttctgaacaattttctagagatattctgcactgctatccccccttcgaagaacaatttccgggcaagggtgacagcggggcaagggctgcagcaaacgcgctcacagtccaggggtttcatgagccccagcatgggcaagcccattggagatcttgaaatggacaggaagccagtagcaccttgggacgagccaaggacggcggctgatatcagggacttggaagcagggcttggggtcatgttcgatgagaaagagggcagggtagctcatgcatccccagatctgagcagagaccttccagcagagttcgtggaaggccgatctggtatgcactcgaggcagtcaagctgggttcagagaggagacgcaatcgaagcgtcggcggtgcaaatggctaatgcgcgcaccacggaagctagcaacaatgttgcctggagcggtacacattaacccaaaaaatgataaaaagaaaaggaggaactatggtgtgttggcgatgtctccaagtgaacccccgtgtgtttgttgccacgtgtgctgctccgggtaaggccctggatcattctgtaatgtataaatcctaagcacaagcttgctgctattgtttcatccctggtagcgtaccaggtccctgcggctgctgctgctgtcttgtgtgtgtttgtttgggtgacaaattgatgaagtggccgacgagcttaagctcccgccaggttcggatgatgtatacaaaattgttgtcaggttccaacggatgctgtgcttggtttgccacaccagcgctgcgtgctttgggtactcgcaagtggcatctgggcaccccgctcccatgcaaacttgttcttggtgtaagcctggaaatctgctctgtatggttggcattgttgtatttgcagatgtggacatggtacttgctagtgtagaagaatgacattgctgagaaattggcttggaactttttgcagga

SEQ ID NO: 219618 - DNA, 1864 bp, Zea Mays
caggcgctgaggcgcagacgagccgagccaagccgcgagacgggacacacacgagcgcacgtcccgaggccaactcgagagcgtggagagtcgagagcccaccacccgcgacctaacccggaattcttcttgcagggaagattcatatttgggcctgatgtgagatctgtgtttctcactatgatcctcatcatcgcaccagtggttgtcttctgtctgtttgttgcaaggcatctcataaatgatttccccgatagctggggaatctcagtgatggtagtagtggttgtcttcactatttatgatttgacgttgcttctttgtacctctggtagagatcctggtataataccccggaattctcatcctcctgaacctgaatccattgatgggatcaacgacacgggtgttcagactccacaacaatttcgtttgcctcgcacaaaggaagtacttgtaaatgggatcagtgtacgggtcaaatactgtgatacttgcatgctgtaccgaccacctcgatgctcacactgttccatttgcaataactgtgtggaacggtttgatcatcactgtccatgggtcggccagtgcataggactgcgtaattatcggttcttctatatgtttgtattctcgacgacattgctctgcctctatgtatttgccttctgttgggtgtatgtgatcaagattagagctgctgagcaatcgtcagtttggaaggccttgctgaagacaccagcatcagttgctctgattatctactgttttctctgtgtatggtttgtgggtggtttatctgtcttccatttatacctgatgagcactaaccagacaacatatgagaatttcagatatcgctatgatcggcgcgataacccatataacaaaggtgttctgaacaattttctagagatattctgcactgctatccccccttcgaagaacaatttccgggcaagggtgacagcggggcaagggctgcagcaaacgcgctcacagtccaggggtttcatgagccccagcatgggcaagcccattggagatcttgaaatggacaggaagccagtagcaccttgggacgagccaaggacggcggctgatatcagggacttggaagcagggcttggggtcatgttcgatgagaaagagggcagggtagctcatgcatccccagatctgagcagagaccttccagcagagttcgtggaaggccgatctggtatgcactcgaggcagtcaagctgggttcagagaggagacgcaatcgaagcgtcggcggtgcaaatggctaatgcgcgcaccacggaagctagcaacaatgttgcctggagcggtacacattaacccaaaaaatgataaaaagaaaaggaggaactatggtgtgttggcgatgtctccaagtgaacccccgtgtgtttgttgccacgtgtgctgctccgggtaaggccctggatcattctgtaatgtataaatcctaagcacaagcttgctgctattgtttcatccctggtagcgtaccaggtccctgcggctgctgctgctgtcttgtgtgtgtttgtttgggtgacaaattgatgaagtggccgacgagcttaagctcccgccaggttcggatgatgtatacaaaattgttgtcaggttccaacggatgctgtgcttggtttgccacaccagcgctgcgtgctttgggtactcgcaagtggcatctgggcaccccgctcccatgcaaacttgttcttggtgtaagcctggaaatctgctctgtatggttggcattgttgtatttgcagatgtggacatggtacttgctagtgtagaagaatgacattgctgagaaattggcttggaactttttgcagga

SEQ ID NO: 219619 - DNA, 1661 bp, Zea Mays
cttccgctcccctcctgcagtggagtcctcctcctttcccacttgccctgccttccctcgatcgaggcccttccttgttcgtcgaggagagatcgaaatcgagatcgggatcgggagatccaaggaggcgacgcggaggaaggattcttgaggtaaccatctccagtaatccatctcatccaccatggcggtggcggcgccggcctcggacgccaagccgcgcctcaacgtgccaccgtccatggcatccgcgctccgcctcgatcccgtggggctgggggcgggaccctctatgccgtccccctcccgccgactcgccgagcctcccaagacgccctccccatccaagaccacctacagcgaccgtttcatcccctgccgctcctcctcccgcctccagaacttcgcgctaatcgactcccctctctccccagccaaggacgacacgccctactcccgcctcctccgcgccgagctctttggccccgattcacccaaacccaccaccgccacctccgcagcctccgcctcgcccaacaccaacctcttccgcttcaagaaagaccactccgctcccacctcacccttcgctaaagctgccgccgcgcaccatgactgcaccgcgggatccggagacgcgccgtcgccgcagaagccacccaggaaggtccccaaaacgccgcataaggtcctggacgcgccctccctgcaggacgacttctatctcaacctcgtcgactggtcctcgcagaacgtgctcgccgtcggcctcggcacctgcgtctacctctggtccgcgtccaatagcaaggtcaccaagctctgcgatttggggcctagggacagcgtatgcgccgtgcattggtcacgggaaggctcttatctttccattggcaccggccttggagatgtccagatttgggatagttctcgctgtaagcggattagaaatatgggaggtcaccaaacaaggactggggtattagcatggagctcatgcatcttgtcgtcgggtagcagggacaagaacatactgcagcatgacatccgtgtccccaatgactatatcagcaagttttctggtcatagatcagaggtttgcaaccttgcctggtgcaaaaatgtgaatgagcttgtgagcacacatggatattcccaaaatcagatcatggtgtggaaatacccatccatgtcaaaggttgcaactctaactggacatacgatgcgtgtgctttacctcgcgtcgtcgcctgatggacagaccatagtaacaggggcaggtgacgaaactctacggttctggaacatatttccatcagttagaacacagactcctgtgcgtgatattgggctctcgtcattctcaagaagccacatccggtgaggaggcggcagggcctggagggaccagatcggaggcagacgaaatgttgtactgatactgagatgttggtttattgagtgattcttttctgtatattgtgaggcccggtaatttttcattgattctttttgttgtttgtacgtgtaaaagacaagaactaaaagtgtaagcgacatttaacttcaccagttggattggtttgttactcattaactttacctaggccattctcaatgaaataaataatcaatactgtcatatcatcaaaggtgagtga

SEQ ID NO: 219620 - DNA, 153 bp, Zea Mays
gataacgctgccttcccgccgttatcctttcccacgactcctctcccccgcgtgagaacatgccccgcgtccttgtccaggcaccattgccgccggccgctgcctcccttgcaccatcggcctctacagaggccacatcttctccagtcgtgg

SEQ ID NO: 219621 - DNA, 2724 bp, Zea Mays
tattgattaacaatcctcgcatgtcgtgtctttttaagattagctgtttaaatgtggcaagtgctacacattgtttataaatatactaggtatatgctcgtacgttgctacgaaatcaatatgataaaatacattgatatacaatggctcacagtctagcataggtaggaataattgtataaagcagctacgaccattaaacaaagatgggatggacaataatacatgtagtagagaccattcctttcatcagttgcaggctattaggcttgtcattgcgcttcctcggtccatgcgttaatcctgatcacaatgccatttcagcttgtagtgcagccagctcatcgtatttagctataactttctgtgaagtagggcaagctagttgcttgtttcctgggacatgcactggatgcaccgaaagagctgcaacaggctctagaagcttagattccaactcttctccttccagctcttcaggttttgcatctagttcatccttgcaaaatatttccacgtcgatctggttgtctgtgtgaacgatgatcttcaggacaaaacagtgtgtgatggcgcttttgcaccactatgaatgtaactagaggaaggtagccctcttccaagctggcacacgcctaagtacaaacacaaacaataaattatgtaaacacagttaggagaatacatcaaaagagaataatattgcgaagaaaaaacctttctaattgcatccacttcataatgcaagaaccggctaaactgctcctcactggcatgtctctgcaaatcaaggaaacaagtaaagtaactccaggattcttctccaagtatacaaggtgtagctgtttagctgttgaaatatgtactaacataaagaaaactggcaggtctttttctttacatgcaaggaaaagagatttaagtttagacaacaacaaaattcattcaaacagacaattacgaacccatagaaaattttcctatttggtttgcggctcccatttgccttatagaatggcacgagtagttccctgaagcaaaaatatgacatttaaaaaaaggacaaatcatttatctgaagaactaagttagacaactaagatgtttagcatgcctgatcattccatagggaacaaatcccttttgtggatccttcacttgtgtgaaaatatcagctatgatattttccctatgaccatgagaagacaccaagcacctatactttgaaaattctagccaatccatttatgcaacaactaatcataaacttttacatgtccaattagaaaccagaaacacacagagatctctctccaataggccatgtcaataagaagtcaaggtgaaacaacaaaatgtttctttaaaattctgacaaggtggagcacttgacatgtagttttgcagaaagttgtgaggcctcaacctcactattgagctggcttcgaccgacggcgcgacgcgacgtgtcacagacttcacccatcatattctcaatgcaagatcagacaaaatttgcagcctaggaacacctaccatgaagcaaaactccctagttctataggacaaaacactactcgcaactaattagaacttaattaatactcattccttcctctataaaaaggccacctgcatgtatccatattcagctccatgaacaatcctaaatttcataaaaatctactgttgtttgattctacacatgtgtatttcatttccagaggcaggaaatctccatggatcccacaccaaccgcagaaaacaccactgtgctggggaagcaacgaacccaatctcctgcgttgagaaatctagttaccattcaaaatataactgacccgatgagtggccaagccacgaactacaatgttgcaatgttcttcttcgcatgcacactgaatagatggttttccaagctccctttggccatgaactcatacacgagaagtagttcacagtcctcccatccaagagcttcacaaggttcagatgggagagtcttcctagaaaatttatctccgacggcgtggatggcgctcaccttgattacctcaccgaagggaagcttcctcccatcccatgtcacggccgcgacagcaggggccaacaacctgcagcagttctttctagctaccccgccaacaccttacgcttgtgcttcttcttcaagctgtccacccacacatccgtcgccccctccaccgaccagcccgacctcatcccttgcgctgatcctccgcttcccttgccctgggtcccttgcccgcctctgtgacgccaggctccactgcgtgcggatgggggttgagtgcgagcggtgaggggcggctacgactggctgtggctcgcatagactaaggagacaacagagaggaaatcagggggcgacgcatgcaagcgggcgtatccaaatccttgatgcaacgctaggcgctgatgtcagcgtttccaaattggggaacaagggttgcgtctcgtgcatgtcgccggcgttgatggaaggtgggcgggtggcgatggctcgggttgtcggcatggcgttgatggcggcatggtggcgcagcgcgtggggaaggggatcgcctggggaagggcagcgttgaaggcgggatggtggagcagggtgtggggaagggcggtgatggatcgggtggctcgagttgaggtgatggctctggtggcggagcgagtggggaggggatcgcgttggatgacattgac

SEQ ID NO: 219622 - DNA, 2506 bp, Zea Mays
cgtcactcccctccccttactcgcaaccgcgtcgtaaggcactccggcggcggcgatgattacgtcccccctcctcccgccgggtaagcagccatgtgatcccaccccgccgccgttttgtttctggcgcatgacgtgcgtgcggggcacgatcattggctacaagcgaccccagcagtgtccgactctagaccgaggtagaatgccttgctcacctcagccgttcgactgtgtggtgtgctggttgttggatatcataccagtttacatgtcagcttgaatgcttctctatcagtgacgcaaatactggcttgaatatctaacagtgttacatgatgcgagtgtttagatgtcaggttggacacacctctgtcagttttaatgcaagctagtggttgtgtcttgtatgttggtgatgcaaaccttcaagggctatctaatcaggatttgaagctgcggtattatgttgttctgtatttgatttgatgcttctgttgtttatgtctaagggttccatgccatttgggggaagctctccttttagcttcgaaatgcccgcaggttctctgcggggtgctcggatgttggggccctagagtaaatgcagtggtctcatagtacgaggctgtactttggctgatgggtctctcatcaatcgcttcctcacagccttgcctccaatgaccacaacattcattatttgtgtcttttaaatttgcgttctctcgcgtggcaaatgtttggagtttgagatagttctgtttgattattgtgtaattgtattgggccctgcattatatgcctttctatttaggtgattctgtatctatctttcgctaggttggtgaacagtgttagactatgttacagatttgaaaaaattattgacacgttgatttgggcaagcaaactgtattatatacctgtttgtcttgtttaaattctgctttactaggtagtcaatacactcatgctattatgttacagcggctaaggttgcctcggcacgtcaccatgtctgtctggtggagccggccaagtcgtcatttcttctgcatgtgtttttattgtttgatttggatctgttttctcttttgtgtcctatattttgattgccatcgtgtgttactgcttgattttttatctgttatctcttctgttgttcccctttctttctgtgatgcagaggaaagctaggttataagggcaatgatgatgcaaagtcatgcaccactctgaatgagggatttttctctctttgggctgacaagcaaactttctacccattgtttatctgagcctttacttacctgtgtgctttcttctgtctcctttttgtgtgctgcttaatgtgatacttagttcgttgagttttgtggagttagtgattcttgagaattggatgatgtgggtcgacagatccaactatgatgtgaactgaattttatttgaggtcaaatctaattgctgcttgtggttatcggggttacctttattctgttgttgcttttttttgatttgttgctttgaatcagttttgatgaatatggtttcagagtggtgaagccaatttgcagagcaaaggggccagataagtggcgatctttgcattgaaggttggcgacaacaaaaatgcagttctccgtgccgctcagattttcatctgttctgtgatggcctcgaacaagctgctacatcatctcttacctatgcatcctcccttgttaatgtggtccaaaccaacacttgcaagaactcccttgtttaagccaatggtagttgaaatgggccattgagggaggccagcattggtacacctgcaagaatggggatccaacagacatagctgcaatggcggtcactgttttcaagtcatctgattaatcacgattagtcgcgattaatcgtccaagtcggtttgaatcaatcatgattaatcgcccaaattgtccaactaaatgtgattaatcacgattaatcgtccaagtcggtcagttagaacgaccagcaagttgtccgacttgaaaacaatgatggaggctgacaggggtcccccaaagtagatgcagaagaaagcagctaaagaggcagttgttaatgttgtacataagaaaagaaagaggcaagccccttcatcatcatgtgtgaagaaaaacaagggatcagttacaaatacaacatcaactactactcctaatcctctgtctagcaagtataattttcaatgtgtccattcgttgtcgatacttggcaatgccagttatcataactgaactgagttttgtgtttctttatcacaatatatggaactggatccaatttcatcacctgttctcatccaagttgtgtaccttgccacatgttgtccagattgatggcttctacagaatcctcctttaaacactattcaatgggttagtaaagaaacccacgaaagaaattgcatattagtaagggagtttcacagcaaaacatagcttgcaacacaaatttgtgtgaattttct

SEQ ID NO: 219623 - DNA, 5967 bp, Zea Mays
cttcaatttcctactactagagagagacggcctcccttcctctcgcttcgcttacacttctcccctccccccaacccaaacccaacacaattcccccgtgttgcctacacgcactggccacgaccaaaccctaggcgccgccgcctccggggccctcagggctgtcatacggggaaggaggaggatatcggtgaggagagaaggggatttatgtcccagcgaggtgacaggggcgaggggcacgccaggagacccggccggtccagcagcttcggcggccaccgcggaggcggagtcggcggcgcgggcaagggcggcgcgggatcctcaggccagcctcctctttctaccaaccgcagctttaggaagcccggcaatggccacggcgggcagcagagggtggtgaaccagcccgacacaaccggtttccaacctgcccccgcgcctgccccccaccaaactcctgcgcgaccgccacctgcacctcagaatgcggctgtgcatgttcccatatccgcaccatggccgcaacctcaaggtccacaagtgtcatcttcatcagctgccagcgacaggccggctaatccgccattacctaaagctactcatgctgctccaagggctccaccaaaaagctctaacccaccccttcctcagggaggatcgaaaggggaaccaccaaaggggtttaactttcagtttggtagtataaatatgaatgggctgccgcaatttcctgccaggacaagctcagctcctccaaacttggatgaacaaaaacgtaatcaggtgcttgtggaggaacttaaggttacacctacccctgtgcaaccaactccaaaacagcagctgttgcagcagcatccgcatccgctgcagaagcaacagcatcagctgccgcagctgtcgcatcagccacagcagccacagcagcagtcaacaagaaaggaaactgttggttccagccaacctaactccatcaatccccatactacatcacaactgaaaagagatgtgcacccatctccgtcggtccccaatgttacatctgttagacctaccgttcaacaaatgcctggtgttcagatgccgatccccttccaccaccagccggcacaagtttccttgcagtttggtggccatggtgcacagctgcagccacaagttgtgcccagctcatttcaaatgtcaatgggattgacaggcagtagtacaccgcaagtcccacagcagctgtatgccccgactctgcagcatcatcaattgcaacagcaagcaatgatgcatcctggccagggtatgggttatgttccttcagttgctcaccaattcccacagttgggcagcattcctatgaacattgcatcgcaatatcctcagcaacagccaaacaaacctgctgctgcacgtaaggctattgtaaaaattactcatccagacacacatgaagagttgaagcttgataagaggatggactcttctgggcagagagctgcaccgagtattgcacaacaatctcagcctggtgttaattatgctcctcatttgggcttctttcatcagccaccgaattcctacaaccagtcaggaatgtattactctactacagctagtgtgaaccaggttgctactggatcatcgggtcctagatataattatcctgtcactcagtctgcgcaagcgatgacatatatcagtccatctgcagcgcctccggtatctggtcagtcacaatatacagttaagccgcaccctatggggttgctgtctgaaaaatcaggtactcatgtcacaataagtgctccaccagcaaaatctgatccacctaagttacatgctgctggggatgctgcgtcaagtctgaaaaaggataatgaagttgtttctgggatcactgttttaaataaaccaacccttgagagggagagtaacgatcctttagtcacagtgaagcattccactgtgataagcccgtccttgccaattcatggtgaaaaaccacaaactttggtgacatcgtcgcctgttgctaattcagtctcacctgtgactggagctgatgggaaaagcaaagaacccattcaaaggtctggatcatttaaagatagtaagaaaaatgtcactaaaaaggatgtcaggaattcatatgaaccaccaaatccaacttcatttgttgaggataaggttcaaactgtaaaggttggagatggcgatctccaggaaactaaaaagctgaacaatgagttggatttgaccaactcatcttcagctccaacggttccactggcagttagtacagagaatgccgacagcacagcagtaaccaatacaagctcaagaagaccatcttctgagggtactggtgagcctggagtggaaagcttcactgtttccgctgttgaatgtgacgaaagcaagaggactcacaaagttgtgaaagatcctagcaaggataatatttcttctgatgctaccaaacatgaattgcctaaggaatgtgcagtggactctactgaacaagcatcagcagtgacttctaacactgatgattcatatgcagcacctctagtaactaatcaggagcagttgctgaaagggtctgcttctgagaaacaagctgtgatgaataactcatccatgaattccgatacttcagcacatttttttgatggcaatgatgtgggcgtgacaacttctggaacttcagagcctactgctcaaacttccaatgatgaaggtgactcagatattagtccagaaacagacctagctgtttataatgtccctctaggttcatctgagctacaactgaaatctgagagtagggcaaatgatcaacagcctgctgcaccaacagtatcagttcgaccggtatccagggaaaagcctagtacaaagtccacagctgggaagaagaagaagaaaaaggaaatgcttgctaaggctgatgctgctgggtcttcagatctttataatgcatacaaaggaccagaagagaagtctgaagttgttggtaccgtggagggtgctgataattcttcaacagttgatacaactcatgtactgtctgacgaattagaaaaggatcctagtacatctgcagatgattgtaagaaaaaagttgagcttgatgattgggaagatgctgcagacatgtctactccaaagcagccatcagattctgggaaccaggctagcatcacccaagtgttggattcagacgtaactgaagcaaacagcaggaagaaatactcacgggattttctgttaactttgcaacatcactataccggtcttccttttggatttcagatgaatgaagctgtcaatgctataatgaataatttggcaggaaagtcttatgttgctgaccgggaacctcaccctagtcctggaaggggtttggaccgcccaacttctcgtgaccgccgtggtgctgccatggctgacgacaggtggactagggcgggtgttcctctcagtcctggtcgtgatgttcacatggacctgccaaatggaccatcagttatcaactaccgtggcggcccaggaggtaatcatggtgttttaaggaatccacgcagtcaatcatcaaatcagtatggcggtgggcttcttgcaggacccatgcagtccgttggaccgcaggtacctcgcagcggctctgatgctgatagatggcagcaaaagggtctcatgccttctcctggcacacctgtacaagcaatgcacaaagcagagaggaagtatgttattgggaaagtttctgatgaggaagaggcgaaacagaggcagttgaaagctattcttaacaagctgactccacagaacttcgaaaaactttttgaacaagttaaggaagtcaacattgacagtgtagcaacacttactggggtcatttcacagatatttgacaaagctttgatggaaccaactttctgtgaaatgtatgctaatttttgcttccatctggctggtgccttgcctgacttcagtgaagacaatgaaaaaatcacattcaaaagattacttttgaataaatgccaagaggagtttgagaggggtgaaagagaagaagctgaagctgataaaacagaagaggaaggcgagattaaacagaccaaagaagaaagggaggaaaagaggatccgtgctcgaaggcgcatgctgggaaacattaggttaattggagagttgtacaaaaagaggatgttgacggaaaggattatgcatgaatgcattaaaaaattgtttggaaatcatgatgatcctgatgaggagaacattgaagcattatgcaaattgatgagtacaattggtgatatgattgatcatgtaaaggcaaaggagcacatggatgcctattttagtatgatgcagataatgtcaacaaatcagaagttgtcttctcgtgtaaggtttatgttgagagattcaatcgacctcaggagaaataaatggcagcaaaggcgtaaagtcgaaggtcccaagaagattgaggaggttcacagagatgcagcacaagaaagacatgcccagtcgagtaggttgggacgtggtccagctgttagttctgttccaagaagagcacatcctatggattatggccctcgtggaccatctgcatcagcatcctcaagttcccaacaagggagcattcgaggaatgcctccacattcgcgtggttcacaagacatccgacatgacgaaaggcaccagtttgacaatagaactgttcttccgcagcgggtagtcaaagatgaagccatcactcttgggccacaaggtggccttgctaggggtatgtctataagagggcagccaccagtatcaaatactgaaattccttctgttattgaccaccggaggatagtatctagttctaatggctataactctgcggctgattggacatcatcatctggaagagaagattctaattcaagacttccagatcgaacctctggccgaattcctgcttctagtcaatctgctgtaacttcgcagaggcctgccagccaggaaggccgttcaagaagtaaatcatattctgaggatgagttgagagaaaaatctgttttgaccattcgagaatattacagtgcaaaagatgaaaaggaggttgttttgtgtattgaggagctgaatgctccaaatttctatccatttcttgtgtcactttgggtaaatgattcctttgagagaaaagacatggaaagagagttgttggctaaacttctcgtcagcctttgcagtggtcgacataatttgttgagcaagcaacaactcagtgatggcctttcaaatgttcttgcctcattagaagataatctaagtgatgctccaagagccaccgagtaccttggacgacttcttgcaaggtttgtggaggaaagcatattgctcttgcaagaggtaggtaaattgattcaagaaagtggagaagaaccagggtacctaatacaaggcggtattgcggctgacatcctaggtgcagtcctggattccataaaatcagacaaagggaattcattcttggatgagatcaagacaacttcaagtttaaagttggttgatttcagaccacaacatcttaagcgatcaaagttggacgccttcatgtaggcacataagttattgttacctgattaccaatgggtgcggtcaccaagcagtttagtttcttcgcacctaaatacccaacggcctttttgatgtactgtaaaacctctctgctcctacttgctgtccctgaccgtacactatttataagatggaaggcgatcggccacctatgtagcacggacggatacaccaattaggtgcggacgtgcggtatcctgtatcggatacctaacagatagggataccccatgatacgtgcgaatacatcgagtatctgagtaaaaataaatatttacaaattcgatatttagagtaaatacgtatagtcttgcgcaatactcc

SEQ ID NO: 219624 - DNA, 5988 bp, Zea Mays
cttcaatttcctactactagagagagacggcctcccttcctctcgcttcgcttacacttctcccctccccccaacccaaacccaacacaattcccccgtgttgcctacacgcactggccacgaccaaaccctaggcgccgccgcctccggggccctcagggctgtcatacggggaaggaggaggatatcggtgaggagagaaggggatttatgtcccagcgaggtgacaggggcgaggggcacgccaggagacccggccggtccagcagcttcggcggccaccgcggaggcggagtcggcggcgcgggcaagggcggcgcgggatcctcaggccagcctcctctttctaccaaccgcagctttaggaagcccggcaatggccacggcgggcagcagagggtggtgaaccagcccgacacaaccggtttccaacctgcccccgcgcctgccccccaccaaactcctgcgcgaccgccacctgcacctcagaatgcggctgtgcatgttcccatatccgcaccatggccgcaacctcaaggtccacaagtgtcatcttcatcagctgccagcgacaggccggctaatccgccattacctaaagctactcatgctgctccaagggctccaccaaaaagctctaacccaccccttcctcagggaggatcgaaaggggaaccaccaaaggggtttaactttcagtttggtagtataaatatgaatgggctgccgcaatttcctgccaggacaagctcagctcctccaaacttggatgaacaaaaacgtaatcaggtgcttgtggaggaacttaaggttacacctacccctgtgcaaccaactccaaaacagcagctgttgcagcagcatccgcatccgctgcagaagcaacagcatcagctgccgcagctgtcgcatcagccacagcagccacagcagcagtcaacaagaaaggaaactgttggttccagccaacctaactccatcaatccccatactacatcacaactgaaaagagatgtgcacccatctccgtcggtccccaatgttacatctgttagacctaccgttcaacaaatgcctggtgttcagatgccgatccccttccaccaccagccggcacaagtttccttgcagtttggtggccatggtgcacagctgcagccacaagttgtgcccagctcatttcaaatgtcaatgggattgacaggcagtagtacaccgcaagtcccacagcagctgtatgccccgactctgcagcatcatcaattgcaacagcaagcaatgatgcatcctggccagggtatgggttatgttccttcagttgctcaccaattcccacagttgggcagcattcctatgaacattgcatcgcaatatcctcagcaacagccaaacaaacctgctgctgcacgtaaggctattgtaaaaattactcatccagacacacatgaagagttgaagcttgataagaggatggactcttctgggcagagagctgcaccgagtattgcacaacaatctcagcctggtgttaattatgctcctcatttgggcttctttcatcagccaccgaattcctacaaccagtcaggaatgtattactctactacagctagtgtgaaccaggttgctactggatcatcgggtcctagatataattatcctgtcactcagtctgcgcaagcgatgacatatatcagtccatctgcagcgcctccggtatctggtcagtcacaatatacagttaagccgcaccctatggggttgctgtctgaaaaatcaggtactcatgtcacaataagtgctccaccagcaaaatctgatccacctaagttacatgctgctggggatgctgcgtcaagtctgaaaaaggataatgaagttgtttctgggatcactgttttaaataaaccaacccttgagagggagagtaacgatcctttagtcacagtgaagcattccactgtgataagcccgtccttgccaattcatggtgaaaaaccacaaactttggtgacatcgtcgcctgttgctaattcagtctcacctgtgactggagctgatgggaaaagcaaagaacccattcaaaggtctggatcatttaaagatagtaagaaaaatgtcactaaaaaggatgtcaggaattcatatgaaccaccaaatccaacttcatttgttgaggataaggttcaaactgtaaaggttggagatggcgatctccaggaaactaaaaagctgaacaatgagttggatttgaccaactcatcttcagctccaacggttccactggcagttagtacagagaatgccgacagcacagcagtaaccactgctgatgttcctgggacagatacaagctcaagaagaccatcttctgagggtactggtgagcctggagtggaaagcttcactgtttccgctgttgaatgtgacgaaagcaagaggactcacaaagttgtgaaagatcctagcaaggataatatttcttctgatgctaccaaacatgaattgcctaaggaatgtgcagtggactctactgaacaagcatcagcagtgacttctaacactgatgattcatatgcagcacctctagtaactaatcaggagcagttgctgaaagggtctgcttctgagaaacaagctgtgatgaataactcatccatgaattccgatacttcagcacatttttttgatggcaatgatgtgggcgtgacaacttctggaacttcagagcctactgctcaaacttccaatgatgaaggtgactcagatattagtccagaaacagacctagctgtttataatgtccctctaggttcatctgagctacaactgaaatctgagagtagggcaaatgatcaacagcctgctgcaccaacagtatcagttcgaccggtatccagggaaaagcctagtacaaagtccacagctgggaagaagaagaagaaaaaggaaatgcttgctaaggctgatgctgctgggtcttcagatctttataatgcatacaaaggaccagaagagaagtctgaagttgttggtaccgtggagggtgctgataattcttcaacagttgatacaactcatgtactgtctgacgaattagaaaaggatcctagtacatctgcagatgattgtaagaaaaaagttgagcttgatgattgggaagatgctgcagacatgtctactccaaagcagccatcagattctgggaaccaggctagcatcacccaagtgttggattcagacgtaactgaagcaaacagcaggaagaaatactcacgggattttctgttaactttgcaacatcactataccggtcttccttttggatttcagatgaatgaagctgtcaatgctataatgaataatttggcaggaaagtcttatgttgctgaccgggaacctcaccctagtcctggaaggggtttggaccgcccaacttctcgtgaccgccgtggtgctgccatggctgacgacaggtggactagggcgggtgttcctctcagtcctggtcgtgatgttcacatggacctgccaaatggaccatcagttatcaactaccgtggcggcccaggaggtaatcatggtgttttaaggaatccacgcagtcaatcatcaaatcagtatggcggtgggcttcttgcaggacccatgcagtccgttggaccgcaggtacctcgcagcggctctgatgctgatagatggcagcaaaagggtctcatgccttctcctggcacacctgtacaagcaatgcacaaagcagagaggaagtatgttattgggaaagtttctgatgaggaagaggcgaaacagaggcagttgaaagctattcttaacaagctgactccacagaacttcgaaaaactttttgaacaagttaaggaagtcaacattgacagtgtagcaacacttactggggtcatttcacagatatttgacaaagctttgatggaaccaactttctgtgaaatgtatgctaatttttgcttccatctggctggtgccttgcctgacttcagtgaagacaatgaaaaaatcacattcaaaagattacttttgaataaatgccaagaggagtttgagaggggtgaaagagaagaagctgaagctgataaaacagaagaggaaggcgagattaaacagaccaaagaagaaagggaggaaaagaggatccgtgctcgaaggcgcatgctgggaaacattaggttaattggagagttgtacaaaaagaggatgttgacggaaaggattatgcatgaatgcattaaaaaattgtttggaaatcatgatgatcctgatgaggagaacattgaagcattatgcaaattgatgagtacaattggtgatatgattgatcatgtaaaggcaaaggagcacatggatgcctattttagtatgatgcagataatgtcaacaaatcagaagttgtcttctcgtgtaaggtttatgttgagagattcaatcgacctcaggagaaataaatggcagcaaaggcgtaaagtcgaaggtcccaagaagattgaggaggttcacagagatgcagcacaagaaagacatgcccagtcgagtaggttgggacgtggtccagctgttagttctgttccaagaagagcacatcctatggattatggccctcgtggaccatctgcatcagcatcctcaagttcccaacaagggagcattcgaggaatgcctccacattcgcgtggttcacaagacatccgacatgacgaaaggcaccagtttgacaatagaactgttcttccgcagcgggtagtcaaagatgaagccatcactcttgggccacaaggtggccttgctaggggtatgtctataagagggcagccaccagtatcaaatactgaaattccttctgttattgaccaccggaggatagtatctagttctaatggctataactctgcggctgattggacatcatcatctggaagagaagattctaattcaagacttccagatcgaacctctggccgaattcctgcttctagtcaatctgctgtaacttcgcagaggcctgccagccaggaaggccgttcaagaagtaaatcatattctgaggatgagttgagagaaaaatctgttttgaccattcgagaatattacagtgcaaaagatgaaaaggaggttgttttgtgtattgaggagctgaatgctccaaatttctatccatttcttgtgtcactttgggtaaatgattcctttgagagaaaagacatggaaagagagttgttggctaaacttctcgtcagcctttgcagtggtcgacataatttgttgagcaagcaacaactcagtgatggcctttcaaatgttcttgcctcattagaagataatctaagtgatgctccaagagccaccgagtaccttggacgacttcttgcaaggtttgtggaggaaagcatattgctcttgcaagaggtaggtaaattgattcaagaaagtggagaagaaccagggtacctaatacaaggcggtattgcggctgacatcctaggtgcagtcctggattccataaaatcagacaaagggaattcattcttggatgagatcaagacaacttcaagtttaaagttggttgatttcagaccacaacatcttaagcgatcaaagttggacgccttcatgtaggcacataagttattgttacctgattaccaatgggtgcggtcaccaagcagtttagtttcttcgcacctaaatacccaacggcctttttgatgtactgtaaaacctctctgctcctacttgctgtccctgaccgtacactatttataagatggaaggcgatcggccacctatgtagcacggacggatacaccaattaggtgcggacgtgcggtatcctgtatcggatacctaacagatagggataccccatgatacgtgcgaatacatcgagtatctgagtaaaaataaatatttacaaattcgatatttagagtaaatacgtatagtcttgcgcaatactcc

SEQ ID NO: 219625 - DNA, 5760 bp, Zea Mays
cttcaatttcctactactagagagagacggcctcccttcctctcgcttcgcttacacttctcccctccccccaacccaaacccaacacaattcccccgtgttgcctacacgcactggccacgaccaaaccctaggcgccgccgcctccggggccctcagggctgtcatacggggaaggaggaggatatcggtgaggagagaaggggatttatgtcccagcgaggtgacaggggcgaggggcacgccaggagacccggccggtccagcagcttcggcggccaccgcggaggcggagtcggcggcgcgggcaagggcggcgcgggatcctcaggccagcctcctctttctaccaaccgcagctttaggaagcccggcaatggccacggcgggcagcagagggtggtgaaccagcccgacacaaccggtttccaacctgcccccgcgcctgccccccaccaaactcctgcgcgaccgccacctgcacctcagaatgcggctgtgcatgttcccatatccgcaccatggccgcaacctcaaggtccacaagtgtcatcttcatcagctgccagcgacaggccggctaatccgccattacctaaagctactcatgctgctccaagggctccaccaaaaagctctaacccaccccttcctcagggaggatcgaaaggggaaccaccaaaggggtttaactttcagtttggtagtataaatatgaatgggctgccgcaatttcctgccaggacaagctcagctcctccaaacttggatgaacaaaaacgtaatcaggtgcttgtggaggaacttaaggttacacctacccctgtgcaaccaactccaaaacagcagctgttgcagcagcatccgcatccgctgcagaagcaacagcatcagctgccgcagctgtcgcatcagccacagcagccacagcagcagtcaacaagaaaggaaactgttggttccagccaacctaactccatcaatccccatactacatcacaactgaaaagagatgtgcacccatctccgtcggtccccaatgttacatctgttagacctaccgttcaacaaatgcctggtgttcagatgccgatccccttccaccaccagccggcacaagtttccttgcagtttggtggccatggtgcacagctgcagccacaagttgtgcccagctcatttcaaatgtcaatgggattgacaggcagtagtacaccgcaagtcccacagcagctgtatgccccgactctgcagcatcatcaattgcaacagcaagcaatgatgcatcctggccagggtatgggttatgttccttcagttgctcaccaattcccacagttgggcagcattcctatgaacattgcatcgcaatatcctcagcaacagccaaacaaacctgctgctgcacgtaaggctattgtaaaaattactcatccagacacacatgaagagttgaagcttgataagaggatggactcttctgggcagagagctgcaccgagtattgcacaacaatctcagcctggtgttaattatgctcctcatttgggcttctttcatcagccaccgaattcctacaaccagtcaggaatgtattactctactacagctagtgtgaaccaggttgctactggatcatcgggtcctagatataattatcctgtcactcagtctgcgcaagcgatgacatatatcagtccatctgcagcgcctccggtatctggtcagtcacaatatacagttaagccgcaccctatggggttgctgtctgaaaaatcaggtactcatgtcacaataagtgctccaccagcaaaatctgatccacctaagttacatgctgctggggatgctgcgtcaagtctgaaaaaggataatgaagttgtttctgggatcactgttttaaataaaccaacccttgagagggagagtaacgatcctttagtcacagtgaagcattccactgtgataagcccgtccttgccaattcatggtgaaaaaccacaaactttggtgacatcgtcgcctgttgctaattcagtctcacctgtgactggagctgatgggaaaagcaaagaacccattcaaaggtctggatcatttaaagatagtaagaaaaatgtcactaaaaaggatgtcaggaattcatatgaaccaccaaatccaacttcatttgttgaggataaggttcaaactgtaaaggttggagatggcgatctccaggaaactaaaaagctgaacaatgagttggatttgaccaactcatcttcagctccaacggttccactggcagttagtacagagaatgccgacagcacagcagtaaccactgctgatgttcctgggacagatacaagctcaagaagaccatcttctgagggtactggtgagcctggagtggaaagcttcactgtttccgctgttgaatgtgacgaaagcaagaggactcacaaagttgtgaaagatcctagcaaggataatatttcttctgatgctaccaaacatgaattgcctaaggaatgtgcagtggactctactgaacaagcatcagcagtgacttctaacactgatgattcatatgcagcacctctagtaactaatcaggagcagttgctgaaagggtctgcttctgagaaacaagctgtgatgaataactcatccatgaattccgatacttcagcacatttttttgatggcaatgatgtgggcgtgacaacttctggaacttcagagcctactgctcaaacttccaatgatgaaggtgactcagatattagtccagaaacagacctagctgtttataatgtccctctaggttcatctgagctacaactgaaatctgagagtagggcaaatgatcaacagcctgctgcaccaacagtatcagttcgaccggtatccagggaaaagcctagtacaaagtccacagctgggaagaagaagaagaaaaaggaaatgcttgctaaggctgatgctgctgggtcttcagatctttataatgcatacaaaggaccagaagagaagtctgaagttgttggtaccgtggagggtgctgataattcttcaacagttgatacaactcatgtactgtctgacgaattagaaaaggatcctagtacatctgcagatgattgtaagaaaaaagttgagcttgatgattgggaagatgctgcagacatgtctactccaaagcagccatcagattctgggaaccaggctagcatcacccaagtgttggattcagacgtaactgaagcaaacagcaggaagaaatactcacgggattttctgttaactttgcaacatcactataccggtcttccttttggatttcagatgaatgaagctgtcaatgctataatgaataatttggcaggaaagtcttatgttgctgaccgggaacctcaccctagtcctggaaggggtttggaccgcccaacttctcgtgaccgccgtggtgctgccatggctgacgacaggtggactagggcgggtgttcctctcagtcctggtcgtgatgttcacatggacctgccaaatggaccatcagttatcaactaccgtggcggcccaggaggtaatcatggtgttttaaggaatccacgcagtcaatcatcaaatcagtatggcggtgggcttcttgcaggacccatgcagtccgttggaccgcaggtacctcgcagcggctctgatgctgatagatggcagcaaaagggtctcatgccttctcctggcacacctgtacaagcaatgcacaaagcagagaggaagtatgttattgggaaagtttctgatgaggaagaggcgaaacagaggcagttgaaagctattcttaacaagctgactccacagaacttcgaaaaactttttgaacaagttaaggaagtcaacattgacagtgtagcaacacttactggggtcatttcacagatatttgacaaagctttgatggaaccaactttctgtgaaatgtatgctaatttttgcttccatctggctggtgccttgcctgacttcagtgaagacaatgaaaaaatcacattcaaaagattacttttgaataaatgccaagaggagtttgagaggggtgaaagagaagaagctgaagctgataaaacagaagaggaaggcgagattaaacagaccaaagaagaaagggaggaaaagaggatccgtgctcgaaggcgcatgctgggaaacattaggttaattggagagttgtacaaaaagaggatgttgacggaaaggattatgcatgaatgcattaaaaaattgtttggaaatcatgatgatcctgatgaggagaacattgaagcattatgcaaattgatgagtacaattggtgatatgattgatcatgtaaaggcaaaggagcacatggatgcctattttagtatgatgcagataatgtcaacaaatcagaagttgtcttctcgtgtaaggtttatgttgagagattcaatcgacctcaggagaaataaatggcagcaaaggcgtaaagtcgaaggtcccaagaagattgaggaggttcacagagatgcagcacaagaaagacatgcccagtcgagtaggttgggacgtggtccagctgttagttctgttccaagaagagcacatcctatggattatggccctcgtggaccatctgcatcagcatcctcaagttcccaacaagggagcattcgaggaatgcctccacattcgcgtggttcacaagacatccgacatgacgaaaggcaccagtttgacaatagaactgttcttccgcagcgggtagtcaaagatgaagccatcactcttgggccacaaggtggccttgctaggggtatgtctataagagggcagccaccagtatcaaatactgaaattccttctgttattgaccaccggaggatagtatctagttctaatggctataactctgcggctgattggacatcatcatctggaagagaagattctaattcaagacttccagatcgaacctctggccgaattcctgcttctagtcaatctgctgtaacttcgcagaggcctgccagccaggaaggccgttcaagaagtaaatcatattctgaggatgagttgagagaaaaatctgttttgaccattcgagaatattacagtgcaaaagatgaaaaggaggttgttttgtgtattgaggagctgaatgctccaaatttctatccatttcttgtgtcactttgggtaaatgattcctttgagagaaaagacatggaaagagagttgttggctaaacttctcgtcagcctttgcagtggtcgacataatttgttgagcaagcaacaactcagtgatggcctttcaaatgttcttgcctcattagaagataatctaagtgatgctccaagagccaccgagtaccttggacgacttcttgcaaggtttgtggaggaaagcatattgctcttgcaagaggtaggtaaattgattcaagaaagtggagaagaaccagggtacctaatacaaggcggtattgcggctgacatcctaggtgcagtcctggattccataaaatcagacaaagggaattcattcttggatgagatcaagacaacttcaagtttaaagttggttgatttcagaccacaacatcttaagcgatcaaagttggacgccttcatgtaggcacataagttattgttacctgcttccaaacgatgcttttgctgagaatcttcatgcacgggcttttactgatcggtgaagtttcgcacggtggtaaagagctcttctagatca

SEQ ID NO: 219626 - DNA, 5846 bp, Zea Mays
cttcaatttcctactactagagagagacggcctcccttcctctcgcttcgcttacacttctcccctccccccaacccaaacccaacacaattcccccgtgttgcctacacgcactggccacgaccaaaccctaggcgccgccgcctccggggccctcagggctgtcatacggggaaggaggaggatatcggtgaggagagaaggggatttatgtcccagcgaggtgacaggggcgaggggcacgccaggagacccggccggtccagcagcttcggcggccaccgcggaggcggagtcggcggcgcgggcaagggcggcgcgggatcctcaggccagcctcctctttctaccaaccgcagctttaggaagcccggcaatggccacggcgggcagcagagggtggtgaaccagcccgacacaaccggtttccaacctgcccccgcgcctgccccccaccaaactcctgcgcgaccgccacctgcacctcagaatgcggctgtgcatgttcccatatccgcaccatggccgcaacctcaaggtccacaagtgtcatcttcatcagctgccagcgacaggccggctaatccgccattacctaaagctactcatgctgctccaagggctccaccaaaaagctctaacccaccccttcctcagggaggatcgaaaggggaaccaccaaaggggtttaactttcagtttggtagtataaatatgaatgggctgccgcaatttcctgccaggacaagctcagctcctccaaacttggatgaacaaaaacgtaatcaggtgcttgtggaggaacttaaggttacacctacccctgtgcaaccaactccaaaacagcagctgttgcagcagcatccgcatccgctgcagaagcaacagcatcagctgccgcagctgtcgcatcagccacagcagccacagcagcagtcaacaagaaaggaaactgttggttccagccaacctaactccatcaatccccatactacatcacaactgaaaagagatgtgcacccatctccgtcggtccccaatgttacatctgttagacctaccgttcaacaaatgcctggtgttcagatgccgatccccttccaccaccagccggcacaagtttccttgcagtttggtggccatggtgcacagctgcagccacaagttgtgcccagctcatttcaaatgtcaatgggattgacaggcagtagtacaccgcaagtcccacagcagctgtatgccccgactctgcagcatcatcaattgcaacagcaagcaatgatgcatcctggccagggtatgggttatgttccttcagttgctcaccaattcccacagttgggcagcattcctatgaacattgcatcgcaatatcctcagcaacagccaaacaaacctgctgctgcacgtaaggctattgtaaaaattactcatccagacacacatgaagagttgaagcttgataagaggatggactcttctgggcagagagctgcaccgagtattgcacaacaatctcagcctggtgttaattatgctcctcatttgggcttctttcatcagccaccgaattcctacaaccagtcaggaatgtattactctactacagctagtgtgaaccaggttgctactggatcatcgggtcctagatataattatcctgtcactcagtctgcgcaagcgatgacatatatcagtccatctgcagcgcctccggtatctggtcagtcacaatatacagttaagccgcaccctatggggttgctgtctgaaaaatcaggtactcatgtcacaataagtgctccaccagcaaaatctgatccacctaagttacatgctgctggggatgctgcgtcaagtctgaaaaaggataatgaagttgtttctgggatcactgttttaaataaaccaacccttgagagggagagtaacgatcctttagtcacagtgaagcattccactgtgataagcccgtccttgccaattcatggtgaaaaaccacaaactttggtgacatcgtcgcctgttgctaattcagtctcacctgtgactggagctgatgggaaaagcaaagaacccattcaaaggtctggatcatttaaagatagtaagaaaaatgtcactaaaaaggatgtcaggaattcatatgaaccaccaaatccaacttcatttgttgaggataaggttcaaactgtaaaggttggagatggcgatctccaggaaactaaaaagctgaacaatgagttggatttgaccaactcatcttcagctccaacggttccactggcagttagtacagagaatgccgacagcacagcagtaaccactgctgatgttcctgggacagatacaagctcaagaagaccatcttctgagggtactggtgagcctggagtggaaagcttcactgtttccgctgttgaatgtgacgaaagcaagaggactcacaaagttgtgaaagatcctagcaaggataatatttcttctgatgctaccaaacatgaattgcctaaggaatgtgcagtggactctactgaacaagcatcagcagtgacttctaacactgatgattcatatgcagcacctctagtaactaatcaggagcagttgctgaaagggtctgcttctgagaaacaagctgtgatgaataactcatccatgaattccgatacttcagcacatttttttgatggcaatgatgtgggcgtgacaacttctggaacttcagagcctactgctcaaacttccaatgatgaaggtgactcagatattagtccagaaacagacctagctgtttataatgtccctctaggttcatctgagctacaactgaaatctgagagtagggcaaatgatcaacagcctgctgcaccaacagtatcagttcgaccggtatccagggaaaagcctagtacaaagtccacagctgggaagaagaagaagaaaaaggaaatgcttgctaaggctgatgctgctgggtcttcagatctttataatgcatacaaaggaccagaagagaagtctgaagttgttggtaccgtggagggtgctgataattcttcaacagttgatacaactcatgtactgtctgacgaattagaaaaggatcctagtacatctgcagatgattgtaagaaaaaagttgagcttgatgattgggaagatgctgcagacatgtctactccaaagcagccatcagattctgggaaccaggctagcatcacccaagtgttggattcagacgtaactgaagcaaacagcaggaagaaatactcacgggattttctgttaactttgcaacatcactataccggtcttccttttggatttcagatgaatgaagctgtcaatgctataatgaataatttggcaggaaagtcttatgttgctgaccgggaacctcaccctagtcctggaaggggtttggaccgcccaacttctcgtgaccgccgtggtgctgccatggctgacgacaggtggactagggcgggtgttcctctcagtcctggtcgtgatgttcacatggacctgccaaatggaccatcagttatcaactaccgtggcggcccaggaggtaatcatggtgttttaaggaatccacgcagtcaatcatcaaatcagtatggcggtgggcttcttgcaggacccatgcagtccgttggaccgcaggtacctcgcagcggctctgatgctgatagatggcagcaaaagggtctcatgccttctcctggcacacctgtacaagcaatgcacaaagcagagaggaagtatgttattgggaaagtttctgatgaggaagaggcgaaacagaggcagttgaaagctattcttaacaagctgactccacagaacttcgaaaaactttttgaacaagttaaggaagtcaacattgacagtgtagcaacacttactggggtcatttcacagatatttgacaaagctttgatggaaccaactttctgtgaaatgtatgctaatttttgcttccatctggctggtgccttgcctgacttcagtgaagacaatgaaaaaatcacattcaaaagattacttttgaataaatgccaagaggagtttgagaggggtgaaagagaagaagctgaagctgataaaacagaagaggaaggcgagattaaacagaccaaagaagaaagggaggaaaagaggatccgtgctcgaaggcgcatgctgggaaacattaggttaattggagagttgtacaaaaagaggatgttgacggaaaggattatgcatgaatgcattaaaaaattgtttggaaatcatgatgatcctgatgaggagaacattgaagcattatgcaaattgatgagtacaattggtgatatgattgatcatgtaaaggcaaaggagcacatggatgcctattttagtatgatgcagataatgtcaacaaatcagaagttgtcttctcgtgtaaggtttatgttgagagattcaatcgacctcaggagaaataaatggcagcaaaggcgtaaagtcgaaggtcccaagaagattgaggaggttcacagagatgcagcacaagaaagacatgcccagtcgagtaggttgggacgtggtccagctgttagttctgttccaagaagagcacatcctatggattatggccctcgtggaccatctgcatcagcatcctcaagttcccaacaagggagcattcgaggaatgcctccacattcgcgtggttcacaagacatccgacatgacgaaaggcaccagtttgacaatagaactgttcttccgcagcgggtagtcaaagatgaagccatcactcttgggccacaaggtggccttgctaggggtatgtctataagagggcagccaccagtatcaaatactgaaattccttctgttattgaccaccggaggatagtatctagttctaatggctataactctgcggctgattggacatcatcatctggaagagaagattctaattcaagacttccagatcgaacctctggccgaattcctgcttctagtcaatctgctgtaacttcgcagaggcctgccagccaggaaggccgttcaagaagtaaatcatattctgaggatgagttgagagaaaaatctgttttgaccattcgagaatattacagtgcaaaagatgaaaaggaggttgttttgtgtattgaggagctgaatgctccaaatttctatccatttcttgtgtcactttgggtaaatgattcctttgagagaaaagacatggaaagagagttgttggctaaacttctcgtcagcctttgcagtggtcgacataatttgttgagcaagcaacaactcagtgatggcctttcaaatgttcttgcctcattagaagataatctaagtgatgctccaagagccaccgagtaccttggacgacttcttgcaaggtttgtggaggaaagcatattgctcttgcaagaggtaggtaaattgattcaagaaagtggagaagaaccagggtacctaatacaaggcggtattgcggctgacatcctaggtgcagtcctggattccataaaatcagacaaagggaattcattcttggatgagatcaagacaacttcaagtttaaagttggttgatttcagaccacaacatcttaagcgatcaaagttggacgccttcatgtaggcacataagttattgttacctgattaccaatgggtgcggtcaccaagcagtttagtttcttcgcacctaaatacccaacggcctttttgatgttgcaggaacctacacgagagcccgacgcgcatcctctcgctgggagggttgccacctttgtcgaacagctgtaccgaattgtaaaattgaaaagactataactctac

SEQ ID NO: 219627 - DNA, 5622 bp, Zea Mays
cttcaatttcctactactagagagagacggcctcccttcctctcgcttcgcttacacttctcccctccccccaacccaaacccaacacaattcccccgtgttgcctacacgcactggccacgaccaaaccctaggcggagtcggcggcgcgggcaagggcggcgcgggatcctcaggccagcctcctctttctaccaaccgcagctttaggaagcccggcaatggccacggcgggcagcagagggtggtgaaccagcccgacacaaccggtttccaacctgcccccgcgcctgccccccaccaaactcctgcgcgaccgccacctgcacctcagaatgcggctgtgcatgttcccatatccgcaccatggccgcaacctcaaggtccacaagtgtcatcttcatcagctgccagcgacaggccggctaatccgccattacctaaagctactcatgctgctccaagggctccaccaaaaagctctaacccaccccttcctcagggaggatcgaaaggggaaccaccaaaggggtttaactttcagtttggtagtataaatatgaatgggctgccgcaatttcctgccaggacaagctcagctcctccaaacttggatgaacaaaaacgtaatcaggtgcttgtggaggaacttaaggttacacctacccctgtgcaaccaactccaaaacagcagctgttgcagcagcatccgcatccgctgcagaagcaacagcatcagctgccgcagctgtcgcatcagccacagcagccacagcagcagtcaacaagaaaggaaactgttggttccagccaacctaactccatcaatccccatactacatcacaactgaaaagagatgtgcacccatctccgtcggtccccaatgttacatctgttagacctaccgttcaacaaatgcctggtgttcagatgccgatccccttccaccaccagccggcacaagtttccttgcagtttggtggccatggtgcacagctgcagccacaagttgtgcccagctcatttcaaatgtcaatgggattgacaggcagtagtacaccgcaagtcccacagcagctgtatgccccgactctgcagcatcatcaattgcaacagcaagcaatgatgcatcctggccagggtatgggttatgttccttcagttgctcaccaattcccacagttgggcagcattcctatgaacattgcatcgcaatatcctcagcaacagccaaacaaacctgctgctgcacgtaaggctattgtaaaaattactcatccagacacacatgaagagttgaagcttgataagaggatggactcttctgggcagagagctgcaccgagtattgcacaacaatctcagcctggtgttaattatgctcctcatttgggcttctttcatcagccaccgaattcctacaaccagtcaggaatgtattactctactacagctagtgtgaaccaggttgctactggatcatcgggtcctagatataattatcctgtcactcagtctgcgcaagcgatgacatatatcagtccatctgcagcgcctccggtatctggtcagtcacaatatacagttaagccgcaccctatggggttgctgtctgaaaaatcaggtactcatgtcacaataagtgctccaccagcaaaatctgatccacctaagttacatgctgctggggatgctgcgtcaagtctgaaaaaggataatgaagttgtttctgggatcactgttttaaataaaccaacccttgagagggagagtaacgatcctttagtcacagtgaagcattccactgtgataagcccgtccttgccaattcatggtgaaaaaccacaaactttggtgacatcgtcgcctgttgctaattcagtctcacctgtgactggagctgatgggaaaagcaaagaacccattcaaaggtctggatcatttaaagatagtaagaaaaatgtcactaaaaaggatgtcaggaattcatatgaaccaccaaatccaacttcatttgttgaggataaggttcaaactgtaaaggttggagatggcgatctccaggaaactaaaaagctgaacaatgagttggatttgaccaactcatcttcagctccaacggttccactggcagttagtacagagaatgccgacagcacagcagtaaccactgctgatgttcctgggacagatacaagctcaagaagaccatcttctgagggtactggtgagcctggagtggaaagcttcactgtttccgctgttgaatgtgacgaaagcaagaggactcacaaagttgtgaaagatcctagcaaggataatatttcttctgatgctaccaaacatgaattgcctaaggaatgtgcagtggactctactgaacaagcatcagcagtgacttctaacactgatgattcatatgcagcacctctagtaactaatcaggagcagttgctgaaagggtctgcttctgagaaacaagctgtgatgaataactcatccatgaattccgatacttcagcacatttttttgatggcaatgatgtgggcgtgacaacttctggaacttcagagcctactgctcaaacttccaatgatgaaggtgactcagatattagtccagaaacagacctagctgtttataatgtccctctaggttcatctgagctacaactgaaatctgagagtagggcaaatgatcaacagcctgctgcaccaacagtatcagttcgaccggtatccagggaaaagcctagtacaaagtccacagctgggaagaagaagaagaaaaaggaaatgcttgctaaggctgatgctgctgggtcttcagatctttataatgcatacaaaggaccagaagagaagtctgaagttgttggtaccgtggagggtgctgataattcttcaacagttgatacaactcatgtactgtctgacgaattagaaaaggatcctagtacatctgcagatgattgtaagaaaaaagttgagcttgatgattgggaagatgctgcagacatgtctactccaaagcagccatcagattctgggaaccaggctagcatcacccaagtgttggattcagacgtaactgaagcaaacagcaggaagaaatactcacgggattttctgttaactttgcaacatcactataccggtcttccttttggatttcagatgaatgaagctgtcaatgctataatgaataatttggcaggaaagtcttatgttgctgaccgggaacctcaccctagtcctggaaggggtttggaccgcccaacttctcgtgaccgccgtggtgctgccatggctgacgacaggtggactagggcgggtgttcctctcagtcctggtcgtgatgttcacatggacctgccaaatggaccatcagttatcaactaccgtggcggcccaggaggtaatcatggtgttttaaggaatccacgcagtcaatcatcaaatcagtatggcggtgggcttcttgcaggacccatgcagtccgttggaccgcaggtacctcgcagcggctctgatgctgatagatggcagcaaaagggtctcatgccttctcctggcacacctgtacaagcaatgcacaaagcagagaggaagtatgttattgggaaagtttctgatgaggaagaggcgaaacagaggcagttgaaagctattcttaacaagctgactccacagaacttcgaaaaactttttgaacaagttaaggaagtcaacattgacagtgtagcaacacttactggggtcatttcacagatatttgacaaagctttgatggaaccaactttctgtgaaatgtatgctaatttttgcttccatctggctggtgccttgcctgacttcagtgaagacaatgaaaaaatcacattcaaaagattacttttgaataaatgccaagaggagtttgagaggggtgaaagagaagaagctgaagctgataaaacagaagaggaaggcgagattaaacagaccaaagaagaaagggaggaaaagaggatccgtgctcgaaggcgcatgctgggaaacattaggttaattggagagttgtacaaaaagaggatgttgacggaaaggattatgcatgaatgcattaaaaaattgtttggaaatcatgatgatcctgatgaggagaacattgaagcattatgcaaattgatgagtacaattggtgatatgattgatcatgtaaaggcaaaggagcacatggatgcctattttagtatgatgcagataatgtcaacaaatcagaagttgtcttctcgtgtaaggtttatgttgagagattcaatcgacctcaggagaaataaatggcagcaaaggcgtaaagtcgaaggtcccaagaagattgaggaggttcacagagatgcagcacaagaaagacatgcccagtcgagtaggttgggacgtggtccagctgttagttctgttccaagaagagcacatcctatggattatggccctcgtggaccatctgcatcagcatcctcaagttcccaacaagggagcattcgaggaatgcctccacattcgcgtggttcacaagacatccgacatgacgaaaggcaccagtttgacaatagaactgttcttccgcagcgggtagtcaaagatgaagccatcactcttgggccacaaggtggccttgctaggggtatgtctataagagggcagccaccagtatcaaatactgaaattccttctgttattgaccaccggaggatagtatctagttctaatggctataactctgcggctgattggacatcatcatctggaagagaagattctaattcaagacttccagatcgaacctctggccgaattcctgcttctagtcaatctgctgtaacttcgcagaggcctgccagccaggaaggccgttcaagaagtaaatcatattctgaggatgagttgagagaaaaatctgttttgaccattcgagaatattacagtgcaaaagatgaaaaggaggttgttttgtgtattgaggagctgaatgctccaaatttctatccatttcttgtgtcactttgggtaaatgattcctttgagagaaaagacatggaaagagagttgttggctaaacttctcgtcagcctttgcagtggtcgacataatttgttgagcaagcaacaactcagtgatggcctttcaaatgttcttgcctcattagaagataatctaagtgatgctccaagagccaccgagtaccttggacgacttcttgcaaggtttgtggaggaaagcatattgctcttgcaagaggtaggtaaattgattcaagaaagtggagaagaaccagggtacctaatacaaggcggtattgcggctgacatcctaggtgcagtcctggattccataaaatcagacaaagggaattcattcttggatgagatcaagacaacttcaagtttaaagttggttgatttcagaccacaacatcttaagcgatcaaagttggacgccttcatgtaggcacataagttattgttacctggttgcaggaacctacacgagagcccgacgcgcatcctctcgctgggagggttgccacctttgtcgaacagctgtaccgaattgtaaaattgaaaagactataactctac

SEQ ID NO: 219628 - DNA, 1485 bp, Zea Mays
cacttgtttaagccgcgacctgcgtcccagcatcagtcagtgcatcagcattcatcgccccctgcctccccttccattcgccctcctcccactccaccagctcctgcctgcctataaacccagggccgccctttgactctccttccctgtccagtggcggggccgcttcccttgcgttcgcggagagtctgtctgtctgtctagctagctagctagctgccgagagcgtgaggaggaagggggatccatggcggcggagaacgaggagaaggagacggcctgcgcggggtacaagcacgggccgccatgggtgttcaaaggcagcgcattgtaccagctgcatttggtgaaggcgtcgacggcgcgggccttcgtgccgcgggacctccgcctggttgaggccttcggctacacgctcggcggcatgttcctggcgcgctaccacgacagccctgccggcgaattcgacgagctcgtggtgatcgccggcattgtgtggaacccgccgacctcctgcgcgtgagttcgccttcgctccgcttcatgcctgcattgcattcgcatcttctgtggcctagtttaatcccttgtaggcttcttcgccgctttctcctgcctgattggcctcgatcagggaccccccaacagaaaagaacaggggcaacttgcagtatgcgaaggggaaagaaaaaaaacgaaaaccctcgtgcttgcgccagccggccataaacaagcgccttatcccccatatgattgtacttggcagcacggactgtgccttgcttctttcaattattcgtaggctggggaggggtgtccgggtgcgctgcacttgctccgcgtggccaacttgctgccctgcgcagctcagctacagcctacagccgcccgtggtttcctactttcctccgtcttcgaaatgcagcagttggatggaactctgaatagtggtgggctgccagggtgctggtgaacagcgtcgaagcctgccggcacggccgcaaggaggtaggactgccaagccatgtcgccacattctcgtcaaagaacgaggctgcttcgcttggggatagaccgttggctagaccaaacagcttcctcaacatgctggggatcgggtcgacagccttcgagcaagggaatggccgcgagattgaggtttcagagtccaagggcggctcgtctactcggcatctgtgcaacatcagcctgccatttaccggatcacataaggaccaccagtgggcgggcccagcaatcagaatgtcactcccgagtttcaggcacgtctcgcttgctttgcgaatttcagcggacgtacagtggaccatcctgatcttctcaagtactcctgtcaagtagaatgcaggtgatgacaaaaaacaaaactctgtgaacgtcctgggctagtgagctatccattgatggcgtacgatctacccgtattcgacgcactgttgacatgtttccttccacagggtgcgc

SEQ ID NO: 219629 - DNA, 1176 bp, Zea Mays
cacttgtttaagccgcgacctgcgtcccagcatcagtcagtgcatcagcattcatcgccccctgcctccccttccattcgccctcctcccactccaccagctcctgcctgcctataaacccagggccgccctttgactctccttccctgtccagtggcggggccgcttcccttgcgttcgcggagagtctgtctgtctgtctagctagctagctagctgccgagagcgtgaggaggaagggggatccatggcggcggagaacgaggagaaggagacggcctgcgcggggtacaagcacgggccgccatgggtgttcaaaggcagcgcattgtaccagctgcatttggtgaaggcgtcgacggcgcgggccttcgtgccgcgggacctccgcctggttgaggccttcggctacacgctcggcggcatgttcctggcgcgctaccacgacagccctgccggcgaattcgacgagctcgtggtgatcgccggcattgtgtggaacccgccgacctcctgcgcgctggggaggggtgtccgggtgcgctgcacttgctccgcgtggccaacttgctgccctgcgcagctcagctacagcctacagccgcccgtggtttcctactttcctccgtcttcgaaatgcagcagttggatggaactctgaatagtggtgggctgccagggtgctggtgaacagcgtcgaagcctgccggcacggccgcaaggaggtaggactgccaagccatgtcgccacattctcgtcaaagaacgaggctgcttcgcttggggatagaccgttggctagaccaaacagcttcctcaacatgctggggatcgggtcgacagccttcgagcaagggaatggccgcgagattgaggtttcagagtccaagggcggctcgtctactcggcatctgtgcaacatcagcctgccatttaccgcaggatcacataaggaccaccagtgggcgggcccagcaatcagaatgtcactcccgagtttcagcggacgtacagtggaccatcctgatcttctcaagtactcctgtcaagtagaatgcaggtgatgacaaaaaacaaaactctgtgaacgtcctgggctagtgagctatccattgatggcgtacgatctacccgtattcgacgcactgttgacatgtttccttccacagggtgcgc

SEQ ID NO: 219630 - DNA, 1088 bp, Zea Mays
ctcgcctcccgtcccctccgtcgaaccaaagctcgcgagccgcaaagccgcggcgacaaccacttgtttaagccgcgacctgcgtcccagcatcagtcagtgcatcagcattcatcgccccctgcctccccttccattcgccctcctcccactccaccagctcctgcctgcctataaacccagggccgccctttgactctccttccctgtccagtggcggggccgcttcccttgcgttcgcggagagtctgtctgtctgtctagctagctagctagctgccgagagcgtgaggaggaagggggatccatggcggcggagaacgaggagaaggagacggcctgcgcggggtacaagcacgggccgccatgggtgttcaaaggcagcgcattgtaccagctgcatttggtgaaggcgtcgacggcgcgggccttcgtgccgcgggacctccgcctggttgaggccttcggctacacgctcggcggcatgttcctggcgcgctaccacgacagccctgccggcgaattcgacgagctcgtggtgatcgccggcattgtgtggaacccgccgacctcctgcgcgtgggctgccagggtgctggtgaacagcgtcgaagcctgccggcacggccgcaaggaggtaggactgccaagccatgtcgccacattctcgtcaaagaacgaggctgcttcgcttggggatagaccgttggctagaccaaacagcttcctcaacatgctggggatcgggtcgacagccttcgagcaagggaatggccgcgagattgaggtttcagagtccaagggcggctcgtctactcggcatctgtgcaacatcagcctgccatttaccgcaggatcacataaggaccaccagtgggcgggcccagcaatcagaatgtcactcccgagtttcagcggacgtacagtggaccatcctgatcttctcaagtactcctgtcaagtagaatgcaggtgatgacaaaaaacaaaactctgtgaacgtcctgggctagtgagctatccattgatggcgtacgatctacccgtattcgacgcactgttgacatgtttccttccacagggtgcgc

SEQ ID NO: 219631 - DNA, 1523 bp, Zea Mays
atcccctctcgcctcccgtcccctccgtcgaaccaaagctcgcgagccgcaaagccgcggcgacaaccacttgtttaagccgcgacctgcgtcccagcatcagtcagtgcatcagcattcatcgccccctgcctccccttccattcgccctcctcccactccaccagctcctgcctgcctataaacccagggccgccctttgactctccttccctgtccagtggcggggccgcttcccttgcgttcgcggagagtctgtctgtctgtctagctagctagctagctgccgagagcgtgaggaggaagggggatccatggcggcggagaacgaggagaaggagacggcctgcgcggggtacaagcacgggccgccatgggtgttcaaaggcagcgcattgtaccagctgcatttggtgaaggcgtcgacggcgcgggccttcgtgccgcgggacctccgcctggttgaggccttcggctacacgctcggcggcatgttcctggcgcgctaccacgacagccctgccggcgaattcgacgagctcgtggtgatcgccggcattgtgtggaacccgccgacctcctgcgcgtgagttcgccttcgctccgcttcatgcctgcattgcattcgcatcttctgtggcctagtttaatcccttgtaggcttcttcgccgctttctcctgcctgattggcctcgatcagggaccccccaacagaaaagaacaggggcaacttgcagtatgcgaaggggaaagaaaaaaaacgaaaaccctcgtgcttgcgccagccggccataaacaagcgccttatcccccatatgattgtacttggcagcacggactgtgccttgcttctttcaattattcgtaggctggggaggggtgtccgggtgcgctgcacttgctccgcgtggccaacttgctgccctgcgcagctcagctacagcctacagccgcccgtggtttcctactttcctccgtcttcgaaatgcagcagttggatggaactctgaatagtggtgggctgccagggtgctggtgaacagcgtcgaagcctgccggcacggccgcaaggaggtaggactgccaagccatgtcgccacattctcgtcaaagaacgaggctgcttcgcttggggatagaccgttggctagaccaaacagcttcctcaacatgctggggatcgggtcgacagccttcgagcaagggaatggccgcgagattgaggtttcagagtccaagggcggctcgtctactcggcatctgtgcaacatcagcctgccatttaccggatcacataaggaccaccagtgggcgggcccagcaatcagaatgtcactcccgagtttcagcggacgtacagtggaccatcctgatcttctcaagtactcctgtcaagtagaatgcaggtgatgacaaaaaacaaaactctgtgaacgtcctgggctagtgagctatccattgatggcgtacgatctacccgtattcgacgcactgttgacatgtttccttccacagggtgcgc

SEQ ID NO: 219632 - DNA, 1097 bp, Zea Mays
ctcccatcccctctcgcctcccgtcccctccgtcgaaccaaagctcgcgagccgcaaagccgcggcgacaaccacttgtttaagccgcgacctgcgtcccagcatcagtcagtgcatcagcattcatcgccccctgcctccccttccattcgccctcctcccactccaccagctcctgcctgcctataaacccagggccgccctttgactctccttccctgtccagtggcggggccgcttcccttgcgttcgcggagagtctgtctgtctgtctagctagctagctagctgccgagagcgtgaggaggaagggggatccatggcggcggagaacgaggagaaggagacggcctgcgcggggtacaagcacgggccgccatgggtgttcaaaggcagcgcattgtaccagctgcatttggtgaaggcgtcgacggcgcgggccttcgtgccgcgggacctccgcctggttgaggccttcggctacacgctcggcggcatgttcctggcgcgctaccacgacagccctgccggcgaattcgacgagctcgtggtgatcgccggcattgtgtggaacccgccgacctcctgcgcgtgggctgccagggtgctggtgaacagcgtcgaagcctgccggcacggccgcaaggaggtaggactgccaagccatgtcgccacattctcgtcaaagaacgaggctgcttcgcttggggatagaccgttggctagaccaaacagcttcctcaacatgctggggatcgggtcgacagccttcgagcaagggaatggccgcgagattgaggtttcagagtccaagggcggctcgtctactcggcatctgtgcaacatcagcctgccatttaccggatcacataaggaccaccagtgggcgggcccagcaatcagaatgtcactcccgagtttcagcggacgtacagtggaccatcctgatcttctcaagtactcctgtcaagtagaatgcaggtgatgacaaaaaacaaaactctgtgaacgtcctgggctagtgagctatccattgatggcgtacgatctacccgtattcgacgcactgttgacatgtttccttccacagggtgcgc

SEQ ID NO: 219633 - DNA, 1935 bp, Zea Mays
cgcttggtctcactttcacggccatctttacctcctcccaaagccagccagccagcctctccaagagcgtggtgcgtccattcatttgttaaagccaccaaaggtgttcagcagctcagctcagcactattcgttcgttctccgtatatatggcggttgcttcgattcctttcactcgttgttatcactactaaactagtgcggggtataaagctctctccctccgcgcttccgatcagttcacgacgactccaggtccaggaggggcgcacttgactttcccctcctcctcctgcgagcaccttcctcgcctcgctctcatggcctcatcagagcctatagagtgccagagcgcgcaattggtcttcttcttcagcttgtctgattcctgttccagcggttgtggcgctgagggtgtcgattcactgccaaggatgcaagaagaaggtgaagaaggtgctccagaacatcagcggcgtgtaccgatgcgaaatcgatgcccggagcaacaaggtcgtggcgacggtctcgacggagctcgacccctacatgctggtcgccaagctgcgcaagtccggcaagcaggcggagctgtggccggagcagccggtgcagcagcaggagcagccggcaccagtaccaccagctgagagccaaaggcaggaggagcccaagaacaaccagcctgcggagccgggccgacccagcgaacctgccgaggagcgcggcgccgccgccgacacggccgaggccgccgcggcggagccgagcaacccgctaccttcgccgccggagcccaagccgagcgccggcggaggagaggccccgaatccggcggcccaggacagcaaagaaaacgccagcgccgacgacgtcggcggcggcgacgatacggccgcggcaccggcaccggcgcagcaaggacccagcgaggcgaaggggaaagcgaaatcgaagcagcatacggcggagatggaggagaggcagcccgtggacgccagagtgactgtggagtacgaccaccgaggcgtcggtgggggctacgtgagccgcatgccgccgccggcagtcatgagctacaaccaggtgcgcccgagcgtgagcgcgtcctactacgcccccgccccggctccggcgccggcgccgatgccgatggggaggcccgggccgtcgcagggctacatcgacgagcactacacgccgtcttacagcagcagtagcaacaactactactcctccaaccggtcgccggcgtacgagccgtactactacagcgctccgcagccggcgccgtatagctaccagtaccagtaccagccggcttcttcgtccgaggattactactacagcgcgccgccgcagaggagcgccttctcgccgccgcgggagggctacggcgacatgttcaacgacgagaacgccaattcttgcaccgtcatgtgaagggaggatgcatgcaaacatggaagtagctagtttacttacagttccttattaatcaagcgactctctctatatatatatatatatatttgtgtgtgttagtatattttagaaccagtaattaagtacgagtaaggagatgtattaaaagcactgttcagtcttgatggcgctgaataagttgagagctctgagcttgaatgcttgatgcatgtaccaaccgtgatagatagaggagaatgtgaggatctgaatgaacagctctggtgttcatcacagcaaattttgtaatgtatgacatggtcaaaatggggacttccaatctcttcaacttcttcattcatgtaagaactttgtatgtacacagaacatgagcaaagacacgatcgagctgttctgtttccgtgtgaatcttgcacctgaaaaggagctagctatgtgtcaatcattcaggaggttggttaactaaattgagcaggagtatttcatgag

SEQ ID NO: 219634 - DNA, 1184 bp, Zea Mays
ctcagctcagcactattcgttcgttctccgtatatatggcggttgcttcgattcctttcactcgttgttatcactactaaactagtgcggggtataaagctctctccctccgcgcttccgatcagttcacgacgactccaggtccaggaggggcgcacttgactttcccctcctcctcctgcgagcaccttcctcgcctcgctctcatggcctcatcagagcctatagagtgccaggttgtggcgctgagggtgtcgattcactgccaaggatgcaagaagaaggtgaagaaggtgctccagaacatcagcggcgtgtaccgatgcgaaatcgatgcccggagcaacaaggtcgtggcgacggtctcgacggagctcgacccctacatgctggtcgccaagctgcgcaagcccgggccgtcgcagggctacatcgacgagcactacacgccgtcttacagcagcagtagcaacaactactactcctccaaccggtcgccggcgtacgagccgtactactacagcgctccgcagccggcgccgtatagctaccagtaccagtaccagccggcttcttcgtccgaggattactactacagcgcgccgccgcagaggagcgccttctcgccgccgcgggagggctacggcgacatgttcaacgacgagaacgccaattcttgcaccgtcatgtgaagggaggatgcatgcaaacatggaagtagctagtttacttacagttccttattaatcaagcgactctctctatatatatatatatatatttgtgtgtgttagtatattttagaaccagtaattaagtacgagtaaggagatgtattaaaagcactgttcagtcttgatggcgctgaataagttgagagctctgagcttgaatgcttgatgcatgtaccaaccgtgatagatagaggagaatgtgaggatctgaatgaacagctctggtgttcatcacagcaaattttgtaatgtatgacatggtcaaaatggggacttccaatctcttcaacttcttcattcatgtaagaactttgtatgtacacagaacatgagcaaagacacgatcgagctgttctgtttccgtgtgaatcttgcacctgaaaaggagctagctatgtgtcaatcattcaggaggttggttaactaaattgagcaggagtatttcatgag

SEQ ID NO: 219635 - DNA, 1481 bp, Zea Mays
gaagcgttccgcgagtgtgaggaggccgtccgcctcgatccggccagcggccgcgcgcacggccgcctcgccggcttatgcctcaggcttgggatggttgagaaggcaaagacgcacttcacactggctggaagtgcaaaccagtctgatccggctgagtggcagaagctgcatgaggtagagatccatcaaggcagatgcatggatgcaaggaaaattggagactggaagagtgcactcagggaagccgacgcagccatcgctgttggagcggactcctctcgattgcttcttgccttgaggtcagaagcgttgctttggttgcacaaattagaggaagctgatttgactattacaagcttgttgaaactggatgacgcgtcgttgccttcgacgccaaccagagtctcaggcatgtcagctgactcttatgtccatatcgtccaagccaaggtcaacgtgacatttggaaggttcgattcagctgtcgcactggctgagaaggctaagcttattgatggcgtgagctcagaggttgaagtgatcctaaacaacgtgagattagtcgcattggctcgagcccgggggaatgacctttttaaggcagcttgctggtcaaagctgggtcggtgggcaaaagctgttgaggactgcagcgaggccctaagagtccagcctaactacacaaaggctctgctaaggcgtgcggcgtcatatgcaaagcttgagcgctgggcggactgtgtgcgggactacgaggtgcttcgcaaggatcttcctggtgacactgaggttgcagagtccttgttccatgcccaagttgcattaaagacagcccgtggagaggtggtatctaatatgaagtttggaggggtagttgaagaaattatcagcttagagcaactccaagatgttatccgttcacctggtgtatccgttctttacttcatggctacaatgaacaagcaatgtgcacaaattaccccgtctgtggactccctttgctccgagtgccctgcattgaatttcctgaaggtaaacgttgacgagcgccctctggtagcaagcgcggagaacgtgcgagtagtcccaagcttcaagatttacaaggacggcacgagagtgaaggagatggtctgccctagcttgcaggtcttgcgctattccgtgaggcactatgctgtctccagctcttgaggtccggcactcagttcgctggccctgttagtgtcaccacatgccaacatttcaccaacaaatctgtccctctatagtatcacagcatttcccccttcccatcgcgtcacttaggctcctcctaccgcaacatctctagaaccatttgatccaagcttaagcaattctcatgcctcgctttccaaagtgatgacttcaactcctgaagaaaggctccctgtggtggtgttcagggaatagctgtttacgtgcatctgttcgatctatggcttctcggcgctctc

SEQ ID NO: 219636 - DNA, 2119 bp, Zea Mays
agccacgcagccgccgcgcgctcgcccggccgtgctcggatccggtaccggccactacggccacggcagcatcatgcgccgcggcgggggagcgactcccgcgaggaccagcggtgacgcggccccgctgctccacggccacggcagcaattcctcgaggtcgaggtccccggcgagctgccctgcgccagcgccgccggccaccagcggtggcctgcaggagattactcgcgcggggaacgagtggtacaagaagggccgccacgccgacgcgctgcgccactacgaccgtgccgtggcgctgtgccccgacagcgccgcgtgccgcggcaaccgcgccgccgcgctcatcgggctcgggcgcctagcagaagcgttccgcgagtgtgaggaggccgtccgcctcgatccggccagcggccgcgcgcacggccgcctcgccggcttatgcctcaggcttgggatggttgagaaggcaaagacgcacttcacactggctggaagtgcaaaccagtctgatccggctgagtggcagaagctgcatgaggtagagatccatcaaggcagatgcatggatgcaaggaaaattggagactggaagagtgcactcagggaagccgacgcagccatcgctgttggagcggactcctctcgattgcttcttgccttgaggtcagaagcgttgctttggttgcacaaattagaggaagctgatttgactattacaagcttgttgaaactggatgacgcgtcgttgccttcgacgccaaccagagtctcaggcatgtcagctgactcttatgtccatatcgtccaagccaaggtcaacgtgacatttggaaggttcgattcagctgtcgcactggctgagaaggctaagcttattgatggcgtgagctcagaggttgaagtgatcctaaacaacgtgagattagtcgcattggctcgagcccgggggaatgacctttttaaggcaggcaagtttgctgaggcgtcgctagcctatggtgaagggctgaaatatgagccttctaatccagtgctatactgcaaccgggcagcttgctggtcaaagctgggtcggtgggcaaaagctgttgaggactgcagcgaggccctaagagtccagcctaactacacaaaggctctgctaaggcgtgcggcgtcatatgcaaagcttgagcgctgggcggactgtgtgcgggactacgaggtgcttcgcaaggatcttcctggtgacactgaggttgcagagtccttgttccatgcccaagttgcattaaagacagcccgtggagaggtggtatctaatatgaagtttggaggggtagttgaagaaattatcagcttagagcaactccaagatgttatccgttcacctggtgagtttctcctctacatgcacctagcctgttgtaggcatttcacctccttcttggttcttgttgtgctaagaagtggacagttaaccaggtgtatccgttctttacttcatggctacaatgaacaagcaatgtgcacaaattaccccgtctgtggactccctttgctccgagtgccctgcattgaatttcctgaaggtaaacgttgacgagcgccctctggtagcaagcgcggagaacgtgcgagtagtcccaagcttcaagatttacaaggacggcacgagagtgaaggagatggtctgccctagcttgcaggtcttgcgctattccgtgaggcactatgctgtctccagctcttgaggtccggcactcagttcgctggccctgttagtgtcaccacatgccaacatttcaccaacaaatctgtccctctatagtatcacagcatttcccccttcccatcgcgtcacttaggctcctcctaccgcaacatctctagaaccatttgatccaagcttaagcaattctcatgcctcgctttccaaagtgatgacttcaactcctgaagaaaggctccctgtggtggtgttcagggaataggaacatggaacattgagacgtatgtcaacccaataaattggatattgaagaatggctggatatagatgaaccagctgatatttatgttcttagctgtttacgtgcatctgttcgatctatggcttctcggcgctctc

SEQ ID NO: 219637 - DNA, 1640 bp, Zea Mays
gaagcgttccgcgagtgtgaggaggccgtccgcctcgatccggccagcggccgcgcgcacggccgcctcgccggcttatgcctcaggcttgggatggttgagaaggcaaagacgcacttcacactggctggaagtgcaaaccagtctgatccggctgagtggcagaagctgcatgaggtagagatccatcaaggcagatgcatggatgcaaggaaaattggagactggaagagtgcactcagggaagccgacgcagccatcgctgttggagcggactcctctcgattgcttcttgccttgaggtcagaagcgttgctttggttgcacaaattagaggaagctgatttgactattacaagcttgttgaaactggatgacgcgtcgttgccttcgacgccaaccagagtctcaggcatgtcagctgactcttatgtccatatcgtccaagccaaggtcaacgtgacatttggaaggttcgattcagctgtcgcactggctgagaaggctaagcttattgatggcgtgagctcagaggttgaagtgatcctaaacaacgtgagattagtcgcattggctcgagcccgggggaatgacctttttaaggcagcttgctggtcaaagctgggtcggtgggcaaaagctgttgaggactgcagcgaggccctaagagtccagcctaactacacaaaggctctgctaaggcgtgcggcgtcatatgcaaagcttgagcgctgggcggactgtgtgcgggactacgaggtgcttcgcaaggatcttcctggtgacactgaggttgcagagtccttgttccatgcccaagttgcattaaagacagcccgtggagaggtggtatctaatatgaagtttggaggggtagttgaagaaattatcagcttagagcaactccaagatgttatccgttcacctggtgtatccgttctttacttcatggctacaatgaacaagcaatgtgcacaaattaccccgtctgtggactccctttgctccgagtgccctgcattgaatttcctgaaggtaaacgttgacgagcgccctctggtagcaagcgcggagaacgtgcgagtagtcccaagcttcaagatttacaaggacggcacgagagtgaaggagatggtctgccctagcttgcaggtcttgcgctattccgtgaggcactatgctgtctccagctcttgaggtccggcactcagttcgctggccctgttagtgtcaccacatgccaacatttcaccaacaaatctgtccctctatagtatcacagcatttcccccttcccatcgcgtcacttaggctcctcctaccgcaacatctctagaaccatttgatccaagcttaagcaattctcatgcctcgctttccaaagtgatgacttcaactcctgaagaaaggctccctgtggtggtgttcagggaataggataacatgacgtgctccacctcgtagacggacctgtgccactactcatcgtcagcacgccatgacagccgcagcaacaaggtcacctcctctcggaacggtggccggttcctcgcctcccgccacaggaaaatatcactctcagatttcttcatctatgggtcggcgcaatccaagagtgacacacaccagcaatgaatggc

SEQ ID NO: 219638 - DNA, 1596 bp, Zea Mays
gaagcgttccgcgagtgtgaggaggccgtccgcctcgatccggccagcggccgcgcgcacggccgcctcgccggcttatgcctcaggcttgggatggttgagaaggcaaagacgcacttcacactggctggaagtgcaaaccagtctgatccggctgagtggcagaagctgcatgaggtagagatccatcaaggcagatgcatggatgcaaggaaaattggagactggaagagtgcactcagggaagccgacgcagccatcgctgttggagcggactcctctcgattgcttcttgccttgaggtcagaagcgttgctttggttgcacaaattagaggaagctgatttgactattacaagcttgttgaaactggatgacgcgtcgttgccttcgacgccaaccagagtctcaggcatgtcagctgactcttatgtccatatcgtccaagccaaggtcaacgtgacatttggaaggttcgattcagctgtcgcactggctgagaaggctaagcttattgatggcgtgagctcagaggttgaagtgatcctaaacaacgtgagattagtcgcattggctcgagcccgggggaatgacctttttaaggcagcttgctggtcaaagctgggtcggtgggcaaaagctgttgaggactgcagcgaggccctaagagtccagcctaactacacaaaggctctgctaaggcgtgcggcgtcatatgcaaagcttgagcgctgggcggactgtgtgcgggactacgaggtgcttcgcaaggatcttcctggtgacactgaggttgcagagtccttgttccatgcccaagttgcattaaagacagcccgtggagaggtggtatctaatatgaagtttggaggggtagttgaagaaattatcagcttagagcaactccaagatgttatccgttcacctggtgagtttctcctctacatgcacctagcctgttgtaggcatttcacctccttcttggttcttgttgtgctaagaagtggacagttaaccaggtgtatccgttctttacttcatggctacaatgaacaagcaatgtgcacaaattaccccgtctgtggactccctttgctccgagtgccctgcattgaatttcctgaaggtaaacgttgacgagcgccctctggtagcaagcgcggagaacgtgcgagtagtcccaagcttcaagatttacaaggacggcacgagagtgaaggagatggtctgccctagcttgcaggtcttgcgctattccgtgaggcactatgctgtctccagctcttgaggtccggcactcagttcgctggccctgttagtgtcaccacatgccaacatttcaccaacaaatctgtccctctatagtatcacagcatttcccccttcccatcgcgtcacttaggctcctcctaccgcaacatctctagaaccatttgatccaagcttaagcaattctcatgcctcgctttccaaagtgatgacttcaactcctgaagaaaggctccctgtggtggtgttcagggaataggttcttcaactgcaaaaggcatccagccactcattcggcctccgtcgaatcttgctacgggaaccgca

SEQ ID NO: 219639 - DNA, 1624 bp, Zea Mays
agaagcgttccgcgagtgtgaggaggccgtccgcctcgatccggccagcggccgcgcgcacggccgcctcgccggcttatgcctcaggcttgggatggttgagaaggcaaagacgcacttcacactggctggaagtgcaaaccagtctgatccggctgagtggcagaagctgcatgaggtagagatccatcaaggcagatgcatggatgcaaggaaaattggagactggaagagtgcactcagggaagccgacgcagccatcgctgttggagcggactcctctcgattgcttcttgccttgaggtcagaagcgttgctttggttgcacaaattagaggaagctgatttgactattacaagcttgttgaaactggatgacgcgtcgttgccttcgacgccaaccagagtctcaggcatgtcagctgactcttatgtccatatcgtccaagccaaggtcaacgtgacatttggaaggttcgattcagctgtcgcactggctgagaaggctaagcttattgatggcgtgagctcagaggttgaagtgatcctaaacaacgtgagattagtcgcattggctcgagcccgggggaatgacctttttaaggcaggcaagtttgctgaggcgtcgcttccagcctaactacacaaaggctctgctaaggcgtgcggcgtcatatgcaaagcttgagcgctgggcggactgtgtgcgggactacgaggtgcttcgcaaggatcttcctggtgacactgaggttgcagagtccttgttccatgcccaagttgcattaaagacagcccgtggagaggtggtatctaatatgaagtttggaggggtagttgaagaaattatcagcttagagcaactccaagatgttatccgttcacctggtgtatccgttctttacttcatggctacaatgaacaagcaatgtgcacaaattaccccgtctgtggactccctttgctccgagtgccctgcattgaatttcctgaaggtaaacgttgacgagcgccctctggtagcaagcgcggagaacgtgcgagtagtcccaagcttcaagatttacaaggacggcacgagagtgaaggagatggtctgccctagcttgcaggtcttgcgctattccgtgaggcactatgctgtctccagctcttgaggtccggcactcagttcgctggccctgttagtgtcaccacatgccaacatttcaccaacaaatctgtccctctatagtatcacagcatttcccccttcccatcgcgtcacttaggctcctcctaccgcaacatctctagaaccatttgatccaagcttaagcaattctcatgcctcgctttccaaagtgatgacttcaactcctgaagaaaggctccctgtggtggtgttcagggaataggtaaacacggctggctggttttctcattacatgtacatatattcccgtatagcaacacatcaaacccattgatagattggttcactgtggagaaaaggcggggttcggacttggatgaagagtacaggtctagttgccattgaatgtagagatggagaagatagatgggtcgtgttgttggtatggtacgtagagagacagaggagggaggtggctggtgtggttca

SEQ ID NO: 219640 - DNA, 1576 bp, Zea Mays
tagaaagagcagcagcaggccatcgagctggagggccgccgcttcatggggctgcatctcctcgacctcaagatcaggggccaccacctcggctcctcccccgccacgaccgtcgtggggcaaggcgagggcggcaagggcagtggcaatggcaatgccgtccagctggaggatgtcatcgtccaagcagatactcctacgaagatgaacagtaacagccttgcaatgagtgcgcctgcagctgctgtatctgctgcagccgatgcaggaggcgagcacgaggagcagcaggaagcagggcacggggaggaaggcgacggcagtcccaagcaggcagtcaaccttggggaagacgagaagacggaatctggccccgtcacagctccacccattgttgctcgtggattccaagaaagtggtggcgtggccgtggagcacatcttgcctgacagccccttcgcatccaccaccaacaaggaggcctcagctccaacggctcagaacgggggcatcagcaatggcagccctcaccatgtggcttcttcgcccctcttcccacctgcacccgccattgagctgcccccgtacaactcctgcttctttcaggcgcccaggttttctcctgggcatgaagccattgggctgtgaatacagagcaaaaaggggtctccttttcctctaatctgggagggctatcgatgaccccatcaagtggaggaaaggagtagaaagctttgattaacaaatactaggtgtatcttcagagagggacaacaacagcagcaacaaaaaagagagagagagagagaaacaagtctaggttgttttagctctaggcctaagtatatgatagtagtcctataatataaataataatagtcttttagtagctcctgccggtatcaagattcaagtgattaaaaccgtagatggcgtagtactagtaaaaactagacagctagtcttggcagccagttgtagtgaagtgacatggctgcatacagacatccaaaggaaacggacttggtaggtgccgtggacaaaatccttggccggacagacttggtgctgctgcagctgcagtgctgctgcacaaggaaaagtgatgagaccgagacgagaggggtgtactctgctgggaccagagcactcacgggtgcagagagactccacttcacctcatgagcaattctgcagggaccccccctctgaatcgtaggagcatgcaccaagcactccttgtcctggtctttcaccttttgctcatcttttcacccttgtagaaaacagcaggaggtagcagacagacagaggaatgggaaaaaaagtatttattagtcgtttatcttgttggtccatgctttttatattttgcttggttcccaaattaaatgaatatatatgtagagttgtcttagctcactattttaagtttgactagcttaagtacataatgaacgtgctttgtttgctttagatgtactttaacagaactggtttttttggttctggactctaaatatgccttaagatatctatgatcacacacgtgcgtatattcttctttagggctgat

SEQ ID NO: 219641 - DNA, 1534 bp, Zea Mays
tagaaagagcagcagcaggccatcgagctggagggccgccgcttcatggggctgcatctcctcgacctcaagatcaggggccaccacctcggctcctcccccgccacgaccgtcgtggggcaaggcgagggcggcaagggcagtggcaatggcaatgccgtccagctggaggatgtcatcgtccaagatactcctacgaagatgaacagtaacagccttgcaatgagtgcgcctgcagctgctgtatctgctgcagccgatgcaggaggcgagcacgaggagcagcaggaagcagggcacggggaggaaggcgacggcagtcccaagcaggcagtcaaccttggggaagacgagaagacggaatctggccccgtcacagctccacccattgttgctcgtggattccaagaaagtggtggcgtggccgtggagcacatcttgcctgacagccccttcgcatccaccaccaacaaggaggcctcagctccaacggctcagaacgggggcatcagcaatggcagccctcaccatgtggcttcttcgcccctcttcccacctgcacccgccattgagctgcccccgtacaactcctgcttctttcaggcgcccaggttttctcctgggcatgaagccattgggctgtgaatacagagcaaaaaggggtctccttttcctctaatctgggagggctatcgatgaccccatcaagtggaggaaaggagtagaaagctttgattaacaaatactaggtgtatcttcagagagggacaacaacagcagcaacaaaaaagagagagagagagagaaacaagtctaggttgttttagctctaggcctaagtatatgatagtagtcctataatataaataataatagtcttttagtagctcctgccggtatcaagattcaagtgattaaaaccgtagatggcgtagtactagtaaaaactagacagctagtcttggcagccagttgtagtgaagtgacatggctgcatacagacatccaaaggaaacagacttggtgctgctgcagctgcagtgctgctgcacaaggaaaagtgatgagaccgagacgagaggggtgtactctgctgggaccagagcactcacgggtgcagagagactccacttcacctcatgagcaattctgcagggaccccccctctgaatcgtaggagcatgcaccaagcactccttgtcctggtctttcaccttttgctcatcttttcacccttgtagaaaacagcaggaggtagcagacagacagaggaatgggaaaaaaagtatttattagtcgtttatcttgttggtccatgctttttatattttgcttggttcccaaattaaatgaatatatatgtagagttgtcttagctcactattttaagtttgactagcttaagtacataatgaacgtgctttgtttgctttagatgtactttaacagaactggtttttttggttctggactctaaatatgccttaagatatctatgatcacacacgtgcgtatattcttctttagggctgat

SEQ ID NO: 219642 - DNA, 1351 bp, Zea Mays
caagatactcctacgaagatgaacagtaacagccttgcaatgagtgcgcctgcagctgctgtatctgctgcagccgatgcaggaggcgagcacgaggagcagcaggaagcagggcacggggaggaaggcgacggcagtcccaagcaggcagtcaaccttggggaagacgagaagacggaatctggccccgtcacagctccacccattgttgctcgtggattccaagaaagtggtggcgtggccgtggagcacatcttgcctgacagccccttcgcatccaccaccaacaaggaggcctcagctccaacggctcagaacgggggcatcagcaatggcagccctcaccatgtggcttcttcgcccctcttcccacctgcacccgccattgagctgcccccgtacaactcctgcttctttcaggcgcccaggttttctcctgggcatgaagccattgggctgtgaatacagagcaaaaaggggtctccttttcctctaatctgggagggctatcgatgaccccatcaagtggaggaaaggagtagaaagctttgattaacaaatactaggtgtatcttcagagagggacaacaacagcagcaacaaaaaagagagagagagagagaaacaagtctaggttgttttagctctaggcctaagtatatgatagtagtcctataatataaataataatagtcttttagtagctcctgccggtatcaagattcaagtgattaaaaccgtagatggcgtagtactagtaaaaactagacagctagtcttggcagccagttgtagtgaagtgacatggctgcatacagacatccaaaggaaacagacttggtgctgctgcagctgcagtgctgctgcacaaggaaaagtgatgagaccgagacgagaggggtgtactctgctgggaccagagcactcacgggtgcagagagactccacttcacctcatgagcaattctgcagggaccccccctctgaatcgtaggagcatgcaccaagcactccttgtcctggtctttcaccttttgctcatcttttcacccttgtagaaaacagcaggaggtagcagacagacagaggaatgggaaaaaaagtatttattagtcgtttatcttgttggtccatgctttttatattttgcttggttcccaaattaaatgaatatatatgtagagttgtcttagctcactattttaagtttgactagcttaagtacataatgaacgtgctttgtttgctttagatgtactttaacagaactggtttttttggttctggactctaaatatgccttaagatatctatgatcacacacgtgcgtatattcttctttagggctgat

SEQ ID NO: 219643 - DNA, 1803 bp, Zea Mays
caaaatgttggtgaccgtctgtatgacgaagaactatatgaagctgcaaaaatcatctatgctttcatctcaaactgggctaagctggctgttaccctggttaagctgaagcagtttcaaggtgctgtggatgctgctcgcaaggctaacagtgccaaaacatggaaggaggtctgctttgcttgtgttgacgccgaggagttccgtcttgcacaaatttgtggtctcaatattattgttcaggttgatgacttggaagaagtcagtgagtactaccaaaatagaggatgcttcaatgaactcattgctctcatggagagtggtcttggacttgaacgtgcacacatgggcatcttcacagaattgggagttctatatgctagataccgctctgagaagcttatggaacacatcaaacttttctccacacgtctcaatattcctaagcttattcgagcttgtgatgaacagcagcactggaaagaacttacctacctgtacatacaatatgatgaatttgacaatgctgccaccactattatgaaccactctccagatgcatgggatcatatgcagttcaaggatgtttgtgttaaagttgcaaatgttgagctatactacaaggcagttcacttctatttgcaggagcatcctgatctcatcaatgatatgctgaatgtgcttgcacttcgtttagatcataccagagttgtagacataatgcgcaaggctggtcaattgcatcttgtgaaaccatatatggttgcagttcagagtaacaatgtctctgctgtgaatgaagccttgaacgaactttatgttgaagaggaagactacgagagactccgtgaatcagttgatatgcatgacaactttgaccaaataggtcttgcccagaagcttgagaagcatgaattgctggagatgaggaggattgctgcctacatttacaagaaggctggcaggtggaagcaatccattgctctatcaaagaaagataacatgtacaaggattgtatggagacatgctcacaatctggtgaccgtgaactgtcagaggacttgcttgtctatttcatcgagcagggtaagaaagaatgctttgcttcctgcctcttcatttgctacgacctgatccggccggatgtcgctcttgagcttgcatggatgaataacatggtggactttgccttcccgtacctgttgcagttcatccgtgaatacactagcaaggtggatgatttagtgaaggacaaaatcgagtcacagaatgaagaaagagccaaagagaaggaggagaaagatcttgtggctcagcagaacatgtatgcgcaactgcttcctcttgccctgcctgctccgccaatgcccggcatgggtggccctccacctccgatgggcggaatgggcatgcctccgatgggcgggatgggcatgccgccgatgggccctggtccgatgccagcattcgggatgccaccaatgggaagctactgagatgttttttttggcagagagcttagatgatgatttgatatgttcctgtgaaatttttggcgagtgaaatcttggccagagtcatcggataggacggggatgattaggttggttgagcatgagctggtgaaagctggtaccatttgtatagtgtgatgaaatctttgtagacattttgcttgtgtaataataatacttgttcgcacagcgaaggacaaacaaatgtatgctgacttgtgacgtcctgttcattgcaatttgttagtatgtgttttcttggaagaagacaataacattcgatagata

SEQ ID NO: 219644 - DNA, 2562 bp, Zea Mays
caagaggtcgccattattgccaacatagagtgcgcgtgatggcgctttcagcttcccgagttcagcaggcggaagaactgctgcaacgacctgctgagaggcagctgatgaggagccagcttgctgcagccgccaggagcatcaactggagctacgccctcttctggtccatttcagacactcaaccaggggtgctgacgtggacggacgggttctacaacggcgaggtgaagacgcggaagatctccaactccgtggagctgacatccgaccacctcgtcatgcagaggagcgaccagctccgggagctctacgaggccctgctgtcgggcgagggcgaccgccgcgctgcgcctgcgcggccggccggctcgctgtcgccggaggacctcggggacaccgagtggtattacgtggtctccatgacctacgccttccggccaggccaagggttgcccggcaggagtttcgcgagcgacgagcatgtctggctgtgcaacgcgcacctcgccggcagcaaagccttcccccgcgcgctcctggccaagtcaatcctctgcatcccggttatgggcggcgtgcttgagcttggtacaactgacacggtgccggaggccccggacttggtcagccgagcaaccgcggctttctgggagccgcagtgcccgacgtactcggaagagccgagctccagcccgtcaggacgagcaaacgagaccggcgaggccgcagcagacgacggcacgtttgcgttcgaggaactcgaccacaataatggcatggacatagaggcgatgaccgccgccgggggacacgggcaggaggaggagctaagactaagagaagccgaggccctgtcagacgacgcaagcctggagcacatcaccaaggagatcgaggagttctacagcctctgcgacgaaatggacctgcaggcgctaccactaccgctagaggacggctggaccgtggacgcgtccaatttcgaggtcccctgctcttccccgcagccagcgccgcctccggtggacagggctaccgctaacgtcgccgccgacgcctcaagggcacccgtctacggctctcgcgcgacgagtttcatggcttggacgaggtcctcgcagcagtcgtcgtgctccgacgacgcggcgcccgcagcagtagtgccggccatcgaggagccgcagagattgctgaagaaagtggtggccggcggcggtgcttgggagagctgtggcggcgcgacgggagcagcacaggaaatgagtggcactggcaccaagaaccacgtcatgtcggagcgaaagcgacgagagaagctcaacgagatgttcctcgtcctcaagtcactgcttccgtccattcacagggtgaacaaagcgtcgatcctcgccgaaacgatagcctacctcaaggagcttcagagaagggtgcaagagctggagtccagtagggaacctgcgtcgcgcccatccgaaacgacgacaaggctaataacaaggccctcccgtggcaataatgagagtgtgaggaaggaggtctgcgcgggctccaagaggaagagcccagagctcggcagagacgacgtggagcgccccccggtcctcatcatggacgccggcaccagcaacgtcaccgtcaccgtctcggacaaggacgtgctcctggaggtgcagtgccggtgggaggagctcctgatgacgcgagtgttcgacgccatcaagagcctccatttggacgtcctctcggttcaggcttcagcgccagatggcttcatggggcttaagatacgagctcagtttgctggctccggtgccgtcgtgccctggatgatcagcgaggctcttcgcaaagctatagggaagcggtgaaggggcagctggaaatttggacatcgacgggcatggaaggcttcatgggatcgaagcaaagatgtatttcttgtttctttagataacagacatgaatcggacctctatatcaacaattatattggcatgaatacttagactccagcccttaacacgtagaaactcaaaaaaagaagaaaggaagctaaagactaagcgtaaggtatatttggaagtaaattgtttttatagtttctaagcaatcccatggtttataggaatgctagagtgtttatttatggcataaggtgtttggttgcattcataaaaactatattttcaaagtcatagcattctagatacatgatatttttgtaatattggaaactacactccaacgcaaagtttttatgacatggctaacttttgtctaaatatcataacttacaacgtcctatccaaacaatgtttctcaaaaccatggtatccttagagctagctaaaactatggtattatcgtgatcattgcaaagtataatattgtaaaaccatgattttgagaaacattgttgtcaaataggaccttcaatctctttcaaacttgaattatcagtgtgcaacaacactccttcacgtctcttgtctacatagagacaaccgatgacataattgatctacaggaaatagttaaccattgcttgatgcttttgtc

SEQ ID NO: 219645 - DNA, 2924 bp, Zea Mays
ataggcgttcgatccccttagcgcggaggagagctcctccggttcttctctacccttcgcatggaagttcttgcattgcttcgttgcttctctagtttcttccttctacgtctttccagcatacgcatgcccctcgtccgccggttcacgaggcatcgtctgatgatcagtagataataagcaatataatactgatctagaatcgagttgttgtactcttcgcagataggcgcgtgatggcgctttcagcttcccgagttcagcaggcggaagaactgctgcaacgacctgctgagaggcagctgatgaggagccagcttgctgcagccgccaggagcatcaactggagctacgccctcttctggtccatttcagacactcaaccaggggtgctgacgtggacggacgggttctacaacggcgaggtgaagacgcggaagatctccaactccgtggagctgacatccgaccacctcgtcatgcagaggagcgaccagctccgggagctctacgaggccctgctgtcgggcgagggcgaccgccgcgctgcgcctgcgcggccggccggctcgctgtcgccggaggacctcggggacaccgagtggtattacgtggtctccatgacctacgccttccggccaggccaagggttgcccggcaggagtttcgcgagcgacgagcatgtctggctgtgcaacgcgcacctcgccggcagcaaagccttcccccgcgcgctcctggccaaggtatgcacgtttctcacttgttctttctggacgtgtactgttgccttccgtacgtgcatggttttcactagtcggttgcgatctttgttgaaatcgtgaactacgtgcatgcgtgaacgaccttgtcgtacctccctccggtcaagcagagcgcgtccattcagtcaatcctctgcatcccggttatgggcggcgtgcttgagcttggtacaactgacacggtgccggaggccccggacttggtcagccgagcaaccgcggctttctgggagccgcagtgcccgacgtactcggaagagccgagctccagcccgtcaggacgagcaaacgagaccggcgaggccgcagcagacgacggcacgtttgcgttcgaggaactcgaccacaataatggcatggacatagaggcgatgaccgccgccgggggacacgggcaggaggaggagctaagactaagagaagccgaggccctgtcagacgacgcaagcctggagcacatcaccaaggagatcgaggagttctacagcctctgcgacgaaatggacctgcaggcgctaccactaccgctagaggacggctggaccgtggacgcgtccaatttcgaggtcccctgctcttccccgcagccagcgccgcctccggtggacagggctaccgctaacgtcgccgccgacgcctcaagggcacccgtctacggctctcgcgcgacgagtttcatggcttggacgaggtcctcgcagcagtcgtcgtgctccgacgacgcggcgcccgcagcagtagtgccggccatcgaggagccgcagagattgctgaagaaagtggtggccggcggcggtgcttgggagagctgtggcggcgcgacgggagcagcacaggaaatgagtggcactggcaccaagaaccacgtcatgtcggagcgaaagcgacgagagaagctcaacgagatgttcctcgtcctcaagtcactgcttccgtccattcacagggtgaacaaagcgtcgatcctcgccgaaacgatagcctacctcaaggagcttcagagaagggtgcaagagctggagtccagtagggaacctgcgtcgcgcccatccgaaacgacgacaaggctaataacaaggccctcccgtggcaataatgagagtgtgaggaaggaggtctgcgcgggctccaagaggaagagcccagagctcggcagagacgacgtggagcgccccccggtcctcatcatggacgccggcaccagcaacgtcaccgtcaccgtctcggacaaggacgtgctcctggaggtgcagtgccggtgggaggagctcctgatgacgcgagtgttcgacgccatcaagagcctccatttggacgtcctctcggttcaggcttcagcgccagatggcttcatggggcttaagatacgagctcagtttgctggctccggtgccgtcgtgccctggatgatcagcgaggctcttcgcaaagctatagggaagcggtgaaggggcagctggaaatttggacatcgacgggcatggaaggcttcatgggatcgaagcaaagatgtatttcttgtttctttagataacagacatgaatcggacctctatatcaacaattatattggcatgaatacttagactccagcccttaacacgtagaaactcaaaaaaagaagaaaggaagctaaagactaagcgtaaggtatatttggaagtaaattgtttttatagtttctaagcaatcccatggtttataggaatgctagagtgtttatttatggcataaggtgtttggttgcattcataaaaactatattttcaaagtcatagcattctagatacatgatatttttgtaatattggaaactacactccaacgcaaagtttttatgacatggctaacttttgtctaaatatcataacttacaacgtcctatccaaacaatgtttctcaaaaccatggtatccttagagctagctaaaactatggtattatcgtgatcattgcaaagtataatattgtaaaaccatgattttgagaaacattgttgtcaaataggaccttcaatctctttcaaacttgaattatcagtgtgcaacaacactccttcacgtctcttgtctacatagagacaaccgatgacataattgatctacaggaaatagttaaccattgcttgatgcttttgtc

SEQ ID NO: 219646 - DNA, 2396 bp, Zea Mays
ccaaatggctcgaatgtcctcaagggtgctgacgtggacggacgggttctacaacggcgaggtgaagacgcggaagatctccaactccgtggagctgacatccgaccacctcgtcatgcagaggagcgaccagctccgggagctctacgaggccctgctgtcgggcgagggcgaccgccgcgctgcgcctgcgcggccggccggctcgctgtcgccggaggacctcggggacaccgagtggtattacgtggtctccatgacctacgccttccggccaggccaagggttgcccggcaggagtttcgcgagcgacgagcatgtctggctgtgcaacgcgcacctcgccggcagcaaagccttcccccgcgcgctcctggccaagtcaatcctctgcatcccggttatgggcggcgtgcttgagcttggtacaactgacacggtgccggaggccccggacttggtcagccgagcaaccgcggctttctgggagccgcagtgcccgacgtactcggaagagccgagctccagcccgtcaggacgagcaaacgagaccggcgaggccgcagcagacgacggcacgtttgcgttcgaggaactcgaccacaataatggcatggacatagaggcgatgaccgccgccgggggacacgggcaggaggaggagctaagactaagagaagccgaggccctgtcagacgacgcaagcctggagcacatcaccaaggagatcgaggagttctacagcctctgcgacgaaatggacctgcaggcgctaccactaccgctagaggacggctggaccgtggacgcgtccaatttcgaggtcccctgctcttccccgcagccagcgccgcctccggtggacagggctaccgctaacgtcgccgccgacgcctcaagggcacccgtctacggctctcgcgcgacgagtttcatggcttggacgaggtcctcgcagcagtcgtcgtgctccgacgacgcggcgcccgcagcagtagtgccggccatcgaggagccgcagagattgctgaagaaagtggtggccggcggcggtgcttgggagagctgtggcggcgcgacgggagcagcacaggaaatgagtggcactggcaccaagaaccacgtcatgtcggagcgaaagcgacgagagaagctcaacgagatgttcctcgtcctcaagtcactgcttccgtccattcacagggtgaacaaagcgtcgatcctcgccgaaacgatagcctacctcaaggagcttcagagaagggtgcaagagctggagtccagtagggaacctgcgtcgcgcccatccgaaacgacgacaaggctaataacaaggccctcccgtggcaataatgagagtgtgaggaaggaggtctgcgcgggctccaagaggaagagcccagagctcggcagagacgacgtggagcgccccccggtcctcatcatggacgccggcaccagcaacgtcaccgtcaccgtctcggacaaggacgtgctcctggaggtgcagtgccggtgggaggagctcctgatgacgcgagtgttcgacgccatcaagagcctccatttggacgtcctctcggttcaggcttcagcgccagatggcttcatggggcttaagatacgagctcagtttgctggctccggtgccgtcgtgccctggatgatcagcgaggctcttcgcaaagctatagggaagcggtgaaggggcagctggaaatttggacatcgacgggcatggaaggcttcatgggatcgaagcaaagatgtatttcttgtttctttagataacagacatgaatcggacctctatatcaacaattatattggcatgaatacttagactccagcccttaacacgtagaaactcaaaaaaagaagaaaggaagctaaagactaagcgtaaggtatatttggaagtaaattgtttttatagtttctaagcaatcccatggtttataggaatgctagagtgtttatttatggcataaggtgtttggttgcattcataaaaactatattttcaaagtcatagcattctagatacatgatatttttgtaatattggaaactacactccaacgcaaagtttttatgacatggctaacttttgtctaaatatcataacttacaacgtcctatccaaacaatgtttctcaaaaccatggtatccttagagctagctaaaactatggtattatcgtgatcattgcaaagtataatattgtaaaaccatgattttgagaaacattgttgtcaaataggaccttcaatctctttcaaacttgaattatcagtgtgcaacaacactccttcacgtctcttgtctacatagagacaaccgatgacataattgatctacaggaaatagttaaccattgcttgatgcttttgtc

SEQ ID NO: 219647 - DNA, 2613 bp, Zea Mays
atggaatccctgggtggctcacaaattagcggggaggttggccttctgcagcagcgcttggagaagaagttgtcaagggtgctgacgtggacggacgggttctacaacggcgaggtgaagacgcggaagatctccaactccgtggagctgacatccgaccacctcgtcatgcagaggagcgaccagctccgggagctctacgaggccctgctgtcgggcgagggcgaccgccgcgctgcgcctgcgcggccggccggctcgctgtcgccggaggacctcggggacaccgagtggtattacgtggtctccatgacctacgccttccggccaggccaagggttgcccggcaggagtttcgcgagcgacgagcatgtctggctgtgcaacgcgcacctcgccggcagcaaagccttcccccgcgcgctcctggccaaggtatgcacgtttctcacttgttctttctggacgtgtactgttgccttccgtacgtgcatggttttcactagtcggttgcgatctttgttgaaatcgtgaactacgtgcatgcgtgaacgaccttgtcgtacctccctccggtcaagcagagcgcgtccattcagtcaatcctctgcatcccggttatgggcggcgtgcttgagcttggtacaactgacacggtgccggaggccccggacttggtcagccgagcaaccgcggctttctgggagccgcagtgcccgacgtactcggaagagccgagctccagcccgtcaggacgagcaaacgagaccggcgaggccgcagcagacgacggcacgtttgcgttcgaggaactcgaccacaataatggcatggacatagaggcgatgaccgccgccgggggacacgggcaggaggaggagctaagactaagagaagccgaggccctgtcagacgacgcaagcctggagcacatcaccaaggagatcgaggagttctacagcctctgcgacgaaatggacctgcaggcgctaccactaccgctagaggacggctggaccgtggacgcgtccaatttcgaggtcccctgctcttccccgcagccagcgccgcctccggtggacagggctaccgctaacgtcgccgccgacgcctcaagggcacccgtctacggctctcgcgcgacgagtttcatggcttggacgaggtcctcgcagcagtcgtcgtgctccgacgacgcggcgcccgcagcagtagtgccggccatcgaggagccgcagagattgctgaagaaagtggtggccggcggcggtgcttgggagagctgtggcggcgcgacgggagcagcacaggaaatgagtggcactggcaccaagaaccacgtcatgtcggagcgaaagcgacgagagaagctcaacgagatgttcctcgtcctcaagtcactgcttccgtccattcacagggtgaacaaagcgtcgatcctcgccgaaacgatagcctacctcaaggagcttcagagaagggtgcaagagctggagtccagtagggaacctgcgtcgcgcccatccgaaacgacgacaaggctaataacaaggccctcccgtggcaataatgagagtgtgaggaaggaggtctgcgcgggctccaagaggaagagcccagagctcggcagagacgacgtggagcgccccccggtcctcatcatggacgccggcaccagcaacgtcaccgtcaccgtctcggacaaggacgtgctcctggaggtgcagtgccggtgggaggagctcctgatgacgcgagtgttcgacgccatcaagagcctccatttggacgtcctctcggttcaggcttcagcgccagatggcttcatggggcttaagatacgagctcagtttgctggctccggtgccgtcgtgccctggatgatcagcgaggctcttcgcaaagctatagggaagcggtgaaggggcagctggaaatttggacatcgacgggcatggaaggcttcatgggatcgaagcaaagatgtatttcttgtttctttagataacagacatgaatcggacctctatatcaacaattatattggcatgaatacttagactccagcccttaacacgtagaaactcaaaaaaagaagaaaggaagctaaagactaagcgtaaggtatatttggaagtaaattgtttttatagtttctaagcaatcccatggtttataggaatgctagagtgtttatttatggcataaggtgtttggttgcattcataaaaactatattttcaaagtcatagcattctagatacatgatatttttgtaatattggaaactacactccaacgcaaagtttttatgacatggctaacttttgtctaaatatcataacttacaacgtcctatccaaacaatgtttctcaaaaccatggtatccttagagctagctaaaactatggtattatcgtgatcattgcaaagtataatattgtaaaaccatgattttgagaaacattgttgtcaaataggaccttcaatctctttcaaacttgaattatcagtgtgcaacaacactccttcacgtctcttgtctacatagagacaaccgatgacataattgatctacaggaaatagttaaccattgcttgatgcttttgtc

SEQ ID NO: 219648 - DNA, 2595 bp, Zea Mays
gtctgttttcctacggtcgtccattttgttctcccgttccgcatagcgtacgctcgctccctctctatctctctctctcggttctcccgttcccccgcgcggcgatctctctcgtggcgaccagcgggcgaccgccgcacgcccaggtcgtcattggctcctcagccaggtgctgttcgggcccctaaactgggcgccggcgacgagcacgcgccaggactgtaatctgatctcgtggtggtatggttcgtcctaggattctcgtggcttgttcatgctccgagactccgagttgtgctttacctcgaattgctgcagtatccgtagggggcatgattgatggtggaacatcctcaccagtgtcagaaatgtcaatgtagctctaacgttcatttctcagtttgctgaagtaaacgatttcgggatgggtttgcctcaaattcctgtggttaaggaggaagagcctactgaagtgagtacacctgccggttctagtttcagtgtcgatggcccctgcgattcgggtaaacttctcgagggaagctcaagtggaagttggtttcagaacccatccatcagcgacttcaagagaaaatttgcaccaggtgctgcttcgaatggattaaatagtcagttcagaactagacatgccgttgatgatcctgcgggctaccaaagcctgaatcctaaaccaagagatccaaattatagatcatgcactaaaatcaaatctactctacatatacctgcaatgagggttgttgggtttgattcaggaactgatggttctaccgggggccctgatataatggtatctcacaaaatgcattcatctttagtcattggtaattgtgattcatcagttgtacatcacgaagttcaggcaaggaaaagggtgttgtcaccattaactaatgcgcttcctgctggacagttctatgggaatgcgctgaatattggttccggcgatgaaaaagttcagaaccctcgttgtgttagacagctctcttattctggcttccatgacagtaaaaaagctaacactggagctcttgattcctttcagccatctactaggtcagaattgagatactccgattggagtacagggcaggggttctgtaagtttagttctaacacattcactgatggtcctttgcttgagggtagggaattattttcatgctcagatcaacctggagttgaagggattatgaaccttgcaaaggtgcctgcaagattgtcacattctcctccacccactctttctccactccgtccaaaatggatgcatagaatgaaggctgcaagagctcagagggatttgacgggacgaattgaaaatgacatcattgatttgaaggaaatgggaaggtcaaattttgacgattattcagaatatgtcggtacgataaggatgggtgatatactagaagaaaccagtattttgcatgatggatttgatacaatgatccctaagagaaattttcataggagataccggtgcttgggtccagaatctgcccctgtgtctacacacattgaatgtattaatagctcgaacctcctccctgtaaggaggtcattagttggctcctttgaggaatctctcttatctggtcgctattcatgtggaaaagacaatcagagtattgatggttttctggctattcttaatgtgactggcggtagtttttctcccccaactcagaagtttccgtttacagtgagcagcattgatgaagatagctccctgttgtactactcgtcgattgatcttgcggggaggttgcctacaaacaataccaaaggcccaaaacttaaaagaagcctcagtagcagtgattcacggtcaacaaatagccgattacgcattcccgtgaaaggccgcatacaactggtggttagtaacccagagaagacaccacttcacacctttttctgtacctatgatttgagtgacatgcctgctggaaccaagactttcatgcggcaaaagatcactctatcctctgcttctccctctcatccgaccagagaagaaagcaaggccagtgatgtaaaggtcgagtcagtccagtgtggaagtgaacttagagagttcggggctctattttctgaatgttctgacaatgggcatgagttggaaaagggacgttctgcagatatggaatgtttctccatggaatgtgacgttagagaaccaaatgaaaatggtacttcggggaattcagaaaatgatgctaatgctgaggggtgctgctgtcaaataaactcatgtgaaggtggaaagatatatttcaacagatctcccaaggtcaatgatattccagctggaggggttctgcggtatgctttgcacttacgttttctgagccccttctccaagaagtcatcaaagtcaaggtatcattgcaaattggatatgtcatcacaaccacacagtcgcagtaggactgaggaagagagaagattttatctttacaatgatattagagttgtctttcctcagaggcactcagactctgacgaaggcgagattaacccatctctgccactaactgaaaatgctggtcgtagatggatggagtaaag

SEQ ID NO: 219649 - DNA, 2791 bp, Zea Mays
ttcctttcgtctgttttcctacggtcgtccattttgttctcccgttccgcatagcgtacgctcgctccctctctatctctctctctcggttctcccgttcccccgcgcggcgatctctctcgtggcgaccagcgggcgaccgccgcacgcccaggtcgtcattggctcctcagccaggtgctgttcgggcccctaaactgggcgccggcgacgagcacgcgccaggactgtaatctgatctcgtggtggtatggttcgtcctaggattctcgtggcttgttcatgctccgagactccgagttgtgctttacctcgaattgctgcagtatccgtagggggcatgattgatggtggaacatcctcaccagtgtcagaaatgtcaatgtagctctaacgttcatttctcagtttgctgaagtaaacgatttcgggatgggtttgcctcaaattcctgtggttaaggaggaagagcctactgaagtgagtacacctgccggttctagtttcagtgtcgatggcccctgcgattcgggtaaacttctcgagggaagctcaagtggaagttggtttcagaacccatccatcagcgacttcaagagaaaatttgcaccaggtgctgcttcgaatggattaaatagtcagttcagaactagacatgccgttgatgatcctgcgggctaccaaagcctgaatcctaaaccaagagatccaaattatagatcatgcactaaaatcaaatctactctacatatacctgcaatgagggttgttgggtttgattcaggaactgatggttctaccgggggccctgatataatggtatctcacaaaatgcattcatctttagtcattggtaattgtgattcatcagttgtacatcacgaagttcaggcaaggaaaagggtgttgtcaccattaactaatgcgcttcctgctggacagttctatgggaatgcgctgaatattggttccggcgatgaaaaagttcagaaccctcgttgtgttagacagctctcttattctggcttccatgacagtaaaaaagctaacactggagctcttgattcctttcagccatctactaggtcagaattgagatactccgattggagtacagggcaggggttctgtaagtttagttctaacacattcactgatggtcctttgcttgagggtagggaattattttcatgctcagatcaacctggagttgaagggattatgaaccttgcaaaggtgcctgcaagattgtcacattctcctccacccactctttctccactccgtccaaaatggatgcatagaatgaaggctgcaagagctcagagggatttgacgggacgaattgaaaatgacatcattgatttgaaggaaatgggaaggtcaaattttgacgattattcagaatatgtcggtacgataaggatgggtgatatactagaagaaaccagtattttgcatgatggatttgatacaatgatccctaagagaaattttcataggagataccggtgcttgggtccagaatctgcccctgtgtctacacacattgaatgtattaatagctcgaacctcctccctgtaaggaggtcattagttggctcctttgaggaatctctcttatctggtcgctattcatgtggaaaagacaatcagagtattgatggttttctggctattcttaatgtgactggcggtagtttttctcccccaactcagaagtttccgtttacagtgagcagcattgatgaagatagctccctgttgtactactcgtcgattgatcttgcggggaggttgcctacaaacaataccaaaggcccaaaacttaaaagaagcctcagtagcagtgattcacggtcaacaaatagccgattacgcattcccgtgaaaggccgcatacaactggtggttagtaacccagagaagacaccacttcacacctttttctgtacctatgatttgagtgacatgcctgctggaaccaaggttctgacaatgggcatgagttggaaaagggacgttctgcagatatggaatgtttctccatggaatgtgacgttagagaaccaaatgaaaatggtacttcggggaattcagaaaatgatgctaatgctgaggggtgctgctgtcaaataaactcatgtgaaggtggaaagatatatttcaacagatctcccaaggtcaatgatattccagctggaggggttctgcggtatgctttgcacttacgttttctgagccccttctccaagaagtcatcaaagtcaaggtatcattgcaaattggatatgtcatcacaaccacacagtcgcagtaggactgaggaagagagaagattttatctttacaatgatattagagttgtctttcctcagaggcactcagactctgacgaaggcgagctgcgggttgagcatgacttcccagcaaatcccaagtattttgacataagcaactaagaactccttgcacactcgtgaagctgcagataaaatttgtacataccatttcgtcactaatcaatctttactgcttattaccatcgatgtacagactaaccttgcaatgaaattatttacttcatgtatctatatattttttatgtataaggtagtgcttgtggcttccactagctggtagtagaggtttggttatatcggcttgtgagaccgtcgaagctgattgatcgcgggctgtttgggtaccaggttagaatctactaggatcattctgaatgattacggggaggctacgctagcgcaaaacaaaatttttaaccccataaaac

SEQ ID NO: 219650 - DNA, 2520 bp, Zea Mays
gtctgttttcctacggtcgtccattttgttctcccgttccgcatagcgtacgctcgctccctctctatctctctctctcggttctcccgttcccccgcgcggcgatctctctcgtggcgaccagcgggcgaccgccgcacgcccaggtcgtcattggctcctcagccaggtgctgttcgggcccctaaactgggcgccggcgacgagcacgcgccaggactgtaatctgatctcgtggtggtatggttcgtcctaggattctcgtggcttgttcatgctccgagactccgagttgtgctttacctcgaattgctgcagtatccgtagggggcatgattgatggtggaacatcctcaccagtgtcagaaatgtcaatgtagctctaacgttcatttctcagtttgctgaagtaaacgatttcgggatgggtttgcctcaaattcctgtggttaaggaggaagagcctactgaagtgagtacacctgccggttctagtttcagtgtcgatggcccctgcgattcgggtaaacttctcgagggaagctcaagtggaagttggtttcagaacccatccatcagcgacttcaagagaaaatttgcaccaggtgctgcttcgaatggattaaatagtcagttcagaactagacatgccgttgatgatcctgcgggctaccaaagcctgaatcctaaaccaagagatccaaattatagatcatgcactaaaatcaaatctactctacatatacctgcaatgagggttgttgggtttgattcaggaactgatggttctaccgggggccctgatataatggtatctcacaaaatgcattcatctttagtcattggtaattgtgattcatcagttgtacatcacgaagttcaggcaaggaaaagggtgttgtcaccattaactaatgcgcttcctgctggacagttctatgggaatgcgctgaatattggttccggcgatgaaaaagttcagaaccctcgttgtgttagacagctctcttattctggcttccatgacagtaaaaaagctaacactggagctcttgattcctttcagccatctactaggtcagaattgagatactccgattggagtacagggcaggggttctgtaagtttagttctaacacattcactgatggtcctttgcttgagggtagggaattattttcatgctcagatcaacctggagttgaagggattatgaaccttgcaaaggtgcctgcaagattgtcacattctcctccacccactctttctccactccgtccaaaatggatgcatagaatgaaggctgcaagagctcagagggatttgacgggacgaattgaaaatgacatcattgatttgaaggaaatgggaaggtcaaattttgacgattattcagaatatgtcggtacgataaggatgggtgatatactagaagaaaccagtattttgcatgatggatttgatacaatgatccctaagagaaattttcataggagataccggtgcttgggtccagaatctgcccctgtgtctacacacattgaatgtattaatagctcgaacctcctccctgtaaggaggtcattagttggctcctttgaggaatctctcttatctggtcgctattcatgtggaaaagacaatcagtgagcagcattgatgaagatagctccctgttgtactactcgtcgattgatcttgcggggaggttgcctacaaacaataccaaaggcccaaaacttaaaagaagcctcagtagcagtgattcacggtcaacaaatagccgattacgcattcccgtgaaaggccgcatacaactggtggttagtaacccagagaagacaccacttcacacctttttctgtacctatgatttgagtgacatgcctgctggaaccaagactttcatgcggcaaaagatcactctatcctctgcttctccctctcatccgaccagagaagaaagcaaggccagtgatgtaaaggtcgagtcagtccagtgtggaagtgaacttagagagttcggggctctattttctgaatgttctgacaatgggcatgagttggaaaagggacgttctgcagatatggaatgtttctccatggaatgtgacgttagagaaccaaatgaaaatggtacttcggggaattcagaaaatgatgctaatgctgaggggtgctgctgtcaaataaactcatgtgaaggtggaaagatatatttcaacagatctcccaaggtcaatgatattccagctggaggggttctgcggtatgctttgcacttacgttttctgagccccttctccaagaagtcatcaaagtcaaggtatcattgcaaattggatatgtcatcacaaccacacagtcgcagtaggactgaggaagagagaagattttatctttacaatgatattagagttgtctttcctcagaggcactcagactctgacgaaggcgagtggtcggttcttactgtgaaggcgcgccccaagagatagggacgctagtgacgcactgcc

SEQ ID NO: 219651 - DNA, 922 bp, Zea Mays
atactatgctgtttcaccactgagattctcgatggatttgatgttcagagaactactgggtttgccgatacccagaagagatatgttgatcttacacgttcggtaatagcatactatgatgcaagtttctcgatcgttggtaaagcttcccctgtttgcccaacctacgatgacttcaagagaaagtgttatgatcttaagaagaaaacagtgagcgacatatttggctgtcagcttatgcaggtaccacaagtaacagaagaagctgcacaagctgttgtagagctctatccaacccctttgttactggcaaaggcatactctatacttggtggcgatacctctgcacaagagaagatgctaaagaagaagaacgagatggtaaatgcaggagcaagccgaaacatatttcaccttatctggggtgacggatgaaaaatactctggactggaaccagttgcgggccaactgaactttggtggcttatggtgtcaccgtcgtggtgaccatcttttgtgtctccgagatttagaggctcccatgttctaaagcaaatagtggctccatagaacactagggatctagattaggaagagtttctctctacgtcgcgtctagagagtactctgctgtggtgtcgtggttgcacagtggaatgaagtggtcccttggatttacgtggtcgggatttcgtgtatcggtctgggttgtctggattatgtgctgtctcgagctacctcggggctgttaagtctacaggatagcataaaatatcgcagtgtacctacagggaagattgtatgggtcgcccatgtgttccatggtcggcgccttgtctggtcatctttggctgaggccctcctacatacaatgggtgtcgctttggctggccaagacaagagcagactgccctgccgtttg

SEQ ID NO: 219652 - DNA, 904 bp, Zea Mays
gctcaagtcacctgggagatcaatactatgagaactactgggtttgccgatacccagaagagatatgttgatcttacacgttcggtaatagcatactatgatgcaagtttctcgatcgttggtaaagcttcccctgtttgcccaacctacgatgacttcaagagaaagtgttatgatcttaagaagaaaacagtgagcgacatatttggctgtcagcttatgcaggtaccacaagtaacagaagaagctgcacaagctgttgtagagctctatccaacccctttgttactggcaaaggcatactctatacttggtggcgatacctctgcacaagagaagatgctaaagaagaagaacgagatggtaaatgcaggagcaagccgaaacatatttcaccttatctggggtgacggatgaaaaatactctggactggaaccagttgcgggccaactgaactttggtggcttatggtgtcaccgtcgtggtgaccatcttttgtgtctccgagatttagaggctcccatgttctaaagcaaatagtggctccatagaacactagggatctagattaggaagagtttctctctacgtcgcgtctagagagtactctgctgtggtgtcgtggttgcacagtggaatgaagtggtcccttggatttacgtggtcgggatttcgtgtatcggtctgggttgtctggattatgtgctgtctcgagctacctcggggctgttaagtctacaggatagcataaaatatcgcagtgtacctacagggaagattgtatgggtcgcccatgtgttccatggtcggcgccttgtctggtcatctttggctgaggccctcctacatacaatgggtgtcgctttggctggccaagacaagagcagactgccctgccgtttg

SEQ ID NO: 219653 - DNA, 1973 bp, Zea Mays
ctaacagctgtatactgttagaggggtgtgggaacatggctcataaatcatatgaaaagtttctttgaaaagtcgagtcaggatttatctcctgccaaaggaaagaaagcaaaagggacaaaaagttatttgccaaggaagaacactgctgcttatgccatactaataacactccatagggcaaagactagcgggaaagattttatgatgaaacaagagcttattgatgctgctgaagccagtggactgtcacgagacgcgattggtccaaataaaagtaaagcaaaacagagttacgggaaggactggtacactggttggagctgcatgaagacacttctatccaatcgacttgtcaccaagtggagtaacccagcaaagtatatgctaacacaagaaggggaaggcactgcacgtgactgtctttcacggtctggattagatgattctgcacggcctctaacgataattggtgctcacaacacatctgctatggatccttctgttgccaggcacagtcctgagcttgtcagcgacagttctctgacaaaaaagaagagcaattgctaccgtcaagttcaagctactaattacgaaggaatcatttgttgcgattcagattcagaagagccatgtggaaaggacattcccctaaaaggcatggagcctattactagttgtggaccaccagatatttctcgtccattccaaggaacacccaaactgcaatcttctacaatgggttctgctaaactagctatgccacctcgtcgagccaatgaaaactttcttgaagcctatgaagttattttaatattggatgaccgtgaaaaattcgggtctcgttcaagaaaagttgctgataacatttgttccctgagccattttgctgtggatgtcaggcaattgcctgtgggagatggtatttggattgcccgtcataaggaagatcacacagagtatgttcttgatttcattgttgaaaggaaagaggttatggatttagatggctcaattgaagacaaccgatatagagatcagaaattaaggatgaagaaatgtgggctgaggaagttgatatatcttgttgaaggtgatctcaaccgtgcaccaaagagggttaaaacagcctgtttcaccactgagattctcgatggatttgatgttcagagaactactgggtttgccgatacccagaagagatatgttgatcttacacgttcggtaatagcatactatgatgcaagtttctcgatcgttggtaaagcttcccctgtttgcccaacctacgatgacttcaagagaaagtgttatgatcttaagaagaaaacagtgagcgacatatttggctgtcagcttatgcaggtaccacaagtaacagaagaagctgcacaagctgttgtagagctctatccaacccctttgttactggcaaaggcatactctatacttggtggcgatacctcttatctggggtgacggatgaaaaatactctggactggaaccagttgcgggccaactgaactttggtggcttatggtgtcaccgtcgtggtgaccatcttttgtgtctccgagatttagaggctcccatgttctaaagcaaatagtggctccatagaacactagggatctagattaggaagagtttctctctacgtcgcgtctagagagtactctgctgtggtgtcgtggttgcacagtggaatgaagtggtcccttggatttacgtggtcgggatttcgtgtatcggtctgggttgtctggattatgtgctgtctcgagctacctcggggctgttaagtctacaggatagcataaaatatcgcagtgtacctacagggaagattgtatgggtcgcccatgtgttccatggtcggcgccttgtctggtcatctttggctgaggccctcctacatacaatgggtgtcgctttggctggccaagacaagagcagactgccctgccgtttg

SEQ ID NO: 219654 - DNA, 2651 bp, Zea Mays
cctcgaatcaccccgcaatggcgggctctctctttcccgctccgaaacattaaaccctagctccgcgcaccatttcccgaatccccaacccagcgatccgcctccagcgccgggccccaatcactgtgcgaccacgatgaggccgctgccgaagaaaccaaatgcagcgctgccggtgccgaagcaactcaaggtgcatcacccggaaaatgagtccctctctcgtttcttcctagagaagtggcgggcgatgatgcaggagccggatgggctctcgcagaacaactacctggccttcgccaacgccaaccgcagcctctgctcctccaaggagccaatccggaccctcaaggacttctcgaacgtcaagggtgtgggaacatggctcataaatcatatgaaaagtttctttgaaaagtcgagtcaggatttatctcctgccaaaggaaagaaagcaaaagggacaaaaagttatttgccaaggaagaacactgctgcttatgccatactaataacactccatagggcaaagactagcgggaaagattttatgatgaaacaagagcttattgatgctgctgaagccagtggactgtcacgagacgcgattggtccaaataaaagtaaagcaaaacagagttacgggaaggactggtacactggttggagctgcatgaagacacttctatccaatcgacttgtcaccaagtggagtaacccagcaaagtatatgctaacacaagaaggggaaggcactgcacgtgactgtctttcacggtctggattagatgattctgcacggcctctaacgataattggtgctcacaacacatctgctatggatccttctgttgccaggcacagtcctgagcttgtcagcgacagttctctgacaaaaaagaagagcaattgctaccgtcaagttcaagctactaattacgaaggaatcatttgttgcgattcagattcagaagagccatgtggaaaggacattcccctaaaaggtttcaattgattttttgttcatatcacataagttctcgaagaattatgtttacttttttgttcctctgctctataacttattatggctacaggttgcgtgttctaaaaaaataccgaaaggggtgttgtaccaaaactgaaaacatgcattcctgttgtatggatatacctacgtttgctatttagatcgtacaaaagtatcgaaacataagtgccattccctaccagtcttcctggttgattcctatacttcaatgcaggcatggagcctattactagttgtggaccaccagatatttctcgtccattccaaggaacacccaaactgcaatcttctacaatgggttctgctaaactagctatgccacctcgtcgagccaatgaaaactttcttgaagcctatgaagttattttaatattggatgaccgtgaaaaattcgggtctcgttcaagaaaagttgctgataacatttgttccctgagccattttgctgtggatgtcaggcaattgcctgtgggagatggtatttggattgcccgtcataaggaagatcacacagagtatgttcttgatttcattgttgaaaggaaagaggttatggatttagatggctcaattgaagacaaccgatatagagatcagaaattaaggatgaagaaatgtgggctgaggaagttgatatatcttgttgaaggtgatctcaaccgtgcaccaaagagggttaaaacagcctgtttcaccactgagattctcgatggatttgatgttcagagaactactgggtttgccgatacccagaagagatatgttgatcttacacgttcggtaatagcatactatgatgcaagtttctcgatcgttggtaaagcttcccctgtttgcccaacctacgatgacttcaagagaaagtgttatgatcttaagaagaaaacagtgagcgacatatttggctgtcagcttatgcaggtaccacaagtaacagaagaagctgcacaagctgttgtagagctctatccaacccctttgttactggcaaaggcatactctatacttggtggcgatacctctgcacaagagaagatgctaaagaagaagaacgagatggtaaatgcaggagcaagccgaaacatatttcaccttatctggggtgacggatgaaaaatactctggactggaaccagttgcgggccaactgaactttggtggcttatggtgtcaccgtcgtggtgaccatcttttgtgtctccgagatttagaggctcccatgttctaaagcaaatagtggctccatagaacactagggatctagattaggaagagtttctctctacgtcgcgtctagagagtactctgctgtggtgtcgtggttgcacagtggaatgaagtggtcccttggatttacgtggtcgggatttcgtgtatcggtctgggttgtctggattatgtgctgtctcgagctacctcggggctgttaagtctacaggatagcataaaatatcgcagtgtacctacagggaagattgtatgggtcgcccatgtgttccatggtcggcgccttgtctggtcatctttggctgaggccctcctacatacaatgggtgtcgctttggctggccaagacaagagcagactgccctgccgtttg

SEQ ID NO: 219655 - DNA, 2997 bp, Zea Mays
caaactccaacacccctcgaatcaccccgcaatggcgggctctctctttcccgctccgaaacattaaaccctagctccgcgcaccatttcccgaatccccaacccagcgatccgcctccagcgccgggccccaatcactgtgcgaccacgatgaggccgctgccgaagaaaccaaatgcagcgctgccggtgccgaagcaactcaaggtgcatcacccggaaaatgagtccctctctcgtttcttcctagagaagtggcgggcgatgatgcaggagccggatgggctctcgcagaacaactacctggccttcgccaacgccaaccgcagcctctgctcctccaaggagccaatccggaccctcaaggacttctcgaacgtcaagggtgtgggaacatggctcataaatcatatgaaaagtttctttgaaaagtcgagtcaggatttatctcctgccaaaggaaagaaagcaaaagggacaaaaagttatttgccaaggaagaacactgctgcttatgccatactaataacactccatagggcaaagactagcgggaaagattttatgatgaaacaagagcttattgatgctgctgaagccagtggactgtcacgagacgcgattggtccaaataaaagtaaagcaaaacagagttacgggaaggactggtacactggttggagctgcatgaagacacttctatccaatcgacttgtcaccaagtggagtaacccagcaaagtatatgctaacacaagaaggggaaggcactgcacgtgactgtctttcacggtctggattagatgattctgcacggcctctaacgataattggtgctcacaacacatctgctatggatccttctgttgccaggcacagtcctgagcttgtcagcgacagttctctgacaaaaaagaagagcaattgctaccgtcaagttcaagctactaattacgaaggaatcatttgttgcgattcagattcagaagagccatgtggaaaggacattcccctaaaaggcatggagcctattactagttgtggaccaccagatatttctcgtccattccaaggaacacccaaactgcaatcttctacaatgggttctgctaaactagctatgccacctcgtcgagccaatgaaaactttcttgaagcctatgaagttattttaatattggatgaccgtgaaaaattcgggtctcgttcaagaaaagttgctgataacatttgttccctgagccattttgctgtggatgttagttgggatcagagtttgcactcttctatatcatgtcctactttctctctgctgtagaaatgaaaatgggggcatagttatactgattagcgatatctcttatatggtgccagacctagagcctgacaatttcattggccactacattttcccgctttcatgtttatgcctctattacatagttggtttcaaaatataccattggagtcctaattctttcagtcaaggatctttgactattaacaagctacctgaaaaaatattagaaaacaattagaaatgaaaaaggcaaaaaaagtacataaaatacagtgaaaatttagtagaggtaacaagataacttgcttgatattttgtctgtttcaactttcaacttctcatgctggcagcctatagtatctccttgtgctcaaggtggctgatggcatcagtgtctaatgtcacattgtggacagtgttgcaaatcattggattagttttttgtataaacgtctagaatgcatcctcttggatatagtttttgttcttttttaacataagaaaggttgaggcgtgatgcttgattgattcgtttgcgtaatgtgccagagaaagtggttttgattcttcagtttgaaccttgtcgtccaggtcaggcaattgcctgtgggagatggtatttggattgcccgtcataaggaagatcacacagagtatgttcttgatttcattgttgaaaggaaagaggttatggatttagatggctcaattgaagacaaccgatatagagatcagaaattaaggatgaagaaatgtgggctgaggaagttgatatatcttgttgaaggtgatctcaaccgtgcaccaaagagggttaaaacagcagaactactgggtttgccgatacccagaagagatatgttgatcttacacgttcggtaatagcatactatgatgcaagtttctcgatcgttggtaaagcttcccctgtttgcccaacctacgatgacttcaagagaaagtgttatgatcttaagaagaaaacagtgagcgacatatttggctgtcagcttatgcaggtaccacaagtaacagaagaagctgcacaagctgttgtagagctctatccaacccctttgttactggcaaaggcatactctatacttggtggcgatacctctgcacaagagaagatgctaaagaagaagaacgagatggtaaatgcaggagcaagccgaaacatatttcaccttatctggggtgacggatgaaaaatactctggactggaaccagttgcgggccaactgaactttggtggcttatggtgtcaccgtcgtggtgaccatcttttgtgtctccgagatttagaggctcccatgttctaaagcaaatagtggctccatagaacactagggatctagattaggaagagtttctctctacgtcgcgtctagagagtactctgctgtggtgtcgtggttgcacagtggaatgaagtggtcccttggatttacgtggtcgggatttcgtgtatcggtctgggttgtctggattatgtgctgtctcgagctacctcggggctgttaagtctacaggatagcataaaatatcgcagtgtacctacagggaagattgtatgggtcgcccatgtgttccatggtcggcgccttgtctggtcatctttggctgaggccctcctacatacaatgggtgtcgctttggctggccaagacaagagcagactgccctgccgtttg

SEQ ID NO: 219656 - DNA, 2388 bp, Zea Mays
caaactccaacacccctcgaatcaccccgcaatggcgggctctctctttcccgctccgaaacattaaaccctagctccgcgcaccatttcccgaatccccaacccagcgatccgcctccagcgccgggccccaatcactgtgcgaccacgatgaggccgctgccgaagaaaccaaatgcagcgctgccggtgccgaagcaactcaaggtgcatcacccggaaaatgagtccctctctcgtttcttcctagagaagtggcgggcgatgatgcaggagccggatgggctctcgcagaacaactacctggccttcgccaacgccaaccgcagcctctgctcctccaaggagccaatccggaccctcaaggacttctcgaacgtcaagggtgtgggaacatggctcataaatcatatgaaaagtttctttgaaaagtcgagtcaggatttatctcctgccaaaggaaagaaagcaaaagggacaaaaagttatttgccaaggaagaacactgctgcttatgccatactaataacactccatagggcaaagactagcgggaaagattttatgatgaaacaagagcttattgatgctgctgaagccagtggactgtcacgagacgcgattggtccaaataaaagtaaagcaaaacagagttacgggaaggactggtacactggttggagctgcatgaagacacttctatccaatcgacttgtcaccaagtggagtaacccagcaaagtatatgctaacacaagaaggggaaggcactgcacgtgactgtctttcacggtctggattagatgattctgcacggcctctaacgataattggtgctcacaacacatctgctatggatccttctgttgccaggcacagtcctgagcttgtcagcgacagttctctgacaaaaaagaagagcaattgctaccgtcaagttcaagctactaattacgaaggaatcatttgttgcgattcagattcagaagagccatgtggaaaggacattcccctaaaaggcatggagcctattactagttgtggaccaccagatatttctcgtccattccaaggaacacccaaactgcaatcttctacaatgggttctgctaaactagctatgccacctcgtcgagccaatgaaaactttcttgaagcctatgaagttattttaatattggatgaccgtgaaaaattcgggtctcgttcaagaaaagttgctgataacatttgttccctgagccattttgctgtggatgtcaggcaattgcctgtgggagatggtatttggattgcccgtcataaggaagatcacacagagtatgttcttgatttcattgttgaaaggaaagaggttatggatttagatggctcaattgaagacaaccgatatagagatcagaaattaaggatgaagaaatgtgggctgaggaagttgatatatcttgttgaaggtgatctcaaccgtgcaccaaagagggttaaaacagcctgtttcaccactgagattctcgatggatttgatgttcagagaactactgggtttgccgatacccagaagagatatgttgatcttacacgttcggtaatagcatactatgatgcaagtttctcgatcgttggtaaagcttcccctgtttgcccaacctacgatgacttcaagagaaagtgttatgatcttaagaagaaaacagtgagcgacatatttggctgtcagcttatgcagaagaagctgcacaagctgttgtagagctctatccaacccctttgttactggcaaaggcatactctatacttggtggcgatacctctgcacaagagaagatgctaaagaagaagaacgagatggtaaatgcaggagcaagccgaaacatatttcaccttatctggggtgacggatgaaaaatactctggactggaaccagttgcgggccaactgaactttggtggcttatggtgtcaccgtcgtggtgaccatcttttgtgtctccgagatttagaggctcccatgttctaaagcaaatagtggctccatagaacactagggatctagattaggaagagtttctctctacgtcgcgtctagagagtactctgctgtggtgtcgtggttgcacagtggaatgaagtggtcccttggatttacgtggtcgggatttcgtgtatcggtctgggttgtctggattatgtgctgtctcgagctacctcggggctgttaagtctacaggatagcataaaatatcgcagtgtacctacagggaagattgtatgggtcgcccatgtgttccatggtcggcgccttgtctggtcatctttggctgaggccctcctacatacaatgggtgtcgctttggctggccaagacaagagcagactgccctgccgtttg

SEQ ID NO: 219657 - DNA, 2335 bp, Zea Mays
cgcaaactccaacacccctcgaatcaccccgcaatggcgggctctctctttcccgctccgaaacattaaaccctagctccgcgcaccatttcccgaatccccaacccagcgatccgcctccagcgccgggccccaatcactgtgcgaccacgatgaggccgctgccgaagaaaccaaatgcagcgctgccggtgccgaagcaactcaaggtgcatcacccggaaaatgagtccctctctcgtttcttcctagagaagtggcgggcgatgatgcaggagccggatgggctctcgcagaacaactacctggccttcgccaacgccaaccgcagcctctgctcctccaaggagccaatccggaccctcaaggacttctcgaacgtcaagggtgtgggaacatggctcataaatcatatgaaaagtttctttgaaaagtcgagtcaggatttatctcctgccaaaggaaagaaagcaaaagggacaaaaagttatttgccaaggaagaacactgctgcttatgccatactaataacactccatagggcaaagactagcgggaaagattttatgatgaaacaagagcttattgatgctgctgaagccagtggactgtcacgagacgcgattggtccaaataaaagtaaagcaaaacagagttacgggaaggactggtacactggttggagctgcatgaagacacttctatccaatcgacttgtcaccaagtggagtaacccagcaaagtatatgctaacacaagaaggggaaggcactgcacgtgactgtctttcacggtctggattagatgattctgcacggcctctaacgataattggtgctcacaacacatctgctatggatccttctgttgccaggcacagtcctgagcttgtcagcgacagttctctgacaaaaaagaagagcaattgctaccgtcaagttcaagctactaattacgaaggaatcatttgttgcgattcagattcagaagagccatgtggaaaggacattcccctaaaaggcatggagcctattactagttgtggaccaccagatatttctcgtccattccaaggaacacccaaactgcaatcttctacaatgggttctgctaaactagctatgccacctcgtcgagccaatgaaaactttcttgaagcctatgaagttattttaatattggatgaccgtgaaaaattcgggtctcgttcaagaaaagttgctgataacatttgttccctgagccattttgctgtggatgtcaggcaattgcctgtgggagatggtatttggattgcccgtcataaggaagatcacacagagtatgttcttgatttcattgttgaaaggaaagaggttatggatttagatggctcaattgaagacaaccgatatagagatcagaaattaaggatgaagaaatgtgggctgaggaagttgatatatcttgttgaaggtgatctcaaccgtgcaccaaagagggttaaaacagcctgtttcaccactgagattctcgatggatttgatgttcagagaactactgggtttgccgatacccagaagagatatgttgatcttacacgttcggtaatagcatactatgatgcaagtttctcgatcgttggtaaagcttcccctgtttgcccaacctacgatgacttcaagagaaagtgttatgatcttaagaagaaaacagtgagcgacatatttggctgtcagcttatgcaggtaccacaagtaacagaagaagctgcacaagctgttgtagagctctatccaacccctttgttactggcaaaggcatactctatacttggtggcgatacctcttatctggggtgacggatgaaaaatactctggactggaaccagttgcgggccaactgaactttggtggcttatggtgtcaccgtcgtggtgaccatcttttgtgtctccgagatttagaggctcccatgttctaaagcaaatagtggctccatagaacactagggatctagattaggaagagtttctctctacgtcgcgtctagagagtactctgctgtggtgtcgtggttgcacagtggaatgaagtggtcccttggatttacgtggtcgggatttcgtgtatcggtctgggttgtctggattatgtgctgtctcgagctacctcggggctgttaagtctacaggatagcataaaatatcgcagtgtacctacagggaagattgtatgggtcgcccatgtgttccatggtcggcgccttgtctggtcatctttggctgaggccctcctacatacaatgggtgtcgctttggctggccaagacaagagcagactgccctgccgtttg

SEQ ID NO: 219658 - DNA, 3052 bp, Zea Mays
ttcaaaacccgatcgcaaactccaacacccctcgaatcaccccgcaatggcgggctctctctttcccgctccgaaacattaaaccctagctccgcgcaccatttcccgaatccccaacccagcgatccgcctccagcgccgggccccaatcactgtgcgaccacgatgaggccgctgccgaagaaaccaaatgcagcgctgccggtgccgaagcaactcaaggtgcatcacccggaaaatgagtccctctctcgtttcttcctagagaagtggcgggcgatgatgcaggagccggatgggctctcgcagaacaactacctggccttcgccaacgccaaccgcagcctctgctcctccaaggagccaatccggaccctcaaggacttctcgaacgtcaagggtgtgggaacatggctcataaatcatatgaaaagtttctttgaaaagtcgagtcaggatttatctcctgccaaaggaaagaaagcaaaagggacaaaaagttatttgccaaggaagaacactgctgcttatgccatactaataacactccatagggcaaagactagcgggaaagattttatgatgaaacaagagcttattgatgctgctgaagccagtggactgtcacgagacgcgattggtccaaataaaagtaaagcaaaacagagttacgggaaggactggtacactggttggagctgcatgaagacacttctatccaatcgacttgtcaccaagtggagtaacccagcaaagtatatgctaacacaagaaggggaaggcactgcacgtgactgtctttcacggtctggattagatgattctgcacggcctctaacgataattggtgctcacaacacatctgctatggatccttctgttgccaggcacagtcctgagcttgtcagcgacagttctctgacaaaaaagaagagcaattgctaccgtcaagttcaagctactaattacgaaggaatcatttgttgcgattcagattcagaagagccatgtggaaaggacattcccctaaaaggcatggagcctattactagttgtggaccaccagatatttctcgtccattccaaggaacacccaaactgcaatcttctacaatgggttctgctaaactagctatgccacctcgtcgagccaatgaaaactttcttgaagcctatgaagttattttaatattggatgaccgtgaaaaattcgggtctcgttcaagaaaagttgctgataacatttgttccctgagccattttgctgtggatgttagttgggatcagagtttgcactcttctatatcatgtcctactttctctctgctgtagaaatgaaaatgggggcatagttatactgattagcgatatctcttatatggtgccagacctagagcctgacaatttcattggccactacattttcccgctttcatgtttatgcctctattacatagttggtttcaaaatataccattggagtcctaattctttcagtcaaggatctttgactattaacaagctacctgaaaaaatattagaaaacaattagaaatgaaaaaggcaaaaaaagtacataaaatacagtgaaaatttagtagaggtaacaagataacttgcttgatattttgtctgtttcaactttcaacttctcatgctggcagcctatagtatctccttgtgctcaaggtggctgatggcatcagtgtctaatgtcacattgtggacagtgttgcaaatcattggattagttttttgtataaacgtctagaatgcatcctcttggatatagtttttgttcttttttaacataagaaaggttgaggcgtgatgcttgattgattcgtttgcgtaatgtgccagagaaagtggttttgattcttcagtttgaaccttgtcgtccaggtcaggcaattgcctgtgggagatggtatttggattgcccgtcataaggaagatcacacagagtatgttcttgatttcattgttgaaaggaaagaggttatggatttagatggctcaattgaagacaaccgatatagagatcagaaattaaggatgaagaaatgtgggctgaggaagttgatatatcttgttgaaggtgatctcaaccgtgcaccaaagagggttaaaacagcctgtttcaccactgagattctcgatggatttgatgttcagagaactactgggtttgccgatacccagaagagatatgttgatcttacacgttcggtaatagcatactatgatgcaagtttctcgatcgttggtaaagcttcccctgtttgcccaacctacgatgacttcaagagaaagtgttatgatcttaagaagaaaacagtgagcgacatatttggctgtcagcttatgcaggtaccacaagtaacagaagaagctgcacaagctgttgtagagctctatccaacccctttgttactggcaaaggcatactctatacttggtggcgatacctctgcacaagagaagatgctaaagaagaagaacgagatggtaaatgcaggagcaagccgaaacatatttcaccttatctggggtgacggatgaaaaatactctggactggaaccagttgcgggccaactgaactttggtggcttatggtgtcaccgtcgtggtgaccatcttttgtgtctccgagatttagaggctcccatgttctaaagcaaatagtggctccatagaacactagggatctagattaggaagagtttctctctacgtcgcgtctagagagtactctgctgtggtgtcgtggttgcacagtggaatgaagtggtcccttggatttacgtggtcgggatttcgtgtatcggtctgggttgtctggattatgtgctgtctcgagctacctcggggctgttaagtctacaggatagcataaaatatcgcagtgtacctacagggaagattgtatgggtcgcccatgtgttccatggtcggcgccttgtctggtcatctttggctgaggccctcctacatacaatgggtgtcgctttggctggccaagacaagagcagactgccctgccgtttg

SEQ ID NO: 219659 - DNA, 2354 bp, Zea Mays
ccattctacttggctattcaaccaaacacggcctaaaataaaacttttcaaaacccgatcgcaaactccaacacccctcgaatcaccccgcaatggcgggctctctctttcccgctccgaaacattaaaccctagctccgcgcaccatttcccgaatccccaacccagcgatccgcctccagcgccgggccccaatcactgtgcgaccacgatgaggccgctgccgaagaaaccaaatgcagcgctgccggtgccgaagcaactcaaggtgcatcacccggaaaatgagtccctctctcgtttcttcctagagaagtggcgggcgatgatgcaggagccggatgggctctcgcagaacaactacctggccttcgccaacgccaaccgcagcctctgctcctccaaggagccaatccggaccctcaaggacttctcgaacgtcaagggtgtgggaacatggctcataaatcatatgaaaagtttctttgaaaagtcgagtcaggatttatctcctgccaaaggaaagaaagcaaaagggacaaaaagttatttgccaaggaagaacactgctgcttatgccatactaataacactccatagggcaaagactagcgggaaagattttatgatgaaacaagagcttattgatgctgctgaagccagtggactgtcacgagacgcgattggtccaaataaaagtaaagcaaaacagagttacgggaaggactggtacactggttggagctgcatgaagacacttctatccaatcgacttgtcaccaagtggagtaacccagcaaagtatatgctaacacaagaaggggaaggcactgcacgtgactgtctttcacggtctggattagatgattctgcacggcctctaacgataattggtgctcacaacacatctgctatggatccttctgttgccaggcacagtcctgagcttgtcagcgacagttctctgacaaaaaagaagagcaattgctaccgtcaagttcaagctactaattacgaaggaatcatttgttgcgattcagattcagaagagccatgtggaaaggacattcccctaaaaggcatggagcctattactagttgtggaccaccagatatttctcgtccattccaaggaacacccaaactgcaatcttctacaatgggttctgctaaactagctatgccacctcgtcgagccaatgaaaactttcttgaagcctatgaagttattttaatattggatgaccgtgaaaaattcgggtctcgttcaagaaaagttgctgataacatttgttccctgagccattttgctgtggatgtcaggcaattgcctgtgggagatggtatttggattgcccgtcataaggaagatcacacagagtatgttcttgatttcattgttgaaaggaaagaggttatggatttagatggctcaattgaagacaaccgatatagagatcagaaattaaggatgaagaaatgtgggctgaggaagttgatatatcttgttgaaggtgatctcaaccgtgcaccaaagagggttaaaacagcagaactactgggtttgccgatacccagaagagatatgttgatcttacacgttcggtaatagcatactatgatgcaagtttctcgatcgttggtaaagcttcccctgtttgcccaacctacgatgacttcaagagaaagtgttatgatcttaagaagaaaacagtgagcgacatatttggctgtcagcttatgcaggtaccacaagtaacagaagaagctgcacaagctgttgtagagctctatccaacccctttgttactggcaaaggcatactctatacttggtggcgatacctcttatctggggtgacggatgaaaaatactctggactggaaccagttgcgggccaactgaactttggtggcttatggtgtcaccgtcgtggtgaccatcttttgtgtctccgagatttagaggctcccatgttctaaagcaaatagtggctccatagaacactagggatctagattaggaagagtttctctctacgtcgcgtctagagagtactctgctgtggtgtcgtggttgcacagtggaatgaagtggtcccttggatttacgtggtcgggatttcgtgtatcggtctgggttgtctggattatgtgctgtctcgagctacctcggggctgttaagtctacaggatagcataaaatatcgcagtgtacctacagggaagattgtatgggtcgcccatgtgttccatggtcggcgccttgtctggtcatctttggctgaggccctcctacatacaatgggtgtcgctttggctggccaagacaagagcagactgccctgccgtttg

SEQ ID NO: 219660 - DNA, 381 bp, Zea Mays
gcccccggtggccacctcgggcgctttgtgatctggaccgagagcgcgttcaagaagctcgaggaggtgtatgggagcttcgacgcgccgtcgcagaagaagaagggctttgttctgccgaggcccaagatggccaacgctgacctgggcaggattatcaactctgacgaggtgcagtctgtggttaagccactcaacaaggaggtgaagcgcagggagaagaggaagaacccgctcaagaacatggctgctgtgctcaagctgaacccctacctcggcactgcccggaagatggccacccttgctgaggctgcccgagtcaaggcccggaaggagaagcttgattccaagaggaccaagcttacctcgaacgtgactgag

SEQ ID NO: 219661 - DNA, 1564 bp, Zea Mays
cgcgattccccaccccgcgcccgcagcccccccccccgtcctcccggccgcagccgagcacagccgccgcgcccacaaatcacgcgactcccgcttccatgtcctcgcgtcctccattgcagccgcatacatagcgtcgccccttccatcgatggcagccagccgcgcccgcaaatcacgcgactcccccttccatggcgtcgcccccttccatccatggcaggtccgcgcccctacgccccaaatcacgcggatggaaggggtcgcgagggagtctctctctggacgcgcccgtcgccgcctccaagctcaggagggagcggcgcccggcccccgcgagcgtgaacccggggccacaatgcttgaggcggaggaggggcctggcggttcgctgccagacggggtccaccgcagcgcccttcctcaggacggaggagccccccgcggctgcggcgggggcaaggaatgcccaggcggggttcaccttcgtcatgaagttcggcggctcgtcgctcgcgtcagccgagcggatgcgggaggtggccggcctcatccttagcttcctcgacgagatgcctgtcgccgtcctctccgccatggggaagaccaccaataacctcctcctaggaccttccatttctagctctcagcgcctgagtcagggccgaagagaaggcggtgagctgcggcggaggaggggcatctgaaatccctgagctcgctgtcatcagggagctacatcttaggacaattgatgagctcggtttagataagtcgattgtttcaggtacccaatcaaccagtcagtcaggcagagtggcaaaagctggggagcgatgcaggcgtcagagcagcaacaacggaggactctgccagtgtagatgagaaggaaacacgcaaagagcatcaaaagcaagttcaacgatcttatgtcaacccatccacctctgaatgaggcatattcagatgtgtgtgtattcagagctcaatatgttacatcgaccttcccaacccgccggcagagcttaagaagctcaagcacaagaagtgcctcgtccagtccccccaactccttcatggatgtcaagtgccaacgatgcttcagcatgtccaattcgcttgtggcataggaatctcatcctagattcaatagaggggctgcaatgccggcatcgccatagctggaaatcgagcactgacggacaccgggcgccgagatgggccgtcttgtccaccgccgcaagaaccgcatgcgttggagccatccttacacctgctcctacttccgcgccagcaacccaacacgccgacgacacgagctcctccttataaaagtgacatctttattgtatagataacgaatggttatagttatttattcttgtgtccaagtggtattggatttttttagcttggggttaaagaaaagacagtcatgtactttgcatcttttttgtatttatgttttatgctaaattgtggaataacactatattagttgttagcaaagaatttctgagatattaaggttgatgataatatatgttgttatttcatttaatca

SEQ ID NO: 219662 - DNA, 2095 bp, Zea Mays
cgcgattccccaccccgcgcccgcagcccccccccccgtcctcccggccgcagccgagcacagccgccgcgcccacaaatcacgcgactcccgcttccatgtcctcgcgtcctccattgcagccgcatacatagcgtcgccccttccatcgatggcagccagccgcgcccgcaaatcacgcgactcccccttccatggcgtcgcccccttccatccatggcaggtccgcgcccctacgccccaaatcacgcggatggaaggggtcgcgagggagtctctctctggacgcgcccgtcgccgcctccaagctcaggagggagcggcgcccggcccccgcgagcgtgaacccggggccacaatgcttgaggcggaggaggggcctggcggttcgctgccagacggggtccaccgcagcgcccttcctcaggacggaggagccccccgcggctgcggcgggggcaaggaatgcccaggcggggttcaccttcgtcatgaagttcggcggctcgtcgctcgcgtcagccgagcggatgcgggaggtggccggcctcatccttagcttcctcgacgagatgcctgtcgccgtcctctccgccatggggaagaccaccaataacctcctcctaggaccttccatttctagctctcagcgcctgagtcagggtgctcgattctttcgcttactagctaacaaggctagatgcgcgtgtgcctgattcgttgtctgtgtaggccgaagagaaggcggtgagctgcggcggaggaggggcatctgaaatccctgagctcgctgtcatcagggagctacatcttaggacaattgatgagctcggtttagataagtcgattgtttcaggtatgttgttgtttgctccactctgctcttggaacgcctcagttgttcctcttgctctatcatgaatgcttctgttatacaatgggatgtcgttctcttggatgtgccaaagttttctctccccttagtctgaataacaattcctggtggatgtatgtatgtattctcttggatgtgcgaaagttttccccttggatgtgcgaaacacatttactcctcaccgcaatctgcgcctccactctcgacccctcctccttcctcctctccctagggacccttctccccaacacgcaggggtagcgtaggaggtgttgtggcggcattatctaggaagcggtctgtggacatgaggcagatcaacccgaaggtgcctaaggaggaggctgtcaccatctccggtcgactcgtccagatcctctccgaccatgggcccctcaccatcggcaacacctagaacaacacgaaggtacccaatcaaccagtcagtcaggcagagtggcaaaagctggggagcgatgcaggcgtcagagcagcaacaacggaggagtaagtgtagatgagaaggaaacacgcaaagagcatcaaaagcaagttcaacgatcttatgtcaacccatccacctctgaatgaggcatattcagatgtgtgtgtattcagagctcaatatgttacatcgaccttcccaacccgccggcagagcttaagaagctcaagcacaagaagtgcctcgtccagtccccccaactccttcatggatgtcaagtgccaacgatgcttcagcatgtccaattcgcttgtggcataggaatctcatcctagattcaatagaggggctgcaatgccggcatcgccatagctggaaatcgagcactgacggacaccgggcgccgagatgggccgtcttgtccaccgccgcaagaaccgcatgcgttggagccatccttacacctgctcctacttccgcgccagcaacccaacacgccgacgacacgagctcctccttataaaagtgacatctttattgtatagataacgaatggttatagttatttattcttgtgtccaagtggtattggatttttttagcttggggttaaagaaaagacagtcatgtactttgcatcttttttgtatttatgttttatgctaaattgtggaataacactatattagttgttagcaaagaatttctgagatattaaggttgatgataatatatgttgttatttcatttaatca

SEQ ID NO: 219663 - DNA, 1827 bp, Zea Mays
ttatgtctttagtataggcgtccacagccgcacggttctgccatcgcgcgattcctccgcccgcgattccccaccccgcgcccgcagcccccccccccgtcctcccggccgcagccgagcacagccgccgcgcccacaaatcacgcgactcccgcttccatgtcctcgcgtcctccattgcagccgcatacatagcgtcgccccttccatcgatggcagccagccgcgcccgcaaatcacgcgactcccccttccatggcgtcgcccccttccatccatggcaggtccgcgcccctacgccccaaatcacgcggatggaaggggtcgcgagggagtctctctctggacgcgcccgtcgccgcctccaagctcaggagggagcggcgcccggcccccgcgagcgtgaacccggggccacaatgcttgaggcggaggaggggcctggcggttcgctgccagacggggtccaccgcagcgcccttcctcaggacggaggagccccccgcggctgcggcgggggcaaggaatgcccaggcggggttcaccttcgtcatgaagttcggcggctcgtcgctcgcgtcagccgagcggatgcgggaggtggccggcctcatccttagcttcctcgacgagatgcctgtcgccgtcctctccgccatggggaagaccaccaataacctcctcctaggaccttccatttctagctctcagcgcctgagtcagggccgaagagaaggcggtgagctgcggcggaggaggggcatctgaaatccctgagctcgctgtcatcagggagctacatcttaggacaattgatgagctcggtttagataagtcgattgtttcagggacccttctccccaacacgcaggggtagcgtaggaggtgttgtggcggcattatctaggaagcggtctgtggacatgaggcagatcaacccgaaggtgcctaaggaggaggctgtcaccatctccggtcgactcgtccagatcctctccgaccatgggcccctcaccatcggcaacacctagaacaacacgaaggtacccaatcaaccagtcagtcaggcagagtggcaaaagctggggagcgatgcaggcgtcagagcagcaacaacggaggactctgccagtgtagatgagaaggaaacacgcaaagagcatcaaaagcaagttcaacgatcttatgtcaacccatccacctctgaatgaggcatattcagatgtgtgtgtattcagtttacagagctcaatatgttacatcgaccttcccaacccgccggcagagcttaagaagctcaagcacaagaagtgcctcgtccagtccccccaactccttcatggatgtcaagtgccaacgatgcttcagcatgtccaattcgcttgtggcataggaatctcatcctagattcaatagaggggctgcaatgccggcatcgccatagctggaaatcgagcactgacggacaccgggcgccgagatgggccgtcttgtccaccgccgcaagaaccgcatgcgttggagccatccttacacctgctcctacttccgcgccagcaacccaacacgccgacgacacgagctcctccttataaaagtgacatctttattgtatagataacgaatggttatagttatttattcttgtgtccaagtggtattggatttttttagcttggggttaaagaaaagacagtcatgtactttgcatcttttttgtatttatgttttatgctaaattgtggaataacactatattagttgttagcaaagaatttctgagatattaaggttgatgataatatatgttgttatttcatttaatca

SEQ ID NO: 219664 - DNA, 1158 bp, Zea Mays
tttgcagcctactactgttgcagctaacgtgagatccatatttgcatgcttgcttgatcaagtgagccaatacttaactgaagggcttgaccgtgctagagagagtttaaatgaggccgcagctttgcgggatagatatgtcatcgggacaagtgttagtaggagagtggcagctgctgctgcttctgcacaagaggtggcagcttcagctggtgagagcagctttagatcctttatgattgctgtgcagcgttgtaccagtagcgtagctattcttcagcagatatggggtcagcagtatcagtagttgaggctgctgctcacaaaggactgctacaatgtattgatactgttatgtctgaggttgaaagattgttgtcttcggaacagaaggctacagattatcgaacaccagatgatggagctgcaccagatcatcggccaactaatgcttgtataagaattgtagcctatctctctcgtgttcttgaggttgcattcagtgcccttgaaggcctcaacaaacagtcctttttgactgagctgggaaatcgcttgcataaggggctgcttaatcattggcagaagttcacatttagtcccagtggtggcctacggttgaaacgtgacataactgaatatggggatttcgttcgtagcttcaatgccccctccatagatgagaagttcgaactgttgggaattgtggcgaacgtcttcattgttgctccagaaagtttagcatccctgtttgaaggaacccccagcatccgaaaggatgccttgaggttcattcagctccgggatgattataagacagcgaaaatcgcttcgatgctcaactatatcatgtccgagtaatgagtgaagtggaaccgttagaccgttacactttgctgctctcgtggactattgatgccgtttgtataaatgaccttcgaaattatgtttattcttggttccaatttatttgttttcctatcctttttctttttgggctttgctcaatttgagctgtacatgtggttcaggtcctttagacctctacttgtataaatgatgagaaatttctgtggctgtttacgtgcgaaaatttacgcaaacgctgtctgatcttttgaaatggaaaatctggagaaacgggaatacactaataaa

SEQ ID NO: 219665 - DNA, 1195 bp, Zea Mays
tttgcagcctactactgttgcagctaacgtgagatccatatttgcatgcttgcttgatcaagtgagccaatacttaactgaagggcttgaccgtgctagagagagtttaaatgaggccgcagctttgcgggatagatatgtcatcgggacaagtgttagtaggagagtggcagcttcagctggtgagagcagctttagatcctttatgattgctgtgcagcgttgtaccagtagcgtagctattcttcagcagtacttctcaaataccatatctcggctcttgctacctgttgatggtgctcatccgtctgcttgtgaagatatggggtcagcagtatcagtagttgaggctgctgctcacaaaggactgctacaatgtattgatactgttatgtctgaggttgaaagattgttgtcttcggaacagaaggctacagattatcgaacaccagatgatggagctgcaccagatcatcggccaactaatgcttgtataagaattgtagcctatctctctcgtgttcttgaggttgcattcagtgcccttgaaggcctcaacaaacagtcctttttgactgagctgggaaatcgcttgcataaggggctgcttaatcattggcagaagttcacatttagtcccagtggtggcctacggttgaaacgtgacataactgaatatggggatttcgttcgtagcttcaatgccccctccatagatgagaagttcgaactgttgggaattgtggcgaacgtcttcattgttgctccagaaagtttagcatccctgtttgaaggaacccccagcatccgaaaggatgccttgaggttcattcagctccgggatgattataagacagcgaaaatcgcttcgatgctcaactatatcatgtccgagtaatgagtgaagtggaaccgttagaccgttacactttgctgctctcgtggactattgatgccgtttgtataaatgaccttcgaaattatgtttattcttggttccaatttatttgttttcctatcctttttctttttgggctttgctcaatttgagctgtacatgtggttcaggtcctttagacctctacttgtataaatgatgagaaatttctgtggctgtttacgtgcgaaaatttacgcaaacgctgtctgatcttttgaaatggaaaatctggagaaacgggaatacactaataaa

SEQ ID NO: 219666 - DNA, 1140 bp, Zea Mays
tttgcagcctactactgttgcagctaacgtgagatccatatttgcatgcttgcttgatcaagtgagccaatacttaactgaagggcttgaccgtgctagagagagtttaaatgaggccgcagctttgcgggatagatatgtcatcgggacaagtgttagtaggagagtggcagctgctgctgcttctgcacaagaggtggcagcttcagctggtgagagcagctttagatcctttatgattgctgtgcagcgttgtaccagtagcgtagctattcttcagcagtacttctcaaataccatatctcggctcttgctacctgttgatggtgctcatccgtctgcttgtgaagatatggggtcagcagtatcagtagttgaggctgctgctcacaaaggactgctacaatgtattgatactgttatgtctgaggttgaaagattgttgtcttcggaacagaaggctacagattatcgaacaccagatgatggagctgcaccagatcatcggccaactaatgcttgtataagggaaatcgcttgcataaggggctgcttaatcattggcagaagttcacatttagtcccagtggtggcctacggttgaaacgtgacataactgaatatggggatttcgttcgtagcttcaatgccccctccatagatgagaagttcgaactgttgggaattgtggcgaacgtcttcattgttgctccagaaagtttagcatccctgtttgaaggaacccccagcatccgaaaggatgccttgaggttcattcagctccgggatgattataagacagcgaaaatcgcttcgatgctcaactatatcatgtccgagtaatgagtgaagtggaaccgttagaccgttacactttgctgctctcgtggactattgatgccgtttgtataaatgaccttcgaaattatgtttattcttggttccaatttatttgttttcctatcctttttctttttgggctttgctcaatttgagctgtacatgtggttcaggtcctttagacctctacttgtataaatgatgagaaatttctgtggctgtttacgtgcgaaaatttacgcaaacgctgtctgatcttttgaaatggaaaatctggagaaacgggaatacactaataaa

SEQ ID NO: 219667 - DNA, 1215 bp, Zea Mays
tttgcagcctactactgttgcagctaacgtgagatccatatttgcatgcttgcttgatcaagtgagccaatacttaactgaagggcttgaccgtgctagagagagtttaaatgaggccgcagctttgcgggatagatatgtcatcgggacaagtgttagtaggagagtggcagctgctgctgcttctgcacaagaggtggcagcttcagctggtgagagcagctttagatcctttatgattgctgtgcagcgttgtaccagtagcgtagctattcttcagcagtacttctcaaataccatatctcggctcttgctacctgttgatggtgctcatccgtctgcttgtgaagatatggggtcagcagtatcagtagttgaggctgctgctcacaaaggactgctacaatgtattgatactgttatgtctgaggttgaaagattgttgtcttcggaacagaaggctacagattatcgaacaccagatgatggagctgcaccagatcatcggccaactaatgcttgtataagaattgtagcctatctctctcgtgttcttgaggttgcattcagtgcccttgaaggcctcaacaaacagtcctttttgactgagctgggaaatcgcttgcataaggggctgcttaatcattggcagaagttcacatttagtcccagtggtggcctacggttgaaacgtgacataactgaatatggggatttcgttcgtagcttcaatgccccctccatagatgagaagttcgaactgttgggaattgtggcgaacgtcttcattgttgctccagaaagtttagcatccctgtttgaaggaacccccagcatccgaaaggatgccttgagctccgggatgattataagacagcgaaaatcgcttcgatgctcaactatatcatgtccgagtaatgagtgaagtggaaccgttagaccgttacactttgctgctctcgtggactattgatgccgtttgtataaatgaccttcgaaattatgtttattcttggttccaatttatttgttttcctatcctttttctttttgggctttgctcaatttgagctgtacatgtggttcaggtcctttagacctctacttgtataaatgatgagaaatttctgtggctgtttacgtgcgaaaatttacgcaaacgctgtctgatcttttgaaatggaaaatctggagaaacgggaatacactaataaa

SEQ ID NO: 219668 - DNA, 1171 bp, Zea Mays
tttgcagcctactactgttgcagctaacgtgagatccatatttgcatgcttgcttgatcaagtgagccaatacttaactgaagggcttgaccgtgctagagagagtttaaatgaggccgcagctttgcgggatagatatgtcatcgggacaagtgttagtaggagagtggcagctgctgctgcttctgcacaagaggtggcagcttcagctggtgagagcagctttagatcctttatgattgctgtgcagcgttgtaccagtagcgtagctattcttcagcagtacttctcaaataccatatctcggctcttgctacctgttgatggtgctcatccgtctgcttgtgaagatatggggtcagcagtatcagtagttgaggctgctgctcacaaaggactgctacaatgtattgatactgttatgtctgaggttgaaagattgttgtcttcggaacagaaggctacagattatcgaacaccagatgatggagctgcaccagatcatcggccaactaatgcttgtataagaattgtagcctatctctctcgtgttcttgaggttgcattcagtgcccttgaaggcctcaacaaacagtcctttttgactgagctgggaaatcgcttgcataaggggctgcttaatcattggcagaagttcacatttagtcccagcttcaatgccccctccatagatgagaagttcgaactgttgggaattgtggcgaacgtcttcattgttgctccagaaagtttagcatccctgtttgaaggaacccccagcatccgaaaggatgccttgaggttcattcagctccgggatgattataagacagcgaaaatcgcttcgatgctcaactatatcatgtccgagtaatgagtgaagtggaaccgttagaccgttacactttgctgctctcgtggactattgatgccgtttgtataaatgaccttcgaaattatgtttattcttggttccaatttatttgttttcctatcctttttctttttgggctttgctcaatttgagctgtacatgtggttcaggtcctttagacctctacttgtataaatgatgagaaatttctgtggctgtttacgtgcgaaaatttacgcaaacgctgtctgatcttttgaaatggaaaatctggagaaacgggaatacactaataaa

SEQ ID NO: 219669 - DNA, 1217 bp, Zea Mays
tttgcagcctactactgttgcagctaacgtgagatccatatttgcatgcttgcttgatcaagtgagccaatacttaactgaagggcttgaccgtgctagagagagtttaaatgaggccgcagctttgcgggatagatatgtcatcgggacaagtgttagtaggagagtggcagctgctgctgcttctgcacaagaggtggcagcttcagctggtgagagcagctttagatcctttatgattgctgtgcagcgttgtaccagtagcgtagctattcttcagcagtacttctcaaataccatatctcggctcttgctacctgttgatggtgctcatccgtctgcttgtgaagatatggggtcagcagtatcagtagttgaggctgctgctcacaaaggactgctacaatgtattgatactgttatgtctgagattgttgtcttcggaacagaaggctacagattatcgaacaccagatgatggagctgcaccagatcatcggccaactaatgcttgtataagaattgtagcctatctctctcgtgttcttgaggttgcattcagtgcccttgaaggcctcaacaaacagtcctttttgactgagctgggaaatcgcttgcataaggggctgcttaatcattggcagaagttcacatttagtcccagtggtggcctacggttgaaacgtgacataactgaatatggggatttcgttcgtagcttcaatgccccctccatagatgagaagttcgaactgttgggaattgtggcgaacgtcttcattgttgctccagaaagtttagcatccctgtttgaaggaacccccagcatccgaaaggatgccttgaggttcattcagctccgggatgattataagacagcgaaaatcgcttcgatgctcaactatatcatgtccgagtaatgagtgaagtggaaccgttagaccgttacactttgctgctctcgtggactattgatgccgtttgtataaatgaccttcgaaattatgtttattcttggttccaatttatttgttttcctatcctttttctttttgggctttgctcaatttgagctgtacatgtggttcaggtcctttagacctctacttgtataaatgatgagaaatttctgtggctgtttacgtgcgaaaatttacgcaaacgctgtctgatcttttgaaatggaaaatctggagaaacgggaatacactaataaa

SEQ ID NO: 219670 - DNA, 1216 bp, Zea Mays
tttgcagcctactactgttgcagctaacgtgagatccatatttgcatgcttgcttgatcaagtgagccaatacttaactgaagggcttgaccgtgctagagagagtttaaatgaggccgcagctttgcgggatagatatgtcatcgggacaagtgttagtaggagagtggcagctgctgctgcttctgcacaagaggtggcagcttcagctggtgagagcagctttagatcctttatgattgctgtgcagcgttgtaccagtagcgtagctattcttcagcagtacttctcaaataccatatctcggctcttgctacctgttgatggtgctcatccgtctgcttgtgaagatatggggtcagcagtatcagtagttgaggctgctgctcacaaaggactgctacaatgtattgatactgttatgtctgaggttgaaagattgttgtcttcggaacagaaggctacagattatcgaacaccagatgatggagctgcaccagatcatcggccaactaatgcttgtataagaattgtagcctatctctctcgtgttcttgaggttgcattcagtgcccttgaaggcctcaacaaacagtcctttttgactgagctgggaaatcgcttgcataaggggctgcttaatcattggcagaagttcacatttagtcccagtggtggcctacggttgaaacgtgacataactgaatatggggatttcgttcgtagcttcaatgccccctccatagatgagaagttcgaactgttgggaattgtggcgaacgtcttcattgttgctccagaaagtttagcatccctgtttgaaggaacccccagcatccgaaaggatgccttgaggctccgggatgattataagacagcgaaaatcgcttcgatgctcaactatatcatgtccgagtaatgagtgaagtggaaccgttagaccgttacactttgctgctctcgtggactattgatgccgtttgtataaatgaccttcgaaattatgtttattcttggttccaatttatttgttttcctatcctttttctttttgggctttgctcaatttgagctgtacatgtggttcaggtcctttagacctctacttgtataaatgatgagaaatttctgtggctgtttacgtgcgaaaatttacgcaaacgctgtctgatcttttgaaatggaaaatctggagaaacgggaatacactaataaa

SEQ ID NO: 219671 - DNA, 492 bp, Zea Mays
gatggatttgatcaaatagtgaatgtgaaggttgtaatggcaactaatagggcagatactctagatcctgctttgctgtgaccaggtagacttgacaggaaagttgagttcccttgtcccgattggcggcaaaagaggcttgtgttccaagtctatactgctaagatggatttgagtgatgaggctgatttggaagattatgtttgcagaccggataagatcagtgctactgatgttgagttggtttcatggcacataccaagatttttatgcatttgttgttttctaagtattgtattgctagggtacttatgtcctgtgctggccaaagctgtcaaaaccatgagaaaggcagagaaggtgcttcttatagcaaagccacattgttttcaagtgattatagccgagcttcgtgccacctcgccgacgctggcccgccagccgggagcttcgtatctctgttctgaattttgcatatcatagtgacgttta

SEQ ID NO: 219672 - DNA, 1588 bp, Zea Mays
tgcctcccactcccacccgcgacaccctccgctctgctcagcaccaaccgccatccccgcccgccatctgcgcgcgtctggccgtctctctcgcccccgttctcctctctgctatccgcgcccaaatctcaccgtatgtgcgcgtctccatctgcgcgcatctccccagatccactctactcgctccaccacgccgaccccgacccgacaccggcaaccacacggatccactgtgctctccatggccatgaaagggaacgatcttgcgccgacctcaaccaggctctccatggaaggtccgcgtggttccctctcctgcatcccatgatccggatgccgccacaccatggtcgatggtcggggccgtcgaatccggatgcccgcgctctgcgtcgcgtggatcttctagatcacgcgggagctcgaccacaagtccgacggcgagaccatgaagtggctgctagtacatgcttgtcatgctctcccctccacaccccacctcgcacttgattggcccgtccggttaattgttaattgttggacatgaataaccaaagcagttagaggcagatcgtgcgggtacagcgccttggctgccgagatcaatgggggcatcctcgccgtcggcaggcccaggcagcactgagttgtgctctgctgcggccgctacttccagatggatggatttgatcaaatagtgaatgtgaaggttgtaatggcaactaatagggcagatactctagatcctgctttgctgtgaccaggtagacttgacaggaaagttgagttcccttgtcccgattggcggcaaaagaggcttgtgttccaagtctatactgctaagatggatttgagtgatgaggctgatttggaagattatgtttgcagaccggataagatcagtgctactgatgttgagttggtttcatggcacataccaagatttttatgcatttgttgttttctaagtattgtattgctagggtacttatgtcctgtgctggccaaagctgtcaaaaccatgagaaaggcagagaaggtgcttcttatagcaaagccacattaccaacagttggagaggaaggtgttgtgatgagcatcatcttgttctacatcatcactaatgaactggttgaacttttggttgctttggtgaatggaggcgacagcatgcagattgccatgtccggatgttatgcgggacctatgtttaatacacttgctggtttgggtacattgttgctagattgatctgggctcttgttatgctgccgagaggtgacatgtagcctaacaagatacttggagttggcctcattgctctttactcaaattttctttttattagagtaagcaatgttggtggaatattgctactacctagagttagataattatttgcttgtaaagttgggatttacatcaaagtacttgcccatggcttccatttttataaatgaaatgaagttatacagtgttgctctgttctatacggctgttcttgtatgtcaagttgtcttcacattttccgggttttgatatttttgggagaaaacaaacttgcaattatggaatttagttttatgta

SEQ ID NO: 219673 - DNA, 1986 bp, Zea Mays
gttctgcctcccactcccacccgcgacaccctccgctctgctcagcaccaaccgccatccccgcccgccatctgcgcgcgtctggccgtctctctcgcccccgttctcctctctgctatccgcgcccaaatctcaccgtatgtgcgcgtctccatctgcgcgcatctccccagatccactctactcgctccaccacgccgaccccgacccgacaccggcaaccacacggatccactgtgctctccatggccatgaaagggaacgatcttgcgccgacctcaaccaggctctccatggaaggtccgcgtggttccctctcctgcatcccatgatccggatgccgccacaccatggtcgatggtcggggccgtcgaatccggatgcccgcgctctgcgtcgcgtggatcttctagatcacgcgggagctcgaccacaagtccgacggcgagaccatgaagtggctgctagtacatgcttgtcatgctctcccctccacaccccacctcgttagaggcagatcgtgcgggtacagcgccttggctgccgagatcaatgggggcatcctcgccgtcggcaggcccaggcagcactgagttgtgctctgctgcggccgctacttccagatggatggatttgatcaaatagtgaatgtgaaggttgtaatggcaactaatagggcagatactctagatcctgctttgctgtgaccaggtagacttgacaggaaagttgagttcccttgtcccgattggcggcaaaagaggcttgtgttccaagtaagttgcccttttgtgtgaaactgtgaactaattgataggcattatatttggttcttatgaagtagcatgacttgcatatttattaatttactgaagtgttgtataatatattgcatccacatatgatgaaacttcgatggattgcttcaggtattgctattaaggtctttttcatctcatgcacataactattaagctgctcaaatttctttatttggtaattaattaaaattttcaaccatgtcatattgcatacaaattgccaactctttttgcacaaatgcacatgctcaattgcgataatgtcatatggtatgtcaaggatttgtggtcaatgcaaactaaatcgttttcttatttatatgttggcacttgattattcgtatttgtcactgtgatcattttttttctcaattgttttgctggctgctgtttcaaatcaggtctatactgctaagatggatttgagtgatgaggctgatttggaagattatgtttgcagaccggataagatcagtgctactgatgttgagttggtttcatggcacataccaagatttttatgcatttgttgttttctaagtattgtattgctagggtacttatgtcctgtgctggccaaagctgtcaaaaccatgagaaaggcagagaaggtgcttcttatagcaaagccacattggtagaccaacagttggagaggaaggtgttgtgatgagcatcatcttgttctacatcatcactaatgaactggttgaacttttggttgctttggtgaatggaggcgacagcatgcagattgccatgtccggatgttatgcgggacctatgtttaatacacttgctggtttgggtacattgttgctagattgatctgggctcttgttatgctgccgagaggtgacatgtagcctaacaagatacttggagttggcctcattgctctttactcaaattttctttttattagagtaagcaatgttggtggaatattgctactacctagagttagataattatttgcttgtaaagttgggatttacatcaaagtacttgcccatggcttccatttttataaatgaaatgaagttatacagtgttgctctgttctatacggctgttcttgtatgtcaagttgtcttcacattttccgggttttgatatttttgggagaaaacaaacttgcaattatggaatttagttttatgta

SEQ ID NO: 219674 - DNA, 1541 bp, Zea Mays
ggttctgcctcccactcccacccgcgacaccctccgctctgctcagcaccaaccgccatccccgcccgccatctgcgcgcgtctggccgtctctctcgcccccgttctcctctctgctatccgcgcccaaatctcaccgtatgtgcgcgtctccatctgcgcgcatctccccagatccactctactcgctccaccacgccgaccccgacccgacaccggcaaccacacggatccactgtgctctccatggccatgaaagggaacgatcttgcgccgacctcaaccaggctctccatggaaggtccgcgtggttccctctcctgcatcccatgatccggatgccgccacaccatggtcgatggtcggggccgtcgaatccggatgcccgcgctctgcgtcgcgtggatcttctagatcacgcgggagctcgaccacaagtccgacggcgagaccatgaagtggctgctagtacatgcttgtcatgctctcccctccacaccccacctcgttagaggcagatcgtgcgggtacagcgccttggctgccgagatcaatgggggcatcctcgccgtcggcaggcccaggcagcactgagttgtgctctgctgcggccgctacttccagatggatggatttgatcaaatagtgaatgtgaaggttgtaatggcaactaatagggcagatactctagatcctgctttgctgtgaccaggtagacttgacaggaaagttgagttcccttgtcccgattggcggcaaaagaggcttgtgttccaagtctatactgctaagatggatttgagtgatgaggctgatttggaagattatgtttgcagaccggataagatcagtgctactgatgttgagttggtttcatggcacataccaagatttttatgcatttgttgttttctaagtattgtattgctagggtacttatgtcctgtgctggccaaagctgtcaaaaccatgagaaaggcagagaaggtgcttcttatagcaaagccacattggtagaccaacagttggagaggaaggtgttgtgatgagcatcatcttgttctacatcatcactaatgaactggttgaacttttggttgctttggtgaatggaggcgacagcatgcagattgccatgtccggatgttatgcgggacctatgtttaatacacttgctggtttgggtacattgttgctagattgatctgggctcttgttatgctgccgagaggtgacatgtagcctaacaagatacttggagttggcctcattgctctttactcaaattttctttttattagagtaagcaatgttggtggaatattgctactacctagagttagataattatttgcttgtaaagttgggatttacatcaaagtacttgcccatggcttccatttttataaatgaaatgaagttatacagtgttgctctgttctatacggctgttcttgtatgtcaagttgtcttcacattttccgggttttgatatttttgggagaaaacaaacttgcaattatggaatttagttttatgta

SEQ ID NO: 219675 - DNA, 2538 bp, Zea Mays
cggttctgcctcccactcccacccgcgacaccctccgctctgctcagcaccaaccgccatccccgcccgccatctgcgcgcgtctggccgtctctctcgcccccgttctcctctctgctatccgcgcccaaatctcaccgtatgtgcgcgtctccatctgcgcgcatctccccagatccactctactcgctccaccacgccgaccccgacccgacaccggcaaccacacggatccactgtgctctccatggccatgaaagggaacgatcttgcgccgacctcaaccaggctctccatggaaggtccgcgtggttccctctcctgcatcccatgatccggatgccgccacaccatggtcgatggtcggggccgtcgaatccggatgcccgcgctctgcgtcgcgtggatcttctagatcacgcgggagctcgaccacaagtccgacggcgagaccatgaagtggctgctagtacatgcttgtcatgctctcccctccacaccccacctcggtaagacagccccccactgccagcactgatggagccacagtaatagcggatctcatccatgcctgcctttcttgttaccgtggctagcacttgattggcccgtccggttaattgttaattgttggacatgaataaccaaagcagttagaggcagatcgtgcgggtacagcgccttggctgccgagatcaatgggggcatcctcgccgtcggcaggcccaggcagcactgagttgtgctctgctgcggccgctacttccaggtactacctctagctgttttttctttctgaatcgctctacgtttcccattttgtttcttcttctcttgcccttccatttgctcgcttgattagcttgagttgtgcacgacatattgttcatttcgcttgtgcgagaggcggagctacgtctgctggttctgaatttatcaatagacatctctgtttttctgtgtggggtttcatggtatccataatttcatatctaagcatttacaattagcaagccttctgttaatctttgctaccgtaagcatttacctaatattgttggccatactgcctaattattcagtaaaagcgtgcatgtacattatgtcttcaatttgctgctccatacatctgtgtcgacacctatattcagcctgattggaattgctagttgatgcagcgttgttgttgctgctgctgtagccaacctgcctgtaagtactatgctttgtagtacaaaatgagctcgatcaggtgaattttttgtttcaactaaataggagctacttaatcaagtaaatggggctttcggattcttgtggtgttccaagaaattataatagatttcctattttatgttacaaaacttggtatttcaaagggaacctttttcacaccaggaagtgtaaggaaaggctctattttcgatttgaaatcgtaaggacatatcttcaccccaacatgcatagtttttttatgttctaatgagaggtggaaattataatattataaaaataataactgaggtcttggaaagctaactttggcagattgctaggttgcaaattcttagatgctggattcttcttgattcttttattaatttgcccgtgtttattgcagatggatggatttgatcaaatagtgaatgtgaaggttgtaatggcaactaatagggcagatactctagatcctgctttgctgtgaccaggtagacttgacaggaaagttgagttcccttgtcccgattggcggcaaaagaggcttgtgttccaagtctatactgctaagatggatttgagtgatgaggctgatttggaagattatgtttgcagaccggataagatcagtgctactgatgttgagttggtttcatggcacataccaagatttttatgcatttgttgttttctaagtattgtattgctagggtacttatgtcctgtgctggccaaagctgtcaaaaccatgagaaaggcagagaaggtgcttcttatagcaaagccacattggtagaccaacagttggagaggaaggtgttgtgatgagcatcatcttgttctacatcatcactaatgaactggttgaacttttggttgctttggtgaatggaggcgacagcatgcagattgccatgtccggatgttatgcgggacctatgtttaatacacttgctggtttgggtacattgttgctagattgatctgggctcttgttatgctgccgagaggtgacatgtagcctaacaagatacttggagttggcctcattgctctttactcaaattttctttttattagagtaagcaatgttggtggaatattgctactacctagagttagataattatttgcttgtaaagttgggatttacatcaaagtacttgcccatggcttccatttttataaatgaaatgaagttatacagtgttgctctgttctatacggctgttcttgtatgtcaagttgtcttcacattttccgggttttgatatttttgggagaaaacaaacttgcaattatggaatttagttttatgta

SEQ ID NO: 219676 - DNA, 2211 bp, Zea Mays
actgagcaaaacactcgatcgagcttgactagaacaggcacatcttgttggttggaccatgtgtactgtctgccataaccttgataggattaagtgtaggttgttggaaggaacaaatgcccaagatgtacgggcacttgtgttggacatgcaagcaagattacttctggatatgctaggcaaaggaatcgagtctgcccttacaaatccatcaactctgctacctgagccctggcaagcttccagtgatatgttatccagcatcgatgctgacaaaatgactgttgagccagctctgcttccaaacatccagggttacgttgatgctgttcttgatttagcatcacatttcataactcgcttgcggcgttatgcgagtttctgtcgaactctggcgagccatgtggggccatcttctaccacaggcacttctagaaatatggttacaagtccaacaaacagttctccttcgccatcaaataatcaaggtaatcaagggggatcaacatctgcaacagggaactcacaaatgcaggagtgggtccaaggtgcaattgctaagattagtaacaattctgatggtgctgccactgcaacacagaatccaatgagcacgaggacatcatttatgcccatcagcattaatacgggcactttccctggcacacctgctgtgagacttattggggattgccattttcttcatagattatgtcaattactgctattttgtctgcttttccgaagaaggcaatcaccaaggttacttgccagttcgcaaaaaaatcaagattctgccatgcagaaaatacaacacatgatgaatgctaagacagaagataacagttcgacagtaagatctggtctaggggctgccaaagtagaagaaggtcactctgcgcgtggtggacaatttgttcttggtggtgcaaagggtcctgaagaaaatccaattggcaaatctgttagaataggttctggcaacgctgggcaaggttatacttcagatgaggtcaaggtcctttttcttatactggttgacctatgtcgaaggacatctaccttgccgcatccattgcctgcctctcaggttggttccagtagcattatcataaggctgcactacattgacggcaactacacagtgctccctgaggtagtggaagcgtctcttggtccccatatgcagaatatgcctcgtccacgaggagctgatgctgctggacttctacttcgagaattagaactgcaacctcctgcggaagaatggcatagacgcaacatgtttggtggaccctggtcagaaccagatgattttggtccattggacaatatgcctcgtctaaaaattagtggttccatcaactctcatttgtctgacatggaagtggatgctgtcagttccattgggattgatctttggccaagaaagcgtaggttatctgaaagagatgctgcatttggtctgaaaacatctgtaggtcttggaggttatctaggtgtcatgggatctcgaagagatgttgtcacggctgtgtggagaacaggtctcgatggtgattggtacaagtgcatacgttgtttgcggcaaacttgtgcatttgcgcatcctggtgccccaaatcagacaaatgaacgtgaggcttggtggatcagtcggtggagccatgcttgcccaatgtgtgggggttcatgggtgaaagttgtttgagcgctgtatttggcaacaacttcgctgctaattgctttcctgacaaacatgtatggagttccatagttatgcatctaacgctaggctactaggatcaggttcagccgttcatgccagatggttggtctacaggcacatgcacgtggcacgaccactgtggaagtctggtagaattaggagctattctgggggtctgaatatgtaactgacatttgcattatgctgtctagtgtattattaaccagtgactttccttgctaaaaaggtgtagcatcgttacttgttcagcgctggacgtacttttcatgttttgtcaaaggtttagtagcgcatggtgtgtgttggtaaggttctactcctttttctttttaagacaatgatacacagcttccagcgtgttccagaaaaaaaaacaaaagatcaagtattacttcttgggatcgtgttccattaaaaaagagatcaagtattgttccttgggacacgttccagaaaaaaag

SEQ ID NO: 219677 - DNA, 2126 bp, Zea Mays
cttgataggattaagtgtaggttgttggaaggaacaaatgcccaagatgtacgggcacttgtgttggacatgcaagcaagattacttctggatatgctaggcaaaggaatcgagtctgcccttacaaatccatcaactctgctacctgagccctggcaagcttccagtgatatgttatccagcatcgatgctgacaaaatgactgttgagccagctctgcttccaaacatccagggttacgttgatgctgttcttgatttagcatcacatttcataactcgcttgcggcgttatgcgagtttctgtcgaactctggcgagccatgtggggccatcttctaccacaggcacttctagaaatatggttacaagtccaacaaacagttctccttcgccatcaaataatcaaggtaatcaagggggatcaacatctgcaacagggaactcacaaatgcaggagtgggtccaaggtgcaattgctaagattagtaacaattctgatggtgctgccactgcaacacagaatccaatgagcacgaggacatcatttatgcccatcagcattaatacgggcactttccctggcacacctgctgtgagacttattggggattgccattttcttcatagattatgtcaattactgctattttgtctgcttttccgaagaaggcaatcaccaaggttacttgccagttcgcaaaaaaatcaagattctgccatgcagaaaatacaacacatgatgaatgctaagacagaagataacagttcgacagtaagatctggtctaggggctgccaaagtagaagaaggtcactctgcgcgtggtggacaatttgttcttggtggtgcaaagggtcctgaagaaaatccaattggcaaatctgttagaataggttctggcaacgctgggcaaggttatacttcagatgaggtcctttttcttatactggttgacctatgtcgaaggacatctaccttgccgcatccattgcctgcctctcaggttggttccagtagcattatcataaggctgcactacattgacggcaactacacagtgctccctgaggtagtggaagcgtctcttggtccccatatgcagaatatgcctcgtccacgaggagctgatgctgctggacttctacttcgagaattagaactgcaacctcctgcggaagaatggcatagacgcaacatgtttggtggaccctggtcagaaccagatgattttggtccattggacaatatgcctcgtctaaaaattagtggttccatcaactctcatttgtctgacatggaagtggatgctgtcagttccattgggattgatctttggccaagaaagcgtaggttatctgaaagagatgctgcatttggtctgaaaacatctgtaggtcttggaggttatctaggtgtcatgggatctcgaagagatgttgtcacggctgtgtggagaacaggtctcgatggtgattggtacaagtgcatacgttgtttgcggcaaacttgtgcatttgcgcatcctggtgccccaaatcagacaaatgaacgtgaggcttggtggatcagtcggtggagccatgcttgcccaatgtgtgggggttcatgggtgaaagttgtttgagcgctgtatttggcaacaacttcgctgctaattgctttcctgacaaacatgtatggagttccatagttatgcatctaacgctaggctactaggatcaggttcagccgttcatgccagatggttggtctacaggcacatgcacgtggcacgaccactgtggaagtctggtagaattaggagctattctgggggtctgaatatgtaactgacatttgcattatgctgtctagtgtattattaaccagtgactttccttgctaaaaaggtgtagcatcgttacttgttcagcgctggacgtacttttcatgttttgtcaaaggtttagtagcgcatggtgtgtgttggtaaggttctactcctttttctttttaagacaatgatacacagcttccagcgtgttccagaaaaaaaaacaaaagatcaagtattacttcttgggatcgtgttccattaaaaaagagatcaagtattgttccttgggacacgttccagaaaaaaag

SEQ ID NO: 219678 - DNA, 1232 bp, Zea Mays
attaagtgtaggttgttggaaggaacaaatgcccaagatgtacgggcacttgtgttggacatgcaagcaagattacttctggatatgctaggcaaaggaatcgagtctgcccttacaaatccatcaactctgctacctgagccctggcaagcttccagtgatatgttatccagcatcgatgctgacaaaatgactgttgagccagctctgcttccaaacatccagggttacgttgatgctgttcttgatttagcatcacatttcataactcgcttgcggcgttatgcgagtttctgtcgaactctggcgagccatgtggggccatcttctaccacaggcacttctagaaatatggttacaagtccaacaaacagttctccttcgccatcaaataatcaaggtaatcaagggggatcaacatctgcaacagggaactcacaaatgcaggagtgggtccaaggtgcaattgctaagattagtaacaattctgatggtgctgccactgcaacacagaatccaatgagcacgaggacatcatttatgcccatcagcattaatacgggcactttccctggcacacctgctgtgagacttattggggattgccattttcttcatagattatgtcaattactgctattttgtctgcttttccgaagaaggcaatcaccaaggttacttgccagttcgcaaaaaaatcaagattctgccatgcagaaaatacaacacatgatgaatgctaagacagaagataacagttcgacagtaagatctggtctaggggctgccaaagtagaagaaggtcactctgcgcgtggtggacaatttgttcttggtggtgcaaagggtcctgaagaaaatccaattggcaaatctgttagaataggttctggcaacgctgggcaaggttatacttcagatgaggtcaaggtcctttttcttatactggttgacctatgtcgaaggacatctaccttgccgcatccattgcctgcctctcaggttggttccagtagcattatcataaggctgcactacattgacggcaactacacagtgctccctgaggtagtggaagcgtctcttggtccccatatgcaggagtagaagttgattttcaagtgcacgactcagagatattgcaagtcttcctgtttcgaactgaattcaggacgaccacctttaaatgttgattaggattctcttagcagaagttatcttttttgtattag

SEQ ID NO: 219679 - DNA, 1562 bp, Zea Mays
attgagcccaatgccatcaaagggtccgagcctccgagggaagaaaggtccacacaggacactcctccttcgtctttctccttcctcgccgctctctgctgcattcgcgaacacgcatcgaccctacgactacgagtagcgagagaggattgatggcggcgcagctgcggtacatgatgagccattattttggtaccccacctagcaagaattctccccaaatcctgttcacttctttggttcggggttgacggggttctttgttgctaacgaggcaggaggtgatccaagatctgtactacgccttgaggacaaagggaggtttgacccccaaggaggaggagacgctcctggcttgcaatttacttcctggtgtttatttcatcgtgggttcagtactgggcactttcgcgatgttgttgggttcccacaaaggactcaaattgcttgggcgtccacctaattctccattaagatctttgactgtttatggctacggttttattgtcggaaaggcctgtgctaatgaaacctggcatcaattgcctgaactgcttttagacagggaagaaggacgcatgaagacagagctagctaaaataatactcaataagcatagtgatgacatatacctggttgaagttgtgagaagacacttttttgtcgagcatctgttcgatgatctgcatcaaggtcaaccacttttcaggtggcgcctacgacatacgtatgttgacagcacctttgtagaaagaacgaaggaagttgaagccagcaactctgatgatgtggctagatcaatttcaagagagacaattacaaacactacaccatttggagaaatgatggaggattcactggcttgtatactgggttctcccggatgcaacatggaaagcaacaatcccccagaaaagacagctaatgtcctgacgcgaagtgatctgcgagctcgcagaagaggtcgcaggcatcatcggcatgctgatgactagtttcctattgtgaatgttgtgtagaagtgctgtggaataccctagaccattaccattttatttgggcctcatgccccacagttaatctgctgtgcctggtcaaaatttctaggctggacaagagctgcttttgtaagctgggcaatcctgtatcgtgatgtatcccatggcccctgcattcttcacaaagcaaccaataagacggtatagacaagcgaaacgacgctgggtggtgtgatgtttgcagttcgtggtccacaggctgccggagcatacagcagttcattttcaattcttattatcatatattatggaagaagaaatgaacatcttcaggattgaacagtgtcgcgaaattgtagatgatggttccacaatcccaatgggaccgacagacaaagagacatgctgcttcctgctgtgagttttgtattgcagacgacactgtttatgtggagtttgaattctgttgtgagttttgcacggtagacgacactgtttatgtggagcttgagatgtgagaaggatgagtaagctattagagatagtttaacaccattaatttct

SEQ ID NO: 219680 - DNA, 3245 bp, Zea Mays
aaacgaaagccttatcagtaaccgattgagcccaatgccatcaaagggtccgagcctccgagggaagaaaggtccacacaggacactcctccttcgtctttctccttcctcgccgctctctgctgcattcgcgaacacgcatcgaccctacgactacgagtagcgagagaggattgatggcggcgcagctgcggtacatgatgagccattattttggtaccccacctagcaaggttcgcgggatcgctcccagaaacgtccgagttgcagttcccaatttttttctctttctttccaaaatcattttctgaagaattctccccaaatcctgttcacttctttggttcggggttgacggggttctttgttgctaacgaggcaggaggtgatccaagatctgtactacgccttgaggacaaagggaggtttgacccccaaggaggaggagacgctcctggcttgcaatttacttcctggtgtttatttcatcgtgggttcagtactgggcactttcgcgatgttgttgggttcccacaaaggttgctcactccctcagctctcgatttaatatttgataatgttaaagcatgccattcctgagaaagcgataatattgtgtcaacaatctgcgagcaccaaattgtgttaaaaaacatgccaggagcatgactgcggccttgtatatcaaggttaaaacctaaaatagtattcaatagccatactcgtgcaaaccatccaggatggggattggggaggacagtatctctagataaagttcaaagaaccgtgggtcatctggcaagcaacattattccattattatggctgtattttgtgagctccttccctaaatgttgcaccatggatgctgttgttatgctgctatcaagtgggcacaccagggtaaacgaattatattctgcttttgttattgctcctacttttcaaggatatttgtatgcttaccctgcgccggcattctgccattgttattactgttaaaggatatctgtatgtccctaccctatccttttactagccacggtgaatatgttacttttggagcaatttggcttaatttatgtttacaaatctcgctatgctactgtgcatttgatgcatgtatgcaggcacagctccctcacatttgagtgtagccttgggccattcaaagtgctggtgcctcccgtgatttgttcctgagtgcaggcatgcttgagttgtagagcttgctgtagcaatattatataaatagtggtgcttgaacattatagttaatgttttcctaatcagtaaaacaagtctctatatggtcaatgcatttattggagagggacaatgcaagtcatcagattttgactgttgattcaattaagtgtcgtataaacaaaccgcaaaactgtcatttttaaatttttcttgcagacaatagctattggtaccaaatgcatgcttacgaaattctgttgtgcaggactcaaattgcttgggcgtccacctaattctccattaagatctttgactgtttatggtaaatctcaaggatatttgacctggtggtgatccctgtacaataattcatgcaaaggcatatccaagctatgtttagatgagagacaaattaataatttctgcatcattaatagtgaatgtggctcttttgtattgatggcaggatgagtgagtcaacatgattaggaaatacctacaatgaaacctacacagttaacaatgatgataattattcacatatctaatttctatctaacattgtgctggtaggccccagatgaacagttagccataaacaatactgctatagtactattggaatgtaataccttttttataaacattcaatacttatacatcttaaaagaggaaacacaggtagtatgtagaatacaatgacattaaatgtatgttactgattcattatgtatgatagtttttatgttcaaagtaatttgttgccactatttgctcatgaagttataacagatccatgctgtagttgaaagcaaacagatagcttgttaggttaacagagcagtagatggaaccatttggcataaaatattggatgcatcgacccttcaacattgatacgttgctgaagaatattttttttcatcctttcattgcaaatgtgaatttattgaagctacttctcaggctacggttttattgtcggaaaggcctgtgctaatgaaacctggcatcaattgcctgaactgcttttagacagggaagaaggacgcatgaagacagagctagctaaaataatactcaataagcatagtgatgacatatacctggttgaagttgtgagaagacacttttttgtcgagcatctgttcgatgatctgcatcaaggtcaaccacttttcaggtggcgcctacgacatacgtatgttgacagcacctttgtagaaagaacgaaggaagttgaagccagcaactctgatgatgtggctagatcaatttcaagagagacaattacaaacactacaccatttggagaaatgatggaggattcactggcttgtatactgggttctcccggatgcaacatggaaagcaacaatcccccagaaaagacagctaatgtcctgacgcgaagtgatctgcgagctcgcagaagaggtcgcaggcatcatcggcatgctgatgactagtttcctattgtgaatgttgtgtagaagtgctgtggaataccctagaccattaccattttatttgggcctcatgccccacagttaatctgctgtgcctggtcaaaatttctaggctggacaagagctgcttttgtaagctgggcaatcctgtatcgtgatgtatcccatggcccctgcattcttcacaaagcaaccaataagacggtatagacaagcgaaacgacgctgggtggtgtgatgtttgcagttcgtggtccacaggctgccggagcatacagcagttcattttcaattcttattatcatatattatggaagaagaaatgaacatcttcaggattgaacagtgtcgcgaaattgtagatgatggttccacaatcccaatgggaccgacagacaaagagacatgctgcttcctgctgtgagttttgtattgcagacgacactgtttatgtggagtttgaattctgttgtgagttttgcacggtagacgacactgtttatgtggagcttgagatgtgagaaggatgagtaagctattagagatagtttaacaccattaatttct

SEQ ID NO: 219681 - DNA, 1055 bp, Zea Mays
cttcatcctgccattacgccttacctcgctgacaacgtcagcttcttcaacggactccgcagctcgcagatcacgcaatccccggtaaacaaactccggccacgcgcgcccgtgccgggtctttcgctgaccagcggggcccagtcgtcatccttcttcccccactcgctcgacgcagacccaatcccaacagaaatcgccgcatggctcgccgctcacttcggatcggccgaacgacctcctggatatcgggctgccccacccgatggtgtataagggaccccggcactcgattcatatctctcgcctcgctgttactcgccctcctcgccacaatatcgataattttgcgccgtcgcggggaaaacaggggctgccgcgggggaacttcggctagccgtcatccgcgcctccagtgtgggcctcagagccttccctcggttgcggggcgggcgctggtggcctcgccacctggaattgtcgccggggacttcaccaattggtcgccggacctctcctatcacgatcgagccgccgcgcagcgagggcggacttcctcggagcttaatctgcgcggtaaaggctcatgaacgagaaggccaggatgttgtccatggagcagaggaagcggctgcagctcgccaggctgctcgccatcgaccgacccatctggctgctggacgagccctccgtcgcgctggacgcagagggtaccaggctgcttgaacacatcatcgcggagcaccgggagaagggtggcatcgtgttcgtggccacgcatctgccgattcagattgaggattctatgtcgcttcggcttccccggaggaagacgctggttgatcttgtccattgatggcttgatgccaatgtgaccaggaatttagctgtatatctttctaattccgccccagctatctgtctgaatgctgtcagagcaataattttttttgctggtgctgcatttgtcatccttttttgacagcatgacaatacattctctatgttgataatatgtgcagttgttatttgtgatcactgttttgatgcattgg

SEQ ID NO: 219682 - DNA, 1826 bp, Zea Mays
agccagctgtcttgttcctccgtccgggaggacgaggaggaggaggcgcatccctccatcctctgcgacttggtgcgtctctcgagctcgagtcgattgatgattcatcttcctagtctcgtctccgcgccattctccaaatccatctatcatcaccatcccgatcccagccccagccccagccccagccccgccagacccagacccgatgcagcaacagcaggacccagcacccgccgatcccgacccactgccgccccccgacctcggtgatgccgccgcctcgtccgcaacgcagacgatcccttcccgcaacgcctcctccaagtacgatttcgtcaaggtcaaggtctggctcggggagaacgccgaccactactacgtcctctccaggttcctcctcagcaggatgctcacagtcaccaagattcctaatcatgtcgccatcaagattgcccttgagctcaagaagctgcttgtcgacaacagcctgcttgatgtatcccagagtgatctagaggctaatctgttcaagcttatggaaaaacggggatacggagaggagtatataaatcgctataaaatgatgacaaggttccatcatcaacgggttccactagtaattttggtgtgtggaactgcctgtactggaaaatcaacaatcgctacacaacttgctcagaggctcaatttgcctaatgttttgcagactgacatggtgtatgagctgctgcggacatcaacagagtaagttgtgtcttctttttttttttggttataattcatacatgatcttattaagtatctcactgcagggaatacatttggatccaagcatttatcttatggatgaggaaaagagtgatggtaattccaggacggagaagacagtaacagattctgaaaatccaggcatctctgtagaaaggaaggtcgaacatcaattcaaaaatggactagcagagaacagaatggattctactgaggacaacaaaaactttgtcaaaagcaaaaaaagcacgctggagaaaggtagaaccagtgaaggtctatcttatgctcagaaccacgaaaccaaggtccatgattctgcacgttctcaagaaaaaaatcccaaggatgaaagtgatgggcacaaagatttggaccaacagaagaataatgccaccaagaaagacaaacctgctgctgagccgataattgttccaattgtactgaggatgtctgattttgatcacaaagcattgctagaggaatggatagccactagagctttcagagataattgcattcctcaggatcatcggaaacttataaacaaccttaagcttattcaggactacctttgttcttttgagtcacagggattgaccattgttgatatctcagcaaattcgtttcctcaaacattagattggcttcacagctatcttcttcagtgcatcgagcgaggtcttttggctgcgtgtttagaaagctgcaatcaaggtcaatgacactcttggatgtaacctgtccaaccacacctcagtgggcattatatgctggcaatggacactaagaatatcattgtaaaggattacgcatgagtctggatatcatctccaaccaagaccgatatgaaaataccatcgtgatgttgtcaataccagccataagcgtgggtctgtctgattggggttactcgcattaatattgtactgtattgtattagaggttatgcggcatactcataatctgaataagataacaaaatttggcattgtttgctttatctgaatataaacttgtaaagatttatctacgtcctgcataagaaaattttg

SEQ ID NO: 219683 - DNA, 1558 bp, Zea Mays
cccaccaatacggcaacactgttgcccatttgagaacctgggccggtcctttgacctgtttggcatggatgaaggcttagatacataattatgctatgtagatttaagcatatctcttgtgctgtaaatgaactctcttgtgcatatgactatttgtatgatatggaaattatgcatcttgcagaaccatgttgatagactcgtttatttagatggaggcatatccattggatgacaaaactctggtgcttgttgtgtttaacacatttatgatgtctgggaatacatttggatccaagcatttatcttatggatgaggaaaagagtgatggtaattccaggacggagaagacagtaacagattctgaaaatccaggcatctctgtagaaaggaaggtcgaacatcaattcaaaaatggactagcagagaacagaatggattctactgaggacaacaaaaactttgtcaaaagcaaaaaaagcacgctggagaaaggtagaaccagtgaaggtctatcttatgctcagaaccacgaaaccaaggtccatgattctgcacgttctcaagaaaaaaatcccaaggatgaaagtgatgggcacaaagatttggaccaacagaagaataatgccaccaagaaagacaaacctgctgctgagccgataattgttccaattgtactgaggatgtctgattttgatcacaaagcattgctagaggaatggatagccactagagctttcagagataattgcattcctcaggtatctatggaagctttggtacacatacaatgtacaaacttacatttctttgaaattgttgtgcaacccttgtacttcttgtgattagttgatataaaatggtatgtcttatttgtccgcaatgcttgagatgttactaataagttgatgcatgatagagatgttactaataagcagtgattttgtgggacctactttcaggttggctacctcatgcaactaggtatctaactattacatggtgctaactttgtgatgtgttactcaggatcatcggaaacttataaacaaccttaagcttattcaggactacctttgttcttttgagtcacagggattgaccattgttgatatctcagcaaattcgtttcctcaaacattagattggcttcacagctatcttcttcagtgcatcgagcgaggtcttttggctgcgtgtttagaaagctgcaatcaaggtcaatgacactcttggatgtaacctgtccaaccacacctcagtgggcattatatgctggcaatggacactaagaatatcattgtaaaggattacgcatgagtctggatatcatctccaaccaagaccgatatgaaaataccatcgtgatgttgtcaataccagccataagcgtgggtctgtctgattggggttactcgcattaatattgtactgtattgtattagaggttatgcggcatactcataatctgaataagataacaaaatttggcattgtttgctttatctgaatataaacttgtaaagatttatctacgtcctgcataagaaaattttg

SEQ ID NO: 219684 - DNA, 1055 bp, Zea Mays
caaaactctggtgcttgttgtgtttaacacatttatgatgtctgggaatacatttggatccaagcatttatcttatggatgaggaaaagagtgatggtaattccaggacggagaagacagtaacagattctgaaaatccaggcatctctgtagaaaggaaggtcgaacatcaattcaaaaatggactagcagagaacagaatggattctactgaggacaacaaaaactttgtcaaaagcaaaaaaagcacgctggagaaaggtagaaccagtgaaggtctatcttatgctcagaaccacgaaaccaaggtccatgattctgcacgttctcaagaaaaaaatcccaaggatgaaagtgatgggcacaaagatttggaccaacagaagaataatgccaccaagaaagacaaacctgctgctgagccgataattgttccaattgtactgaggatgtctgattttgatcacaaagcattgctagaggaatggatagccactagagctttcagagataattgcattcctcaggatcatcggaaacttataaacaaccttaagcttattcaggactacctttgttcttttgagtcacagggattgaccattgttgatatctcagcaaattcgtttcctcaaacattagattggcttcacagctatcttcttcagtgcatcgagcgaggtcttttggctgcgtgtttagaaagctgcaatcaaggtcaatgacactcttggatgtaacctgtccaaccacacctcagtgggcattatatgctggcaatggacactaagaatatcattgtaaaggattacgcatgagtctggatatcatctccaaccaagaccgatatgaaaataccatcgtgatgttgtcaataccagccataagcgtgggtctgtctgattggggttactcgcattaatattgtactgtattgtattagaggttatgcggcatactcataatctgaataagataacaaaatttggcattgtttgctttatctgaatataaacttgtaaagatttatctacgtcctgcataagaaaattttg

SEQ ID NO: 219685 - DNA, 554 bp, Zea Mays
tatggaagctttggtacacatacaatgatcatcggaaacttataaacaaccttaagcttattcaggactacctttgttcttttgagtcacagggattgaccattgttgatatctcagcaaattcgtttcctcaaacattagattggcttcacagctatcttcttcagtgcatcgagcgaggtcttttggctgcgtgtttagaaagctgcaatcaaggtcaatgacactcttggatgtaacctgtccaaccacacctcagtgggcattatatgctggcaatggacactaagaatatcattgtaaaggattacgcatgagtctggatatcatctccaaccaagaccgatatgaaaataccatcgtgatgttgtcaataccagccataagcgtgggtctgtctgattggggttactcgcattaatattgtactgtattgtattagaggttatgcggcatactcataatctgaataagataacaaaatttggcattgtttgctttatctgaatataaacttgtaaagatttatctacgtcctgcataagaaaattttg

SEQ ID NO: 219686 - DNA, 1697 bp, Zea Mays
tatctccgcccagtgaggaggcggcacgcgcgcgccgtcgaccacgcccatgccgaaatctgcctctgtgggctgtggctgccggacgagcaagcgccacgcgcgcgccgtgcctgccatgagccgtcagtccgcagtccgcagtccgcagccacacttttgctaaaccctagtaaatatacgatacgaagcgcaaacgcttgcctcatcctcgaattcgccatggcgatgcccaccacctcgtctgcttccccatgccaggcaccgtcgcccgccgggctgcccatttcccctggcgcccgcgctaccatcctctcattcagccgccgcctccgccgctcccgtggcgccatcatttctgcgcccactgattgatgaagatgtacagaggcataatgaacttcttgaagtagtaaaatccacaccatctgataaacttggttctattgttgctaagcggcgtaaagatttcacagtggaattcttcaaccacctttactatgttgcagagtcttgtcatgatgaaccagaaaagcaaactgagttggcaaagcttggaaatgattgtgtagatgccctacaagctcatgatgatacaacagggagccttgaagctttgaatgctgcagaattgaagttaaaagatatacttaattcaccttcggtggatgctgcttgcagaaagattgatgacttggctgagaaaaaagaactggactctgcactagtgttgatgctttcaaaagcttggtcagctgcaaagggcactgacatcacgaaatctgaggcaaaggatataatgtttcacctatatatgactgcggtggcgaatctccagagacaaatgccgaaggatataagaatactgaagcatcttataatgatagaggatccagaagaacggtcaagtgcacttaatgacgcttttactcctggccctgaacttcaaggggacaatgttgatacattatacacaggcgctgcacacttgggcaagagctatagttgatgcatattataacagcagagaaggcactctcattgggcaagcaagagacatgatgaatcctaaaatcattaagagagtcgaagagatagtgaagataatcaaggacaagtacctttaagttttagtcatcataaaatgggggtttaacatttctactgattgtacaagtcttgtgcgatgatggtcttttacaggctgctcccgtcaaaactactgccatcgttccagttggaactcctcagcactgacgaaacaatcagtgtttaaaggaaatgcaagttgttgtaactcattacaatgagaaggtgtttgtagcatgtggtatcagtttagctgctacatagatattagcggagtacttgtagctgtcctgactctaacagtgttgtaactgtactagtatcgaaccaggagacatgtatgtgtccaagcattcttgtaatgagctagtgatctcaaacaattctacggcttatgctgactcaaaccatttaagggcttgttcggttagctcctaattcatatggattgagtggaattgggtgtgtttaaatcctaagtaagtcaaactcctttttaattttttctaatcccattcaatccttaaataataggattaaccgaacaaggcctaaagtaagccaaatgtttctggacatatttgaactgaataatgtaagaatacctg

SEQ ID NO: 219687 - DNA, 2425 bp, Zea Mays
catatgttcctggccccacttactgtgtcactgccagtatatcctcgatactgcaacaactatcgctcccgtgtcggccccactccaaatcggcgagcccacaacatcggcgcttccttccggcaccttccaaagttccaacttccaagtcacgagaaaggtttcgcttcgaaactcaaccggagatggcgagctctggcggaatctccgaccagctcttcgtctccgtcaagttagagagcccgcacctcgcggagctcgacctcgccccccacctcttcggctcccaccctgtggctggctcgtgggacccctgcaaggccctgcctttggagcgggcggccaccgccgtgtgggagttcagctgcgtcgtgccttcgcagcacgaatcgctggatttcaagtttgttttgaagcgaaaaggtgataatcctcaatacattattgaggagggacctaaccgaccattgggttgccagagaaatgaatttgagatggggaatgcgttgtttaaactcaacgaagggaaggaggtacttgagtgcaaggttcaggttgagacagaaatgttatccccaattgacttggcggctagttggagagctcatcaggagtattttcagccttcaagggtgcgggggactcacgatgtcactatcaaccctgggttagaaggcagggccaagagcacaattggagggcatgcatcgtcactggaagaacaaagggcaatgtttgttgatagaggggttggctcaccaaattttgcaagaccaacaatggaaaccttttcgatgagcaactttaagttggattctgaatcaaagggtatgccagcagcagaaggggctgttgcagcagctgctgtagctgatcagatgtatggaccaaaagaggaccgcaagttggccatcgtattggttgggctaccagctcgaggtaagacctttacagcagctaaacttacaagatatctccgatggttaggtcatgaaacaaaacacttcaatgttggaaagtaccgccggctcaagcatggaactaatcagactgctgatttctttcgtggagataacagggagggtgtggaggcacgtaacgaggtggctgcattagcaatggaagatatgctatcttggatgcaggagggtggtcaggttggtattttcgatgccacaaacagcacaagaatacggaggaacatgctgatgaaaatggctgaaggaaaatgtaagatcatctttttggaaacattatgtaatgaccaagatgttcttgagagaaatatacgattgaaagttcaacaaagtcctgattatgcagagcaaacagattttgaagctggtgtacaagatttcaaagagcgattgacctattatgaaaaggtctatgaaccggtggaagaaggttcttacataaaaatgattgacatggttagtgggaaggggggccaactaaagattaatgacataagtggttacttgcctggacggatcgttttcttcttggttaactgtcatctgacacctcgtcctatcctgctaacaagacatggtgaaagtatggataatgtcagaggaagaatcggtggagactcttctttgagtgaggccggtgagctttattcaaggaagcttgcgagctttgtggagaagcgactgaaatccgagcggactgcctctatatggactagcacactccagagaacaatattaacagcacatccgatcattggttttccaaagatacaatggcgtgctcttgatgagatcaatgctggggtctgtgatgggatgacatacgatgaaataaagaaaagtaaacctgaagaatatgaatcacgaagaaaagacaagctgaggtatcgttatccgagaggagaatcctatcttgacgtcattcaaagactagaacctgtgataattgaacttgaacgacagcgtgctccagttgtagtcatagctcaccaggctgtgttgagagcactttatgcatactttgcggacaaaccgcttgaggaagtcccaaatattgagatacctctacatacaataattgagatacaaatgggtgttgctggtgttcaagagaaacggtacaaactcatggatgcaatccatcccacagcggggttgtaagaaataataaatggagctcgccttctaaaagcaatggtagcacaaataaattttgtgatgatatacgtatcacaacattaatcaattataagctatagttcgaggtggaatgtcacaccactaggtttagctcatagatgatttgccatttgacttacaagttttggctggttgtgtagtgtgtactcttaattcatgagttctgaacatgtttaattcagatccgagttctgagcaagtttattcaggccaaagctcgcgccaaagacagtttttccagtaacgaa

SEQ ID NO: 219688 - DNA, 4724 bp, Zea Mays
ctccggactcgaggattcggagtttcggacaaccgacaacatcgctcgccggcgacgagcgcggcgcggcggcggcgatggatgggggacacacgacgaggcatccgatgtctccagcgatctcggcttcgactgtgctaccgcagcagcggcagatgcagcctcaccaccacccggcgcggccggcaatcgccgatctcttcaccctatacctcggcatgaactcgaagcagcgagcggaagacccattgagagagagctctttcttgaaaacattcctgatgatgaagcactggttagtataatcatggagattcataggaggagagatatggtgtgtatgcacatgcaaatgttggatcaacatcttcattgtccgacatttggaactcatcgtttcttatcacaatcatacccaagcatagctggagaatctgttactaatctgcgttattctcccattacttaccctagtgtattgggagagccactacatggagaggaccttgcaaactccattcctaagggtggtttagactgggaacgtgctcttcgttgtttgaggcatgctctccgcacaaccccatcaccagactggtggagacgcgttcttcttgttgccccttgttacagatcacagtctcagcaatcatcaactcctggagctgttttctcacctgatatgattggtgaggcagttgcggacaggacaattgaactactgaagctcactaactcagagactcaatgctggcaagattggcttttgtttgctgacatctttttcttcctaatgaaaagtggatgcattgactttcttgattttgtggacaaacttgcttctcgagtcacaaatagtgatcaacagattctccggagtaaccatgtcacttggttgcttgcgcagattatccgcattgagattgttatgaacactctaagttcagatccaaggaaggttgataccacaagaaagataatttcattccacaaagaagacaaaagccttgacgccaataatattggccctcaaagtattcttcttgatttcatcagtagtagtcagactctgcgcatttggtctttcaacacttcgattagagaacatttgaacagtgatcagcttcaaaaaggaaaacagattgacgaatggtggaaacagatgatgaaagcttctggtgagaggatgatagactttacgaacttggacgaacgagcaacaggcatgttctgggttctctccttcaccatggcgcaaccagcttgtgaagcagtaatgaattggtttacgtcagctggaatggcagatttaattcaagggcctaatatgcagccaagtgaaagaataatgatgatgcgtgaaacttaccctctgtcaatgtcattgctttctggcttgtctatcaatctttgtctgaagcttgcttaccagcttgaagagaccatatttcttggccaggctgtccctagcattgctatggtggaaacctatgtgaggttactgcttatagcaccccattcattgtttcgtccccattttacggcattaacccaaagatctccatctattttgagcaaatctggtgtgtcattgctcctacttgagatactaaattacagattgctgcctttgtataggtatcatggtaaaagcaaggcgttgatgtatgatgtcacaaagataatatcaatgattaagggtaaacgtggagaacatcgtctttttcgattagcagaaaatttgtgcatgaatttgattctctcactgaaagacttcttttttgtgaaaaaggaattgaagggcccgactgagtttactgaaactctaaaccgcataacaataataagtcttgcaatcactatcaagacgcgtggaattgctgaagttgaacacatgatttatcttcaaccattgttagagcaaattatggcaaccagtcagcatacctggcagaaacgactgttattaaccaatgtaatcagctgctctcaccatctgctgagccaaactatgtcatgacttatttgagccacagtttccctcagcatcgtcaatatctttgtgctggtgcttggatgctgatgaatggacatcttgagatcaacagtgcaaatcttgctcgcgtcttaagagagttttcacctgaggaagttacagcaaatatctatacagtggttgatgtgcttctgcatcatatccaatgcgaggtgcaaagggggcatctagcacaggatttactatccaaagcaatcacaaatctttctttttttatatggacacatgaactccttccgctggatattctattgctagctcttattgacagggatgatgatccttatgctttacgccttgtgataagtctgcttgaaaaaccagaacttcagcaaagagtcaagaatttctgtaatactcgttctccagagcattggctgaaaaatcaacatccaaaaagagctgagctccagaaagctcttggcagccatctttcatggaaggaccgctatccacccttcttcgatgacattgctgcacgtctgcttcctgttattccactgattatttataggcttattgagaatgatgcaactgacattgcagacagagttcttgcattctattcttccttgcttgccttccacccgctaagatttacatttgtacgtgatattcttgcgtatttctatggtcatcttccaatcaaactaattggtaggatcctcaacctgctgggtgttagcactaaggtaaacctatttacttttttagttgtaacactttgtgcctaacacttgctaactatgagctttttccagacccccttttcagaatcttttgctaaatatttagtgtcatcaaattcttcaatatgtccaccaccagaatactttgccaacctgttgctaaacctcgttaataatgttatacctcctttaagtagcaaatcgaaatcaaacccagcagacacaacacgctcgactttcaacaaacatcatgcatcttcacaacctggtggagttggtaacaccgatggccagagggcattttatcagaatcaggatcctgggtcgtatacacagcttgttttggaaacagcagctattgagattctctcacttcctgtgcctgctgctcaaatagtgtcctctttggtccaaataatagcacatgtacaagcaatacttatacagtcaaatagtggccaaggaatgtcaggtggtttggggcaaagttctgggctgccaacttctccttcaggggctgctgaatcctcaggtcccaaccaagcgaacagtgctgcaactggcatcaatgccactaactttgtttctaggagtggttactcctgccaacaattgtctgttttgatgattcaagcatgtggtcttctgctggcacaactcccaccagaattccacatgcaactatactcagaagcagctcgagtcataaaagactgctggtggcttgctgatggttccaggcctgttaaagagcttgactctgctgttggatatgcactgttggatcctacatgggcttcccaagacaatacatcaacagccattggtaacattgttgcccttctgcattccttttttagcaatcttccacaagagtggctggaatctactcatactgtcatcaaacaccttcggccagtcaattcagttgccatgttaagaatcgccttccgcatattgggtcccttgttacctcgtctagcctttgctcgacctttgttcatgaagaccttggctttactcttcaatgttttgggtgacgtgtttggtaagaaccctcaggtctcaaatccaaatcctgtggaggcgtcagaaattgcagacataattgacttcttgcatcatgcggtgatgtatgagggccaaggcggtcctgttcagagcacgagcaaacccaagctggagatactgacattatgcgggaaagtaatagagattttgaggccagacgtgcaacatcttctctcccacctcaagattgaccccacctcttcaatctatgctgcaacgcatccaaagctcgttcaaaacccatcctaataatgttatagcttacaagtgtattctaatgatgcaagatgcttcgaaccactgcagaagtctcaacatgtgatgctgttggatgagtagaattgcagtaactgtaacatgtgattcaggggcgtattctcaagtgattcgccgttgtcagttgtatcctttagttagaatgttgtaaatgctatctgcttagtgcatattaggacataactacatagtgtaagcagtaaccatggaggttatcttgccaggctaagaattttggctgccttgcctgtgagccatgcgacatatgtatcctgtcgcattaggatgagcgacaaccgacacggtcgcatgatgcaagatttgtgccggttggccgattgtcaccgtgcagatctcttcgtaacagtgctgcacgtggaaggtttgaccgagtgactgcatcaccagttaatagtgtgaactgtatcaaattcttgatcatcttgcttattatgaaatgcctacgttgtgtcaatcactcttgcattgtatagtcgctcatcaagtgttcaaacttaattgtgggtaaaattgtttggttcttcttgcatgacattcatccaatctgattccgtaagaacttcatctatgcatgttgacacaatgaaataaacaaatgagtgatatttaac

SEQ ID NO: 219689 - DNA, 4027 bp, Zea Mays
gctgctctgactagtaaaccctttcccctctccggactcgaggattcggagtttcggacaaccgacaacatcgctcgccggcgacgagcgcggcgcggcggcggcgatggatgggggacacacgacgaggcatccgatgtctccagcgatctcggcttcgactgtgctaccgcagcagcggcagatgcagcctcaccaccacccggcgcggccggcaatcgccgatctcttcaccctatacctcggcatgaactcgaagcagcgagcggaagacccattgagagagagctctttcttgaaaacattcctgatgatgaagcactggttagtataatcatggagattcataggaggagagatatggtgtgtatgcacatgcaaatgttggatcaacatcttcattgtccgacatttggaactcatcgtttcttatcacaatcatacccaagcatagctggagaatctgttactaatctgcgttattctcccattacttaccctagtgtattgggagagccactacatggagaggaccttgcaaactccattcctaagggtggtttagactgggaacgtgctcttcgttgtttgaggcatgctctccgcacaaccccatcaccagactggtggagacgcgttcttcttgttgccccttgttacagatcacagtctcagcaatcatcaactcctggagctgttttctcacctgatatgattggtgaggcagttgcggacaggacaattgaactactgaagctcactaactcagagactcaatgctggcaagattggcttttgtttgctgacatctttttcttcctaatgaaaagtggatgcattgactttcttgattttgtggacaaacttgcttctcgagtcacaaatagtgatcaacagattctccggagtaaccatgtcacttggttgcttgcgcagattatccgcattgagattgttatgaacactctaagttcagatccaaggaaggttgataccacaagaaagataatttcattccacaaagaagacaaaagccttgacgccaataatattggccctcaaagtattcttcttgatttcatcagtagtagtcagactctgcgcatttggtctttcaacacttcgattagagaacatttgaacagtgatcagcttcaaaaaggaaaacagattgacgaatggtggaaacagatgatgaaagcttctggtgagaggatgatagactttacgaacttggacgaacgagcaacaggcatgttctgggttctctccttcaccatggcgcaaccagcttgtgaagcagtaatgaattggtttacgtcagctggaatggcagatttaattcaagggcctaatatgcagccaagtgaaagaataatgatgatgcgtgaaacttaccctctgtcaatgtcattgctttctggcttgtctatcaatctttgtctgaagcttgcttaccagcttgaagagaccatatttcttggccaggctgtccctagcattgctatggtggaaacctatgtgaggttactgcttatagcaccccattcattgtttcgtccccattttacggcattaacccaaagatctccatctattttgagcaaatctggtgtgtcattgctcctacttgagatactaaattacagattgctgcctttgtataggtatcatggtaaaagcaaggcgttgatgtatgatgtcacaaagataatatcaatgattaagggtaaacgtggagaacatcgtctttttcgattagcagaaaatttgtgcatgaatttgattctctcactgaaagacttcttttttgtgaaaaaggaattgaagggcccgactgagtttactgaaactctaaaccgcataacaataataagtcttgcaatcactatcaagacgcgtggaattgctgaagttgaacacatgatttatcttcaaccattgttagagcaaattatggcaaccagtcagcatacctggtcagaaaagacactgcgttattttcctcctctcattcgtgattttttaatggggagagtggataagaggggtctagctatccaagcatggcagcaggcagaaacgactgttattaaccaatgtaatcagctgctctcaccatctgctgagccaaactatgtcatgacttatttgagccacagtttccctcagcatcgtcaatatctttgtgctggtgcttggatgctgatgaatggacatcttgagatcaacagtgcaaatcttgctcgcgtcttaagagagttttcacctgaggaagttacagcaaatatctatacagtggttgatgtgcttctgcatcatatccaatgcgaggtgcaaagggggcatctagcacaggatttactatccaaagcaatcacaaatctttctttttttatatggacacatgaactccttccgctggatattctattgctagctcttattgacagggatgatgatccttatgctttacgccttgtgataagtctgcttgaaaaaccagaacttcagcaaagagtcaagaatttctgtaatactcgttctccagagcattggctgaaaaatcaacatccaaaaagagctgagctccagaaagctcttggcagccatctttcatggaaggaccgctatccacccttcttcgatgacattgctgcacgtctgcttcctgttattccactgattatttataggcttattgagaatgatgcaactgacattgcagacagagttcttgcattctattcttccttgcttgccttccacccgctaagatttacatttgtacgtgatattcttgcgtatttctatggtcatcttccaatcaaactaattggtaggatcctcaacctgctgggtgttagcactaaggtaacattgttgcccttctgcattccttttttagcaatcttccacaagagtggctggaatctactcatactgtcatcaaacaccttcggccagtcaattcagttgccatgttaagaatcgccttccgcatattgggtcccttgttacctcgtctagcctttgctcgacctttgttcatgaagaccttggctttactcttcaatgttttgggtgacgtgtttggtaagaaccctcaggtctcaaatccaaatcctgtggaggcgtcagaaattgcagacataattgacttcttgcatcatgcggtgatgtatgagggccaaggcggtcctgttcagagcacgagcaaacccaagctggagatactgacattatgcgggaaagtaatagagattttgaggccagacgtgcaacatcttctctcccacctcaagattgaccccacctcttcaatctatgctgcaacgcatccaaagctcgttcaaaacccatcctaataatgttatagcttacaagtgtattctaatgatgcaagatgcttcgaaccactgcagaagtctcaacatgtgatgctgttggatgagtagaattgcagtaactgtaacatgtgattcaggggcgtattctcaagtgattcgccgttgtcagttgtatcctttagttagaatgttgtaaatgctatctgcttagtgcatattaggacataactacatagtgtaagcagtaaccatggaggttatcttgccaggctaagaattttggctgccttgcctgtgagccatgcgacatatgtatcctgtcgcattaggatgagcgacaaccgacacggtcgcatgatgcaagatttgtgccggttggccgattgtcaccgtgcagatctcttcgtaacagtgctgcacgtggaaggtttgaccgagtgactgcatcaccagttaatagtgtgaactgtatcaaattcttgatcatcttgcttattatgaaatgcctacgttgtgtcaatcactcttgcattgtatagtcgctcatcaagtgttcaaacttaattgtgggtaaaattgtttggttcttcttgcatgacattcatccaatctgattccgtaagaacttcatctatgcatgttgacacaatgaaataaacaaatgagtgatatttaac

SEQ ID NO: 219690 - DNA, 2426 bp, Zea Mays
aaccctctgttcttttcaaaacaaaaaaccaaaacccttctgtggaaaaacgtaaaaccaggcgcgccccgcaggaattgcggtcaggagaacctcatccctctcgccttcaggttctactcgccctctccccacccgcagcgcctcctcccattcccccaacggacattgcctaggaggctaggacagaaccacccagagcgcacaaccttacccgaatcgccgttgcatggaggccgtgcgcgcgtcggcggcgtgggtcgccagtcgctcctcccatgtcacggtcgaccttcaagaaattgagaaggtagtggaccaaatccaaggagatgttccaaaagttgagtgggattacgaaggaattcactactttgacaatgggccactcacagtccagtacctgttcgtcttggatgcactaaacttctgcttctggccagataaggacttgagctatgaccatttggcttctggactgaagtcagccttggagaaagacaaaaatgcccttgattcagatcgtctccagaattacactgggccccagctccgccaacttctgaactggccacgaccactgccaattgaggaggaaagagtacgccttctccacgaggttgggcaggaacttaaaagaagctttggaggtcaggctgctaatctagtgaagtctgctggaaactctgctgcgactcttattgaactgattactcgacattttcctggcacctacagtgaaagtgaaactggaatggcccatccacccactactactgtttgtctgcatatggatttatgttctgcctgctactttggatctgagagtcaggaaacagtgatgattgatgaactggtgcctcatctaggcatatgaacttcgtatgagctgggccattcaaaaccagatgattgtgaatatttgatgcttacacttacacccttacattttttcatttctcgtgcaaaacgttagtggttttcattttttagcagttggccaagaaatctgttcacatgatttcacttgaagttaacatttattctcggtgttggtgctttcgttggatctccattgatttgagacattgaacatggagtttatttcctcaaagaagaacatgaaactgttcccgtagtgtttaactgattatacttgttcgacaaatatgtccagacatgagctaatcatctgaaattccagtgatttaggagtaattgatttcaggcttccagcacattattctatcatatatggacatatttgattgcacagataggttcactgacaaacatgtacaaatcttaactattcaaccggttagtctgaattcagaaacaaggaaggatgctagttttacccctgatctggccatagccaacttcagaatatttcacaattcgttcttcgatcattgaatttaaattgtaccttgcgctcttgcagggaattttagcatgtattgaatcttttgttaataggatagcgttgtgcaacttgatggtaccttttgctaacgttctatgaacacgtacatctgcatgcattcaaaaccaggtttccgggaccattcactctacaaggggcaccaggttttcctgtacaagagagcccagatctttgttgctgatttgtggggcgccttcaagggacaaaactatggcgagttccacgatatcaattccatcaccatatttgctgactacattgttccagcggtcctgagggagcttggagtacttaaatatggctcgaatctatcttgctccatcgactcgaacagtgagatagtgcctggaagcgaggaggaagtggagatacgcgcgtgctccatctatgcagtggagaagatgagggacctgatcagtaagaagtttggaaagcagcttctgagcatcgacattgatctctggctctggtcctgcggcgtgcagaacatggcgctgtcacatcaccgcaccctgtcgatttactactagacagggcagtggcggaggacggataaaaattttggtatggcttgagctatacctagccacaatggaccctccgcccctgagacaggcagtcagtcaggaagctgaccctgctggtgcgctcgttcagctggccgggcgttgtcgtcgcttgttcgtcctaaccataacggtgcatgtaggtgtcgagagttttgtctccttgggaatgcacacaggtgcaaggtattgtaggcccgtcccatgaggatgcatggggttggtagtacaacatttttttttgtgatttagagacttgaactgctgcagttttcacatgaatgttatccctaaggacaaggcgggagagcgagtgtttctctatctccagaactgatcgcggcgtttattttctgtttccagttactgctccaactctttctgaatcttgctgaatttgagtaagcgca

SEQ ID NO: 219691 - DNA, 2002 bp, Zea Mays
aaccctctgttcttttcaaaacaaaaaaccaaaacccttctgtggaaaaacgtaaaaccaggcgcgccccgcaggaattgcggtcaggagaacctcatccctctcgccttcaggttctactcgccctctccccacccgcagcgcctcctcccattcccccaacggacattgcctaggaggctaggacagaaccacccagagcgcacaaccttacccgaatcgccgttgcatggaggccgtgcgcgcgtcggcggcgtgggtcgccagtcgctcctcccatgtcacggtcgaccttcaagaaattgagaaggtagtggaccaaatccaaggagatgttccaaaagttgagtgggattacgaaggaattcactactttgacaatgggccactcacagtccagtacctgttcgtcttggatgcactaaacttctgcttctggccagataaggacttgagctatgaccatttggcttctggactgaagtcagccttggagaaagacaaaaatgcccttgattcagatcgtctccagaattacactggtatcttccttctcattgggatcttgttaggtttaagagttccttcattagcattttctgaacttctgcttctggttcaagggaatgcttctcagcttctatgataaactgtcgttttctggaaatgtcatttaactgtgtaggttgtggtaccagatgaatgaacagttacaagttgtgcttaactggatgttatctgatcctctcagtctgagtacccttttcatccctttattcttctgttgatagtgaaagggcctttaactgagttggtttctgttgataataataagctactcattttctaattttcttgctgtgcttctaattgagaaataattacttgcatctctgctatggatcctcataaaaactgctaatttggaaggacatttgcaaaatgtagggccccagctccgccaacttctgaactggccacgaccactgccaattgaggaggaaagagtacgccttctccacgaggttgggcaggaacttaaaagaagctttggaggtcaggctgctaatctagtgaagtctgctggaaactctgctgcgactcttattgaactgattactcgacattttcctggtttccgggaccattcactctacaaggggcaccaggttttcctgtacaagagagcccagatctttgttgctgatttgtggggcgccttcaagggacaaaactatggcgagttccacgatatcaattccatcaccatatttgctgactacattgttccagcggtcctgagggagcttggagtacttaaatatggctcgaatctatcttgctccatcgactcgaacagtgagatagtgcctggaagcgaggaggaagtggagatacgcgcgtgctccatctatgcagtggagaagatgagggacctgatcagtaagaagtttggaaagcagcttctgagcatcgacattgatctctggctctggtcctgcggcgtgcagaacatggcgctgtcacatcaccgcaccctgtcgatttactactagacagggcagtggcggaggacggataaaaattttggtatggcttgagctatacctagccacaatggaccctccgcccctgagacaggcagtcagtcaggaagctgaccctgctggtgcgctcgttcagctggccgggcgttgtcgtcgcttgttcgtcctaaccataacggtgcatgtaggtgtcgagagttttgtctccttgggaatgcacacaggtgcaaggtattgtaggcccgtcccatgaggatgcatggggttggtagtacaacatttttttttgtgatttagagacttgaactgctgcagttttcacatgaatgttatccctaaggacaaggcgggagagcgagtgtttctctatctccagaactgatcgcggcgtttattttctgtttccagttactgctccaactctttctgaatcttgctgaatttgagtaagcgca

SEQ ID NO: 219692 - DNA, 1843 bp, Zea Mays
aaccctctgttcttttcaaaacaaaaaaccaaaacccttctgtggaaaaacgtaaaaccaggcgcgccccgcaggaattgcggtcaggagaacctcatccctctcgccttcaggttctactcgccctctccccacccgcagcgcctcctcccattcccccaacggacattgcctaggaggctaggacagaaccacccagagcgcacaaccttacccgaatcgccgttgcatggaggccgtgcgcgcgtcggcggcgtgggtcgccagtcgctcctcccatgtcacggtcgaccttcaagaaattgagaaggtagtggaccaaatccaaggagatgttccaaaagttgagtgggattacgaaggaattcactactttgacaatgggccactcacagtccagtacctgttcgtcttggatgcactaaacttctgcttctggccagataaggacttgagctatgaccatttggcttctggactgaagtcagccttggagaaagacaaaaatgcccttgattcagatcgtctccagaattacactgggccccagctccgccaacttctgaactggccacgaccactgccaattgaggaggaaagagtacgccttctccacgaggttgggcaggaacttaaaagaagctttggaggtcaggctgctaatctagtgaagtctgctggaaactctgctgcgactcttattgaactgattactcgacattttcctggtttccgggaccattcactctacaaggggcaccaggttttcctgtacaagagagcccagatctttgttgctgatttgtggggcgccttcaagggacaaaactatggcgagttccacgatatcaattccatcaccatatttgctgactacattgttccagcggtcctgagggagcttggagtacttaaatatggctcgaatctatcttgctccatcgactcgaacagtgagatagtgcctggaagcgaggaggaagtggagatacgcgcgtgctccatctatgcagtggagaagatgagggacctgatcagtaagaagtttggaaagcaggtaggcgcatctgaaccagtttcgcctgactacctgagacttccattcattaggcatgccaatgccgtttgctttctgacctgcattctcggtgggccgatttacaaaaaaaaaaaaaaagaaattcactaatcttcatagccgttgaacttgaacgagttaaattaaccaactcataaagcagtcactcgatacgtgaggttcggctcggaactaacgccctcttggtctcgtgttttctcggcagcttctgagcatcgacattgatctctggctctggtcctgcggcgtgcagaacatggcgctgtcacatcaccgcaccctgtcgatttactactagacagggcagtggcggaggacggataaaaattttggtatggcttgagctatacctagccacaatggaccctccgcccctgagacaggcagtcagtcaggaagctgaccctgctggtgcgctcgttcagctggccgggcgttgtcgtcgcttgttcgtcctaaccataacggtgcatgtaggtgtcgagagttttgtctccttgggaatgcacacaggtgcaaggtattgtaggcccgtcccatgaggatgcatggggttggtagtacaacatttttttttgtgatttagagacttgaactgctgcagttttcacatgaatgttatccctaaggacaaggcgggagagcgagtgtttctctatctccagaactgatcgcggcgtttattttctgtttccagttactgctccaactctttctgaatcttgctgaatttgagtaagcgca

SEQ ID NO: 219693 - DNA, 837 bp, Zea Mays
ccaggttttcctgtacaagagagcccagatctttgttgctgatttgtggggcgccttcaagggacaaaactatggcgagttccacgatatcaattccatcaccatatttgctgactacattgttccagcggtcctgagggagcttggagtacttaaatatggctcgaatctatcttgctccatcgactcgaacagtgagatagtgcctggaagcgaggaggaagtggagatacgcgcgtgctccatctatgcagtggagaagatgagggacctgatcagtaagaagtttggaaagcagcttctgagcatcgacattgatctctggctctggtcctgcggcgtgcagaacatggcgctgtcacatcaccgcaccctgtcgatttactactagacagggcagtggcggaggacggataaaaattttggtatggcttgagctatacctagccacaatggaccctccgcccctgagacaggcagtcagtcaggaagctgaccctgctggtgcgctcgttcagctggccgggcgttgtcgtcgcttgttcgtcctaaccataacggtgcatgtaggtgtcgagagttttgtctccttgggaatgcacacaggtgcaaggtattgtaggcccgtcccatgaggatgcatggggttggtagtacaacatttttttttgtgatttagagacttgaactgctgcagttttcacatgaatgttatccctaaggacaaggcgggagagcgagtgtttctctatctccagaactgatcgcggcgtttattttctgtttccagttactgctccaactctttctgaatcttgctgaatttgagtaagcgca

SEQ ID NO: 219694 - DNA, 1415 bp, Zea Mays
cctggtcaaacgaacacggccttaaagtgtaaaactcctggctgacccaactcgctagtggacaggtggcatcttctgcgctcgcaacacctcggcgcccaaacgtaaccgtcccaacaaactcctctccctccccttcccagcagaagtaccagcgccggccatggacatgcagttcttccccgacagggcgcacttgcgcctgcggagccgctggcacggcatgtaccttcacgccgaggaagacggggtgaggatcaccctgcgccggcgccgtgggacgctgaacgaggcgtgggtggtgcaccacctcgagcgcaacggcgtcaactacgtcctcctccacagcgccgcctacggccgttacctcgccatcgtaagcatggaagcgactccggcgccgtcttcgggccaaggtcaaggcgcccgccgcacctgcctcgccgtccagcgcctttacgacgccccagggcagaacgacgtcctgtggcagttccgcttcgcggacgacgggtccgacgatgtcgtcatgcgcaatcgcgtgtacggcacctggcacaactacggcgacgagagaaggttgatgcaattcattgtcgaggccatccccccaagagcagagccgcctgaacttccgcctgtagtttggcctccagcggtgcccatcggtggcccgatccgccgccagcgccgccgggtcgtccaggcgcaaccggtgcttcggcggaagatccactatgtgcgggcagacgatcaggggaacttcagcccgcttgtctggaggatgctatggttcgatggccggtccgtgttgcacctgaggagagatctagcagccgagctgggtgtaggtgaagccaacgtcctagacatcacgatgtgcgtgcgggctggctctaacggccggctgactccactggtcatcgacctgcctttcgatgagcaggccatggacatcgtcgtcctcgccactgattcaccagatgttgctgcaccgtagaggaatattagaccaaggcttctgacaatcaaaaaagaaaaatctcctcagaaatgagaagttccctgcttcggattcagtgagatggcaactcatattttgttctgatagctccagaaaactcagtccatctggggttgatgtgttctgctaaccggaagcgttttgaattggccttcaagtttcaaaacttcaaaattgctggaggcattctgtggaaacactgtttgagcggcaattgtagataccgtcttcagtctttcttcaccaaacgtttacatccaaagttttcgtttgtcatgatgaagctctgcgcactactcgttgaaattgaactcactttttcttgatatactagatgaactcaccaaatgagccgttgtctttacatatatgatgatgtgctgctcctttg

SEQ ID NO: 219695 - DNA, 3619 bp, Zea Mays
gggattcttctatatcatgactcggtcatatgcttacgttgatgttggattatttttattaaagcgattctcacataaaccaattgaaaaaggtactgtatttgagaatgtacagcagcttctggcaacgataatcagaaaaaaaaacaaacaaacacggccaatggacgggggccacggggcttccattggaagcgaagagataacgtgggtccaaccggaactggctcactattctgttcggttccttccgaaaacacaacaggaaaacacacgcacaaaattgccgtttccgaatggccacggccgtgctccgccgcccattcctcgccgcgctcctcctccccgccgccggaggggcgtccgggacctcctcctggttccgtccccggagacgtaggtcctctccttccgtgcgcgcggtgtcttccgactcccccaagcccgtcgcctccacttcctcccccaccggcggtgacagccccgacgaggaaccaccggtcctaccgctcctccaggagcttgcggattgcttgattcttccgcccaagctcctcgctcagctcccgagcgaccttcgtctcgacctcaatgacgctgcgtttgatctctccaacgggccagttctcgacgagtgtggccaagaagtgggtgatctgctcctgaacctggcaaaagcatgggagttagctgatacgtcaacatcaaatagcattgccaagcagctgccgttgatggagccctacttgacgcgcagcgccaaatcagtgtagcgtttggcaagcggctggtgtcagctggaaggaggtttcagtcaatgggacagtacaaccagggagaactcaaaaagattgctgaaacaatgatcaagaatggtaagctgctatcgaaacacccagtggttcaatctgatgttcaggctatgaaagaaaaaaggagactaaagtttggagaacttgagttcggagtgactgctcaaagtgccactatcggttctgcagtagcggcaatttttggattaatctcatggcaactagcacgaggcgtgcaaagtattcctgacaatacaacgcaatacacaaatgacaatgcactgcagttggccaagtcgctcaagaccgcactgcttgttcttggctacacatctaccggcctatccttattcgcggcttttgggctgctgttgctagcccagcagattaactctgagaacaaatcggagtaactgacaggcactcgctgaagttgtggacctcatgccttgcctttctatgctccaatgaggcaaacgttcatagggaattgcatacactgggaccttgtgtgtatcagtgcatgcaatgttctgtataaaaataaagagccaattgtttgtgattacggataaaataatcggtggagatattgaagcaaacatggaagtcagcctgggactgactgaagaacaaattgttagtgaacgcaacagggaactgcttgtattcaaaattgtgctttcggagtgtgagcatgatctttcctatgaatctgcaagctcaaaaacaagaaaccacgcatgaagcaagagttgacggtatctttttttaatccaaagctgggtaccacgtatccttaattaattatgttccgcgtgaatctcttttctttttcgttacttaaaagaaagaaataaaattctctatacgaatctcatactgatctgccaaggtggccatgtcccaataatgtggggagcccgattcggtatttttttttggaagcccaagtccagagcgggcccagtccagttcatcctccacctgctccgccggctgctcttcttctcccctctcgctatatccccggggacctcacagccacatctctccactgctccgtccagcgcgtccacctcccaaacccctactcccccaggaagcaatggcttcccccacccagggccaggtcatcacctgcaaagcggcggtggcgtacgagccgaacaagccactcgtgatcgaggacgtgcaggtggcgccgccgcaggccggcgaggtccgcgtcaagatcctattcaccgcgctctgccacaccgaccactacacctggagcggcaaggatcctgagggtcttttcccttgcattcttggccacgaagctgccggaattgtggaaagtgtcggtgaaggagtaactgatgtgcagcctggggatcatgtcattccttgctaccaagcagaatgcaaagaatgcaagttttgcaagagcggaaagaccaacctctgtggtaaggtccggagtgccacaggcgtaggtgtcatgatgaatgatatgaagagcaggttctctgtaaatggaaagcccatttaccatttcatggggacatcaacattcagccagtacactgtggtgcatgatgtcagtgttgcaaagatcaacccacaggcacccttagataaagtctgcctgctcggttgtggtgttcctactggtcttggagcggtgtggaatactgcaaaggttgaatctggctcagttgttgctgtttttggccttggaacagttggacttgcagttgctgagggagcaaaagctgctggtgcttctcgagttattggcattgacatcgacaataaaaagtttgatgttgcaaagaactttggagttacagaatttgttaacccaaaagagcatgacaaaccgatacagcaggtcctggtcgatcttacagatggcggcgtggattacagctttgagtgcattggaaatgtttcggttatgagggctgcactggaatgctgccacaagggctggggaacctccgtcatcgtcggcgtcgccgcctctggccaggagatcgccacacgaccattccagctcgtgactgggcgtgtctggaagggaaccgctttcggtggcttcaagagccggacccaggtcccatggcttgttgacaagtacatgaaaaaggtggacgagtacattacgcacaacatgaacctggctgacatcaacgacgccttccacctgctgcacgaaggtggctgtctgcgttgtgtgctggcaatgcagatttgaaattcctaagctaagcagtttttgttttggaactagaactcctttttgcctcgttaggcctggacccgctgtataatgctatgttgtgttggatggctgacgatggttactgctgtgttgctagcaatgtggtacttgatctgtatcacggttgcaaataagtgctgtttctaaaacactccctctcggtgaataaggggttgtttggtttgaggaatcattccatccaaaatgaggtggtgcatcatagatctattcctcaaatttgctcggatgacttcaatccttatattagtactaactaattcactatgaggaatgagatggtgatggatcaactaattccattccacaaaccaaagaaaaaagtgaggtgatgatggactagctcatctttcaaaccaaaacaccctataagtgatctgtatcatatgtggggaagatgtttactatggcagattgtgcgataacaatatggagacaatgtttggaaactgaaccatatattggtgcaaccaggcaaacaagacacaaagatgaaggtggatgaacctccatctta

SEQ ID NO: 219696 - DNA, 2070 bp, Zea Mays
atgacataagcaaacaaaatctctatcacataatgatatgtattcaagcttctccatatattgatcatcaatgaattctggggttcaacgttcaaggcaaggagcttttgctcatgggtctgttttccactaggaacttcaaaatgacccttcacatcatgatttgttattcagcaacacttgtctgccgtggtctttccacttggcggtactttagaaatctgggaaactctgcatgcccaatgtgctggaaagtgtatatcagagcttactattgtgcctgcaaaagtatgttggcaggaccttaggatctccactacgatatattattaaagcacagttgtttttaaagatcatcatacaaaatacatctggacatactatgtagatcactttatgctctgattggctgaagtaagtctttgggtaattgttatgtttacagtaacttttatttctgatggtgtttcttgctatgccattttcaggttaggactgtccttgacatagaatgtggatttggtacctttggggcgcatctttttgagagagatctcttgaccatgtgcattgctaactatgaagcatcaggtagccaagtgcaaattacactggagagaggcattcctgcaatgattggttcatttgcaacgaagcagcttccgtatccctatctttcctttgatatggtgcattgtgctaaatgcaatatcgaatggtacaaaaacggtatgtgtgaaagtcttctttcacatgccctggccctcattgacgattataatgttattcagcaatgtcttaagttggcacttcacatataaagatcggtacatgcctagctgaatattaaatatttaaggatatacagttgtgggtgacttttggttgacttgtaacccttgtcacttcaaactttgcatacatctgatttctgcaaagacacatttatggtaatttggctataaagtagtatctcttacagtcttactaaatatgtaaacgttggttttctctgtaattctgcagatggcattttcttggttgaagtgaacaggcttttgaggcctggtggatattttgtatggacatcgaatttgaatacacatagggccttgcgagacaaagaaaaccaaaagaaatggacagccattcgtgactacgctgagggcctttgttgggagatgctgtcacaacaagatgagacaattgtatggaaaaagacgaataaaagggaatgttacaaatcaagaaaatttgggcctgagctatgtggccatgatccagaatcaccatactaccaaccactaagcccctgcatatctggcacaagaagtcagcgttggatccccattgaacaccgtaccacctggccatctcaggctaggcaaaactcaacagaactggacatacatggtgtgcattcagaagtcttcgctgatgataattcaagctgggactccatggtgcgaaactactggtctttgctatccccacttatattttcagaccatccaaagagacctggtgatgaagacccacaaccaccatttaacatgctaaggaatgttttagatatgaatgctcactttggtggatttaatgctgctttactgaagtctggaaagtctgtatgggtgatgaatgttgttcctacaaatgccccaaattatctaccaataatatttgaccgtggttttattggggttcaacatgattggtgtgacgcatttgcgacttacccaagaacatatgatatggtgcatgctgatggctttctatcacttgagaagacccacaagcatagatgttctactcttgacatattcttggaagttgatcgcatcctacgaccagagggctgggtcataatccgtgacaccgcccctcttattgaagcggcaagatctgttgttactcaactcagatgggatgcccgtattttagatcttgacatagctagtgatgaaaagctactcgtctgtcagaagccctttctcagaaaataaggagcacaagcacagtagacactgacacaagatatgaacttattctttcaccctatactgttac

SEQ ID NO: 219697 - DNA, 886 bp, Zea Mays
atgtgcattgctaactatgaagcatcaggtagccaagtgcaaattacactggagagaggcattcctgcaatgattggttcatttgcaacgaagcagcttccgtatccctatctttcctttgatatggtgcattgtgctaaatgcaatatcgaatggtacaaaaacgatggcattttcttggttgaagtgaacaggcttttgaggcctggtggatattttgtatggacatcgaatttgaatacacatagggccttgcgagacaaagaaaaccaaaagaaatggacagccattcgtgactacgctgagggcctttgttgggagatgctgtcacaacaagatgagacaattgtatggaaaaagacgaataaaagggaatgttacaaatcaagaaaatttgggcctgagctatgtggccatgatccagaatcaccatactaccaaccactaagcccctgcatatctggcacaagaagtcagcgttggatccccattgaacaccgtaccacctggccatctcaggctaggcaaaactcaacagaactggacatacatggtgtgcattcagaagtcttcgctgatgataattcaagctgggactccatggtgcgaaactactggtctttgctatccccacttatattttcagaccatccaaagagacctggtgatgaagacccacaaccaccatttaacatgctaaggaatgttttagatatgaatgctcactttggtggatttaatgctgctttactgaagtctggaaagtctgtatgggtgatgaatgttgttcctacaaatgccccaaattatctaccaataatatttgaccgtggttttattggggttcaacatgattgttaaatgatcgatggatggacatgtgtta

SEQ ID NO: 219698 - DNA, 587 bp, Zea Mays
cgagtctttgctttttcaggtggtggttctcgggggcgggtcgttcgggacggccatggccgctcacgtggcggccaagaaggccgatctcgaggtggccatgctgctcagggacgaccacatctgccggtccatcaacaacgcacatgtcaattgcttctggctttttactgcagcaagtacttatcagaacacagattgccagaaaatatcgtcgcaacaactagtgctgctgatgctttagcaggagctgatttctgcttccatgctgttccggttcagttcagttcatcctttcttgaaagtatttcaacacatgttgatccaaagttgccattcatatcacttagcaaagggctggaactcaatacccttcggacaatgtctacaatcatcccacgagcattgggaaatcgccgccaaccgtttgttgttctgtcaggaccatcatttgctgtagagttaatgaacaaattgcctacagcaatggtggtggcatccaaagacaacaagttggcaagttctgttcaacaactgttagcatccccaaatttgaggataagcacatcaaggagtagaaatcgcag

SEQ ID NO: 219699 - DNA, 1322 bp, Zea Mays
tggacaggcaacgtcctcatcttcatctcccaggttttcccctccaatcacccccaggtcttcctctcgcgagttgcggtctcgcgcccccctccgccgaccgccgcctcctcacaaccgcggaagctgcttccctctccattggacgcggccagcttccatctctcggtcacctccctctacatcccacggccgctaccaccttccctctacctcacacggccgccggcctctccaaggtctgcacacgcaggaaaaaccttgccacgagtcgccgacactccatcccggaagagctaacgaggtgactccccaccgcgcccatgggtgacagccagtactccttctccctcaccaccttcagtccgtcggggaagctcgtgcagattgagcacgcgctcacggctgtcggatccgggcagacctcgctcgggatcaaagctgccaatggtgtagtcattgccactgagaagaagctgccttctattttagtggatgaaacatctgtgcaaaagattcaggcactaacacctaatattggagttgtctatagtgggatgggtccagatttccgtgttctggtgaggaaaagtcgaaagcaggcacaacaatattatcggttgtacaaggaacatatacctgtaacacagcttgtacgagagactgctgctgtcatgcaggagttcacacagtcaggtggtgtgagaccatttggagtatcactgttgattgctgggtatgatgacaatggcccgcagttgtatcaggttgatccctcaggatcatacttctcctggaaggcatcagccatgggaaaaaatgtgtccaatgcaaagacgtttcttgaaaagagatacacagaagatatggagcttgatgatgccatccacactgcaattttgactttgaaagaaggatatgaggggcaaatttcctccaacaacattgaaatcggaattattcgagctgatcgtgagttcaaagttttaagcccagcagagatcaaggatttcttggaagaggtggagtaagctgtctgttgatgatactagttcagacaacaatagcagcgtcacttatgagcagccagcctgaagattgtcttggttttattactctgtaaactgatttgctccagcgccatgtggtggttacatttgaaccctcctcaacgcatactgtagacaatgagataacgtaggatgaatgctgtatttgacatactttgcagcttgtttatgtgatgcacgttcttgcggacagtatcgatacccagtgtttattgtcgtctatctgcgaataattgcgattcacactagcaa

SEQ ID NO: 219700 - DNA, 1300 bp, Zea Mays
aacgtcctcatcttcatctcccaggttttcccctccaatcacccccaggtcttcctctcgcgagttgcggtctcgcgccccccctccgccgaccgccgcctcctcacaaccgcggaagctgcttccctctccattggacgcggccagcttccatctctcggtcacctccctctacatcccacggccgctaccaccttccctctacctcacacggccgccggcctctccaaggaaaaaccttgccacgagtcgccgacactccatcccggaagagctaacgaggtgactccccaccgcgcccatgggtgacagccagtactccttctccctcaccaccttcagtccgtcggggaagctcgtgcagattgagcacgcgctcacggctgtcggatccgggcagacctcgctcgggatcaaagctgccaatggtgtagtcattgccactgagaagaagctgccttctattttagtggatgaaacatctgtgcaaaagattcaggcactaacacctaatattggagttgtctatagtgggatgggtccagatttccgtgttctggtgaggaaaagtcgaaagcaggcacaacaatattatcggttgtacaaggaacatatacctgtaacacagcttgtacgagagactgctgctgtcatgcaggagttcacacagtcaggtggtgtgagaccatttggagtatcactgttgattgctgggtatgatgacaatggcccgcagttgtatcaggttgatccctcaggatcatacttctcctggaaggcatcagccatgggaaaaaatgtgtccaatgcaaagacgtttcttgaaaagagatacacagaagatatggagcttgatgatgccatccacactgcaattttgactttgaaagaaggatatgaggggcaaatttcctccaacaacattgaaatcggaattattcgagctgatcgtgagttcaaagttttaagcccagcagagatcaaggatttcttggaagaggtggagtaagctgtctgttgatgatactagttcagacaacaatagcagcgtcacttatgagcagccagcctgaagattgtcttggttttattactctgtaaactgatttgctccagcgccatgtggtggttacatttgaaccctcctcaacgcatactgtagacaatgagataacgtaggatgaatgctgtatttgacatactttgcagcttgtttatgtgatgcacgttcttgcggacagtatcgatacccagtgtttattgtcgtctatctgcgaataattgcgattcacactagcaa

SEQ ID NO: 219701 - DNA, 2934 bp, Zea Mays
ctgaacttatcttctgtagataccctaatattgtgtccaaaacatgctgcagtggtagcgtgtgatggaaaaatttcagcttaaagaacttaaattgcatttcatagttattggattgcatggtggtgctttacttggtgtcacataccgtacatctcgtagaatcagtcctttgacagcaacagctatatcaactgttcaatcgatgcccttatcaggttttggtggaagtggatcatcttttgcatctgatgatccattttcctctaaggaagggcctccacaaaatttccaactgtacagctgggagacctatcagcctgttagtggcctacttgcacaacctgagtggactgtgtgggaccaaactgttgagtattgtgcatttgcttatcagcagtatatagtgatttcttccttgcggccccaatttaggtaccttggagatgtttcaattccctttgcaactggtgccgtttggcatcgaaggcagttatttgtgtctacaccaacaacaattgagtgtgtctttgttgatgctggagtggcagcgattgacattgaaacaaaaaggataaaacaagaaatgaaagcaagagaagctcagagtcgggcagctgaagagcatggagatttggctcttatcactgttgaagctccccaggttactgtgagtgaaaaagtatcattgaggccaccaatgttgcaggttgttcgtttagcctcctttcagtacgctccatcgataccaccatttatagtaccaaagcaatccaagttcgatggagatgattcagtgtttcagaaagaactggatgacagaaggtatgctgaagttgctgtcgctggaggaggtgtgtctgttgcagtaactcgcttccctcctgaacagaagagacctatcggacctcttgttgtggttggtgtaagagatggagttctctggcttgttgacaggtatatgtgtgcacatgccttatcactcagccatcctggtataagatgccgttgccttgcagcatatggggaccctgttagtgctgtgaaatgggcaacgagacttggcagagagcatcacgatgacctggctcagtttatgctgggtatgggctatgccactgaagctctccatttgcctggaatatctaagaggctggagttcgaccttgcaatgcagagcaatgacctgaaaagagcacttgcttgtctattaacaatgagcaatagccgagatgtgggacaagaaacagctgctgctgatgccactgacgttacccagattcttagtttggcagtagctaagcaagctaagcaggaaagtcttacagatgccgtgcagggaatagtgaaattcgtcaaggagttttttgaccttattgatgcagcagatgccactggtcaatctgacattgctcgtgaagttttaaagagattagcggctgcagcttctgtaaagggagcactccatggacaaatgctgcgaggcctggcactccgtcttggaaatcatggggagcttactagattgtcgggtctggtaagcaatttgattacagctggccatggacgcgaagcagcatttgctgccgcagttctgggagataatgccctaatggagaaagcatggcaggacacaggaatgttagctgaggctgttttacatgctcaggcccatggtcgtccatcattaaggaacttggttataacatggaacaagatgctacaaaaggaactggatcacacaccgactgtaaaaaccgatgccgccgccgcattcttggcttctctcgaggatccaaagctcacaagcttgggggaaactgagaaaaagcctcccatcgaaatacttcctcctgggatgcctcccctatctgcacctccgatcgtgattaaaaaggctggagcaaaacctggtctccctaatgcagcaaaggcgtcaaatgggcctataggtgctcctatggctcaaggtgctcccatggctcatggtactcctgggccacaaggagtccccatgaatcaagttactccatcacagggcagtcatgacgaggcaaggccatcagatgctacagtggctgatgcagctgccgcggttgcagaaggtacagcagctcccccggctgcagaaggtacatcagctcctccggctgcagaaggtacagcaactcccagcagtgaggaagctaaagcagcacctggtaatgaggaaggcacatcaaatccaatcaacgaggaagccacagcagctgcagtttcagttgctgcaggcagccctgactctgctgctgctcctgcagctgatactagctcggacgcacctgctgttaatcccacggaagataccgtctctgccccctcaacggaggcaccaccagagttgacggataagccatcttcagcagaggcatcgttgccacctccacccagtgtttctggtgtataaatatttctgattctcttttagcagtgtgccgaattttctgtattctggttcgttcgttccaccacgcgcgctggtataggtatttgttgcctgtggtatacagatttcgcagacgccaggcagtatgtgagtagctttgtacatctgctgtctgcgtctcacgagaacgtgctaccgttgtgtcactgacactgtgtggccatatcttatgttgttggtgaccacagttcaattcttgcttgatgagttgatcgagctgcaccaccaatatccctgtcttggacgaccgattcgtctcttgcggaatctaacgtaactgctgaggttcgcaaaatgtcttgttgggtcatctaacttgggaatctgtgcgtaccgaaagcgctatgtcggcccgtgctgcagtgcaagtaccacgttttggccagtcgcccgttggtttgccctctatccattaagtaatctgattggtcgaggcgtgtcaaaagcca

SEQ ID NO: 219702 - DNA, 2249 bp, Zea Mays
gatcagttaaaggtatcgagccatgttgttcgtttagcctcctttcagtacgctccatcgataccaccatttatagtaccaaagcaatccaagttcgatggagatgattcagtgtttcagaaagaactggatgacagaaggtatgctgaagttgctgtcgctggaggaggtgtgtctgttgcagtaactcgcttccctcctgaacagaagagacctatcggacctcttgttgtggttggtgtaagagatggagttctctggcttgttgacaggtatatgtgtgcacatgccttatcactcagccatcctggtataagatgccgttgccttgcagcatatggggaccctgttagtgctgtgaaatgggcaacgagacttggcagagagcatcacgatgacctggctcagtttatgctgggtatgggctatgccactgaagctctccatttgcctggaatatctaagaggctggagttcgaccttgcaatgcagagcaatgacctgaaaagagcacttgcttgtctattaacaatgagcaatagccgagatgtgggacaagaaacagctgctgctgatgccactgacgttacccagattcttagtttggcagtagctaagcaagctaagcaggaaagtcttacagatgccgtgcagggaatagtgaaattcgtcaaggagttttttgaccttattgatgcagcagatgccactggtcaatctgacattgctcgtgaagttttaaagagattagcggctgcagcttctgtaaagggagcactccatggacaaatgctgcgaggcctggcactccgtcttggaaatcatggggagcttactagattgtcgggtctggtaagcaatttgattacagctggccatggacgcgaagcagcatttgctgccgcagttctgggagataatgccctaatggagaaagcatggcaggacacaggaatgttagctgaggctgttttacatgctcaggcccatggtcgtccatcattaaggaacttggttataacatggaacaagatgctacaaaaggaactggatcacacaccgactgtaaaaaccgatgccgccgccgcattcttggcttctctcgaggatccaaagctcacaagcttgggggaaactgagaaaaagcctcccatcgaaatacttcctcctgggatgcctcccctatctgcacctccgatcgtgattaaaaaggctggagcaaaacctggtctccctaatgcagcaaaggcgtcaaatgggcctataggtgctcctatggctcaaggtgctcccatggctcatggtactcctgggccacaaggagtccccatgaatcaagttactccatcacagggcagtcatgacgaggcaaggccatcagatgctacagtggctgatgcagctgccgcggttgcagaaggtacagcagctcccccggctgcagaaggtacatcagctcctccggctgcagaaggtacagcaactcccagcagtgaggaagctaaagcagcacctggtaatgaggaaggcacatcaaatccaatcaacgaggaagccacagcagctgcagtttcagttgctgcaggcagccctgactctgctgctgctcctgcagctgatactagctcggacgcacctgctgttaatcccacggaagataccgtctctgccccctcaacggaggcaccaccagagttgacggataagccatcttcagcagaggcatcgttgccacctccacccagtgtttctggtgtataaatatttctgattctcttttagcagtgtgccgaattttctgtattctggttcgttcgttccaccacgcgcgctggtataggtatttgttgcctgtggtatacagatttcgcagacgccaggcagtatgtgagtagctttgtacatctgctgtctgcgtctcacgagaacgtgctaccgttgtgtcactgacactgtgtggccatatcttatgttgttggtgaccacagttcaattcttgcttgatgagttgatcgagctgcaccaccaatatccctgtcttggacgaccgattcgtctcttgcggaatctaacgtaactgctgaggttcgcaaaatgtcttgttgggtcatctaacttgggaatctgtgcgtaccgaaagcgctatgtcggcccgtgctgcagtgcaagtaccacgttttggccagtcgcccgttggtttgccctctatccattaagtaatctgattggtcgaggcgtgtcaaaagcca

SEQ ID NO: 219703 - DNA, 1045 bp, Zea Mays
  misc_feature (1045)..(1045): n is a, c, g, or t
ggttatcacaataacccgactctcggacccacgacgagttaagcccggagggaaaaaggacaaatcacacaaaggcacagggaatcgcgccaccgtgggacgcgtacggcgcaccgcccgcccgccggatctgcgccggcgacgcgcccggacgtcggatctacgccgccgcaggaggggggaggcggcgctgtggccgttctctgcccgcgagcgcccggatccgtcccgccggtgagtccccgcgccagctcctcggcctgtgatgaatgtcgttcgacgggagccgcagcgggcggtgctactccgggctcgctaaatttccgcaccaccgcgaacgagagaaaaagggccaggtgacttcatctccgctaatccaacggataggcaaaactctaatctttgtcaaccatcaagttgatgcagaggtggtgaaaacatcttctcttctccaaagactgctgactgcaagttgcaaaagtttgtcttcagcttgctgtgttctttcttccctctctggcggagtacacgagaagtttgtagatataggcactaggcagctcctttcagctcttctatgtccagggatttggactgtcctgttcagacacagatggctgtggcagtcctggaccggagcttcagcagtgaatatcctggaggcagcagaactgaggggaggcaactgagctggaagagagtctttgtgcaaactgacaatggttctgtccttggcattgagctggagagaggagaaaatgtgcaaactgtgaaaaagaagctgcagatagctctcaatgtgcccactgatgagagttcattgacctttggtgacctggttctgaatgatgatcttagcagcattcgcaatgactcaccgttgcttctcaaaaggaatcagattcaccgaagcaattccacaccttgcctctcccctactggccaggatgtttggcaaagagaccggagtggacccattgaaatacttggctgttcaagcccttcatctcggatgaagcagattgcgaaggatgtcataaggccn

SEQ ID NO: 219704 - DNA, 1309 bp, Zea Mays
ataatcacaaataactcgccagcagtgccgcaggtacaccaatcgcttcgtccccgcgtctcgccgcgtagcggcgtaggcgccacagaaactcgcacgccgctccccgccgtccggcccgagtcgccgtcgctgccgaatccaatccatggctccgcccgccgcacccaccgcgctgcaccaccgcacgcccctcctcctcccccgccgcaccgtcgccttgggtgccaccgccaccgcgcgcgccgccagggccgcttctctcgccgtcagggcccagccggacaccaccgccgcagccgtctccacctccgcgcctgagccggcgcccgagttcaagcctccgccggggttcaaggcgcccgagcccaagaggtacgaggtcaagtccggccaggtgggcagcgtcctcggcgcctcgctcgccatcccccttcgcctcggcaccggcgtcttcgtcctcgggtactcgccatctcttgtttctccatcagagataccatcagaccagtatgcactggaatttggagcttggaaggtgaaagaggaatcaaaaataggacagtgcaaacgaccagaaaagcctatcgagatatatgaatttgaaggttgtccattttgtcggaaggtcagagagatggtaacagtcttggacctagatgtattattttacccctgtcctcaaaaggcccaacgttccgacctaaagtcctcgaaatgggtggaaagaaacaattcccttacatggcgatggaactgttccaattatgctatcacttggtctgttgacagcaattacagcagggcttgctactcttggtcgtattggaaagggaaattcctacattgcttcaaaagtcccaccgcagcccatagagatatgggcatgtgagggatctcccttctgtaaattagtacgagagacacttgtcgagttggaattgccacatctgctacacagctgcgcacgaggcagccccaaacgacaagaatttttcaagaaaaaggggcttttccaggcgccgtacatcgaagatcctaacacgggagtccagatgtttgaaagcgctgaaatcatagactacctgaaggcaacatatgccctgtacccaagctcgtagtgatgtatcagaaatggtcattgtaatgttgcgtgtagattcagttcttcccggtaataaaaggaaaagaaatagtgggccacgcattctgtatgatgcacagccgattttgtctatgcagatctaaactttgaagttacttcgtgttgacactttttcggagcgccaaatacttaagaagaaccggc

SEQ ID NO: 219705 - DNA, 1330 bp, Zea Mays
ataatcacaaataactcgccagcagtgccgcaggtacaccaatcgcttcgtccccgcgtctcgccgcgtagcggcgtaggcgccacagaaactcgcacgccgctccccgccgtccggcccgagtcgccgtcgctgccgaatccaatccatggctccgcccgccgcacccaccgcgctgcaccaccgcacgcccctcctcctcccccgccgcaccgtcgccttgggtgccaccgccaccgcgcgcgccgccagggccgcttctctcgccgtcagggcccagccggacaccaccgccgcagccgtctccacctccgcgcctgagccggcgcccgagttcaagcctccgccggggttcaaggcgcccgagcccaagaggtacgaggtcaagtccggccaggtgggcagcgtcctcggcgcctcgctcgccatcccccttcgcctcggcaccggcgtcttcgtcctcgggtactcgccatctcttgtttctccatcagagataccatcagaccagtatgcactggaatttggagcttggaaggtgaaagaggaatcaaaaataggacagtgcaaacgaccagaaaagcctatcgagatatatgaatttgaaggttgtccattttgtcggaaggtcagagagatggtaacagtcttggacctagatgtattattttacccctgtcctcaaaaaggcccaacattccgacctaaagtcctcgaaatgggtggaaagaaacaattcccttacatggcgatggaactgttccaattatgctatcacttggtctgttgacagcaattacagcagggcttgctactcttggtcgtattggaaagggaaattcctacattgcttcaaaagtcccaccgcagcccatagagatatgggcatgtgagggatctcccttctgtaaattagtacgagagacacttgtcgagttggaattgccacatctgctacacagctgcgcacgaggcagccccaaacgacaagaatttttcaagaaaaaggggcttttccaggcgccgtacatcgaagatcctaacacgggagtccagatgtttgaaagcgctgaaatcatagactacctgaaggcaacatatgccctgtacccaagctcgtagtgatgtatcagaaatggtcattgtaatgttgcgtgtagattcagttcttcccggtaataaaaggaaaagaaatagtgggccacgcattctgtatgatgcacagccgattttgtctatgcagatctaaactttgaagttacttcgtgttgacactttttcggagcgccaaatactcaagaaaaaccggcgacagtgctctttggtcagg

SEQ ID NO: 219706 - DNA, 1893 bp, Zea Mays
ataatcacaaataactcgccagcagtgccgcaggtacaccaatcgcttcgtccccgcgtctcgccgcgtagcggcgtaggcgccacagaaactcgcacgccgctccccgccgtccggcccgagtcgccgtcgctgccgaatccaatccatggctccgcccgccgcacccaccgcgctgcaccaccgcacgcccctcctcctcccccgccgcaccgtcgccttgggtgccaccgccaccgcgcgcgccgccagggccgcttctctcgccgtcagggcccagccggacaccaccgccgcagccgtctccacctccgcgcctgagccggcgcccgagttcaagcctccgccggggttcaaggcgcccgagcccaagaggtacgaggtcaagtccggccaggtgggcagcgtcctcggcgcctcgctcgccatcccccttcgcctcggcaccggcgtcttcgtcctcgggtactcgccatctcttgtttctccatcagagataccatcagaccagtatgcactggaatttggagcttggaaggtgaaagaggaatcaaaaataggacagtgcaaacgaccagaaaagcctatcgagatatatgaatttgaaggttgtccattttgtcggaaggtcagagagatggtaacagtcttggacctagatgtattattttacccctgtcctcaaaaaggcccaacattccgacctaaagtcctcgaaatgggtggaaagaaacaattcccttacatggtagatccaaacacaggggtcgccatgtatgaatccgatgacatcataaaatatctagctgatacatatggtgtgtattcaacacatctccttttcacttttgctcttaaaggttgttcctccctatttgtgggggaaaaggcttgtcttggtttatccccgagaccccattcatgtgggagcctcactggatttgtgtgtgaaaaggattgtatcgttttatccccttcctagaccccatttttggcactgggtatgccctcttaaagtttcttcctataatgaccttactgacctcactcacttatgcttgtttttcttaggcgatggaactgttccaattatgctatcacttggtctgttgacagtaagtaaacaagcacccagcaatttaaaagtatattatatgttttaaccagtgtacatattagtccaaatgtataaaaatatgtttgaactaagtacccccaactattatcgaggaatatttgacatatttacactttgctttcagtatgcttcagtatttgcctatccgatgggtataatgctttattttgtgccaaggatcagtttgcagttttgataacttttaaatattttttaggcaattacagcagggcttgctactcttggtcgtattggaaagggaaattcctacattgcttcaaaagtcccaccgcagcccatagagatatgggcatgtgagggatctcccttctgtaaattagtacgagagacacttgtcgagttggaattgccacatctgctacacagctgcgcacgaggcagccccaaacgacaagaatttttcaagaaaaaggggcttttccaggcgccgtacatcgaagatcctaacacgggagtccagatgtttgaaagcgctgaaatcatagactacctgaaggcaacatatgccctgtacccaagctcgtagtgatgtatcagaaatggtcattgtaatgttgcgtgtagattcagttcttcccggtaataaaaggaaaagaaatagtgggccacgcattctgtatgatgcacagccgattttgtctatgcagatctaaactttgaagttacttcgtgttgacactttttcggagcgccaaatactcaagaaaaaccggcgacagtgctctttggtcagg

SEQ ID NO: 219707 - DNA, 1792 bp, Zea Mays
cactcgtccccttcctccccttccgtctcgcaacaggcgaggcgagagaactcgtcgtcgaagcgaaatatagccagcgcaccaatcccaattcccaacccgacgcaacgcaacgcaacgcacctcatcccggttgcttgcgccaacgtaggggatcgcccggccccgccccgctccgcttcgcgcccctccttcctgcctgccgtaaccgcgccgtgcaactgtgcaagggtggggtggtggtgccatggcgagcacggtgtggagggaaggcggttgtggccagcatggcatttctgcattcatgtgggcaagctggatgattcaaagttgttgatatgtggtggtagccatttattgtgcttatatgccctatggttgaatggtgtgcttcatttatctgacttgtctctttcactaggttcagtaggttgttgagtctagataccagatgatggacctgtccacgacttcagtgctggcagctaaagcttacaaatacaaagcagaatcacttgttaaggagtaccttcttgcagattcgtatgtttcatacactgctgtacttggtgggatcctgatgtgcaagatggcttatgacataacaagcataatcagctcattgtactacaagggttatggttcacttacaaaaacccaaaagcttgagtggaacaacaggggcatgtccactatccatgcgatattcatcacagtggtgtcagtgtacctggttttcttctccaacctattctctgatgagctggatggactagtaacttatcggagttcaaatctatccaatttcactttgggggtttctgttgggtatttcatcactgaccttgctatgatattatgggcttatccttctcttggtggaatggagtatgtccttcaccatatgctgtcgcttatttctatagtctatgctatgtattctggggaaggacagttgtacacatacatggttctcatctctgaaacaaccacacctggaatcaacctccgatggttccttgataccgctggactgaaaaaatccaaggcctatcttgtcaatggtgttacgatgtttattgcatggctggtggcacggatcattttgttcgtctacttgttttaccacatttacttccactatgatcaggtcaagcagatgcatacgtttagctgcattctgatatttgctgtgcctacaatactgctcgtcatgaacacaatgtggtttgccaagatcttgagaggccttaaaaagacgctagccaagaggcagtgaaaagaagaatggtaaaacaagctcaaggacatcgatagccaaaatccatcccctcgtacagtcactttacagttacatgcacttcccgagtaaagccgtcagtgcagctcgtagcacaagctaaagcccttgcacatgatcctgaaatacgctaaacacagctcatttttttccctggatgctctgccttgtacatacggccgtctgtattgggtgcttacaccttgagggatcgtttggtgaccaggaaaatagatgggaaagaaatccctttgttacggcctcgttcgtttcaactggtttggctttggcccgtttccggcctcattccgggtggaaatggaatttggttgtttctctatgagctgttcgatggctgagtctgacgattgcgctgttgcgtttgtcttttctatttcttccgatcttaaatatacgaggatgtttactttttttttaaaaaaaaactttgatcactcgtcttattcaaaatatttattcaaaaatgcaaac

SEQ ID NO: 219708 - DNA, 1597 bp, Zea Mays
cactcgtccccttcctccccttccgtctcgcaacaggcgaggcgagagaactcgtcgtcgaagcgaaatatagccagcgcaccaatcccaattcccaacccgacgcaacgcaacgcaacgcacctcatcccggttgcttgcgccaacgtaggggatcgcccggccccgccccgctccgcttcgcgcccctccttcctgcctgccgtaaccgcgccgtgcaactgtgcaaggttcagtaggttgttgagtctagataccagatgatggacctgtccacgacttcagtgctggcagctaaagcttacaaatacaaagcagaatcacttgttaaggagtaccttcttgcagattcgtatgtttcatacactgctgtacttggtgggatcctgatgtgcaagatggcttatgacataacaagcataatcagctcattgtactacaagggttatggttcacttacaaaaacccaaaagcttgagtggaacaacaggggcatgtccactatccatgcgatattcatcacagtggtgtcagtgtacctggttttcttctccaacctattctctgatgagctggatggactagtaacttatcggagttcaaatctatccaatttcactttgggggtttctgttgggtatttcatcactgaccttgctatgatattatgggcttatccttctcttggtggaatggagtccttcaccatatgctgtcgcttatttctatagtctatgctatgtattctggggaaggacagttgtacacatacatggttctcatctctgaaacaaccacacctggaatcaacctccgatggttccttgataccgctggactgaaaaaatccaaggcctatcttgtcaatggtgttacgatgtttattgcatggctggtggcacggatcattttgttcgtctacttgttttaccacatttacttccactatgatcaggtcaagcagatgcatacgtttagctgcattctgatatttgctgtgcctacaatactgctcgtcatgaacacaatgtggtttgccaagatcttgagaggccttaaaaagacgctagccaagaggcagtgaaaagaagaatggtaaaacaagctcaaggacatcgatagccaaaatccatcccctcgtacagtcactttacagttacatgcacttcccgagtaaagccgtcagtgcagctcgtagcacaagctaaagcccttgcacatgatcctgaaatacgctaaacacagctcatttttttccctggatgctctgccttgtacatacggccgtctgtattgggtgcttacaccttgagggatcgtttggtgaccaggaaaatagatgggaaagaaatccctttgttacggcctcgttcgtttcaactggtttggctttggcccgtttccggcctcattccgggtggaaatggaatttggttgtttctctatgagctgttcgatggctgagtctgacgattgcgctgttgcgtttgtcttttctatttcttccgatcttaaatatacgaggatgtttactttttttttaaaaaaaaactttgatcactcgtcttattcaaaatatttattcaaaaatgcaaac

SEQ ID NO: 219709 - DNA, 2842 bp, Zea Mays
agccgccgctcgtaattggccgttattattgtactcccttctccattccactcgtccccttcctccccttccgtctcgcaacaggcgaggcgagagaactcgtcgtcgaagcgaaatatagccagcgcaccaatcccaattcccaacccgacgcaacgcaacgcaacgcacctcatcccggttgcttgcgccaacgtaggggatcgcccggccccgccccgctccgcttcgcgcccctccttcctgcctgccgtaaccgcgccgtgcaactgtgcaagggtggggtggtggtgccatggcgagcacggtgtggagggaaggcggttgtggccagcatgtacttttctgtttcggtactctggttcgatcctgatggggttttcgtccatcgatcgcgtctcggtcctgcacgcaatgcagagggggttacggttctttctgttcttcctccccgcggtccgcgtcgggatgctggtctggtcgatgctttttttggcttaccgcggacgcgacgggatgcttcggccgttgttttcttttgatctctgtgacccttctgggaatcgattccatgccggattggtcgcaatgtgcgggaggttttttcttgtcctgttttttcctcgctggctggttggattctgccgcgaaaagttctcccccttatgcacctttcccccccccctcaagatatctttattcgtcgttttcgtggttccttatgggtgcttgggttcccttgtgtggttaaaaggccaataagctgcagtgtttttgttctcaagagttctttccttgtgacagggggacatcacagattctttggtatcttcctggaaatttccatcaattgttttctcctcaaccattgctggtcatgttgtttgtagtgattgtctgtcaggtgaaacatgttgtgtttggtgatgttcttactagcattcaaatgactcaagatacattagttatttgtcagttgttttgtatctgatggaccaatatatgctcaggattcatatttgggcacttgaggtgaaaaccatcttattcgattttgttgaactgtgataccactcattcttaatgaaatggatcatttccctttgccagtatcttgttgctttatttgcacccttgactatagttagtatagtttcagtattcgaggtgttgtcctatttgcaatatcaaacaggaagcataagataagagaaaagtgtatgtggcttcattgttagatttaaaatattgatactgtctaagtgattgtcaagctaggttgtcatatccatatggttcctcattacacatttaattgtgggatctgtatggtttcacagacgcatttataacattcattgtgcgtttcatggatcattatttaattgttgtatattaatgctccatttcttagggcatttctgcattcatgtgggcaagctggatgattcaaagttgttgatatgtggtggttcagtaggttgttgagtctagataccagatgatggacctgtccacgacttcagtgctggcagctaaagcttacaaatacaaagcagaatcacttgttaaggagtaccttcttgcagattcgtatgtttcatacactgctgtacttggtgggatcctgatgtgcaagatggcttatgacataacaagcataatcagctcattgtactacaagggttatggttcacttacaaaaacccaaaagcttgagtggaacaacaggggcatgtccactatccatgcgatattcatcacagtggtgtcagtgtacctggttttcttctccaacctattctctgatgagctggatggactagtaacttatcggagttcaaatctatccaatttcactttgggggtttctgttgggtatttcatcactgaccttgctatgatattatgggcttatccttctcttggtggaatggagtatgtccttcaccatatgctgtcgcttatttctatagtctatgctatgtattctggggaaggacagttgtacacatacatggttctcatctctgaaacaaccacacctggaatcaacctccgatggttccttgataccgctggactgaaaaaatccaaggcctatcttgtcaatggtgttacgatgtttattgcatggctggtggcacggatcattttgttcgtctacttgttttaccacatttacttccactatgatcaggtcaagcagatgcatacgtttagctgcattctgatatttgctgtgcctacaatactgctcgtcatgaacacaatgtggtttgccaagatcttgagaggccttaaaaagacgctagccaagaggcagtgaaaagaagaatggtaaaacaagctcaaggacatcgatagccaaaatccatcccctcgtacagtcactttacagttacatgcacttcccgagtaaagccgtcagtgcagctcgtagcacaagctaaagcccttgcacatgatcctgaaatacgctaaacacagctcatttttttccctggatgctctgccttgtacatacggccgtctgtattgggtgcttacaccttgagggatcgtttggtgaccaggaaaatagatgggaaagaaatccctttgttacggcctcgttcgtttcaactggtttggctttggcccgtttccggcctcattccgggtggaaatggaatttggttgtttctctatgagctgttcgatggctgagtctgacgattgcgctgttgcgtttgtcttttctatttcttccgatcttaaatatacgaggatgtttactttttttttaaaaaaaaactttgatcactcgtcttattcaaaatatttattcaaaaatgcaaac

SEQ ID NO: 219710 - DNA, 2833 bp, Zea Mays
agccgccgctcgtaattggccgttattattgtactcccttctccattccactcgtccccttcctccccttccgtctcgcaacaggcgaggcgagagaactcgtcgtcgaagcgaaatatagccagcgcaccaatcccaattcccaacccgacgcaacgcaacgcaacgcacctcatcccggttgcttgcgccaacgtaggggatcgcccggccccgccccgctccgcttcgcgcccctccttcctgcctgccgtaaccgcgccgtgcaactgtgcaagggtggggtggtggtgccatggcgagcacggtgtggagggaaggcggttgtggccagcatgtacttttctgtttcggtactctggttcgatcctgatggggttttcgtccatcgatcgcgtctcggtcctgcacgcaatgcagagggggttacggttctttctgttcttcctccccgcggtccgcgtcgggatgctggtctggtcgatgctttttttggcttaccgcggacgcgacgggatgcttcggccgttgttttcttttgatctctgtgacccttctgggaatcgattccatgccggattggtcgcaatgtgcgggaggttttttcttgtcctgttttttcctcgctggctggttggattctgccgcgaaaagttctcccccttatgcacctttcccccccccctcaagatatctttattcgtcgttttcgtggttccttatgggtgcttgggttcccttgtgtggttaaaaggccaataagctgcagtgtttttgttctcaagagttctttccttgtgacagggggacatcacagattctttggtatcttcctggaaatttccatcaattgttttctcctcaaccattgctggtcatgttgtttgtagtgattgtctgtcaggtgaaacatgttgtgtttggtgatgttcttactagcattcaaatgactcaagatacattagttatttgtcagttgttttgtatctgatggaccaatatatgctcaggattcatatttgggcacttgaggtgaaaaccatcttattcgattttgttgaactgtgataccactcattcttaatgaaatggatcatttccctttgccagtatcttgttgctttatttgcacccttgactatagttagtatagtttcagtattcgaggtgttgtcctatttgcaatatcaaacaggaagcataagataagagaaaagtgtatgtggcttcattgttagatttaaaatattgatactgtctaagtgattgtcaagctaggttgtcatatccatatggttcctcattacacatttaattgtgggatctgtatggtttcacagacgcatttataacattcattgtgcgtttcatggatcattatttaattgttgtatattaatgctccatttcttagggcatttctgcattcatgtgggcaagctggatgattcaaagttgttgatatgtgtaggttgttgagtctagataccagatgatggacctgtccacgacttcagtgctggcagctaaagcttacaaatacaaagcagaatcacttgttaaggagtaccttcttgcagattcgtatgtttcatacactgctgtacttggtgggatcctgatgtgcaagatggcttatgacataacaagcataatcagctcattgtactacaagggttatggttcacttacaaaaacccaaaagcttgagtggaacaacaggggcatgtccactatccatgcgatattcatcacagtggtgtcagtgtacctggttttcttctccaacctattctctgatgagctggatggactagtaacttatcggagttcaaatctatccaatttcactttgggggtttctgttgggtatttcatcactgaccttgctatgatattatgggcttatccttctcttggtggaatggagtatgtccttcaccatatgctgtcgcttatttctatagtctatgctatgtattctggggaaggacagttgtacacatacatggttctcatctctgaaacaaccacacctggaatcaacctccgatggttccttgataccgctggactgaaaaaatccaaggcctatcttgtcaatggtgttacgatgtttattgcatggctggtggcacggatcattttgttcgtctacttgttttaccacatttacttccactatgatcaggtcaagcagatgcatacgtttagctgcattctgatatttgctgtgcctacaatactgctcgtcatgaacacaatgtggtttgccaagatcttgagaggccttaaaaagacgctagccaagaggcagtgaaaagaagaatggtaaaacaagctcaaggacatcgatagccaaaatccatcccctcgtacagtcactttacagttacatgcacttcccgagtaaagccgtcagtgcagctcgtagcacaagctaaagcccttgcacatgatcctgaaatacgctaaacacagctcatttttttccctggatgctctgccttgtacatacggccgtctgtattgggtgcttacaccttgagggatcgtttggtgaccaggaaaatagatgggaaagaaatccctttgttacggcctcgttcgtttcaactggtttggctttggcccgtttccggcctcattccgggtggaaatggaatttggttgtttctctatgagctgttcgatggctgagtctgacgattgcgctgttgcgtttgtcttttctatttcttccgatcttaaatatacgaggatgtttactttttttttaaaaaaaaactttgatcactcgtcttattcaaaatatttattcaaaaatgcaaac

SEQ ID NO: 219711 - DNA, 2839 bp, Zea Mays
agccgccgctcgtaattggccgttattattgtactcccttctccattccactcgtccccttcctccccttccgtctcgcaacaggcgaggcgagagaactcgtcgtcgaagcgaaatatagccagcgcaccaatcccaattcccaacccgacgcaacgcaacgcaacgcacctcatcccggttgcttgcgccaacgtaggggatcgcccggccccgccccgctccgcttcgcgcccctccttcctgcctgccgtaaccgcgccgtgcaactgtgcaagggtggggtggtggtgccatggcgagcacggtgtggagggaaggcggttgtggccagcatgtacttttctgtttcggtactctggttcgatcctgatggggttttcgtccatcgatcgcgtctcggtcctgcacgcaatgcagagggggttacggttctttctgttcttcctccccgcggtccgcgtcgggatgctggtctggtcgatgctttttttggcttaccgcggacgcgacgggatgcttcggccgttgttttcttttgatctctgtgacccttctgggaatcgattccatgccggattggtcgcaatgtgcgggaggttttttcttgtcctgttttttcctcgctggctggttggattctgccgcgaaaagttctcccccttatgcacctttcccccccccctcaagatatctttattcgtcgttttcgtggttccttatgggtgcttgggttcccttgtgtggttaaaaggccaataagctgcagtgtttttgttctcaagagttctttccttgtgacagggggacatcacagattctttggtatcttcctggaaatttccatcaattgttttctcctcaaccattgctggtcatgttgtttgtagtgattgtctgtcaggtgaaacatgttgtgtttggtgatgttcttactagcattcaaatgactcaagatacattagttatttgtcagttgttttgtatctgatggaccaatatatgctcaggattcatatttgggcacttgaggtgaaaaccatcttattcgattttgttgaactgtgataccactcattcttaatgaaatggatcatttccctttgccagtatcttgttgctttatttgcacccttgactatagttagtatagtttcagtattcgaggtgttgtcctatttgcaatatcaaacaggaagcataagataagagaaaagtgtatgtggcttcattgttagatttaaaatattgatactgtctaagtgattgtcaagctaggttgtcatatccatatggttcctcattacacatttaattgtgggatctgtatggtttcacagacgcatttataacattcattgtgcgtttcatggatcattatttaattgttgtatattaatgctccatttcttagggcatttctgcattcatgtgggcaagctggatgattcaaagttgttgatatgtggttcagtaggttgttgagtctagataccagatgatggacctgtccacgacttcagtgctggcagctaaagcttacaaatacaaagcagaatcacttgttaaggagtaccttcttgcagattcgtatgtttcatacactgctgtacttggtgggatcctgatgtgcaagatggcttatgacataacaagcataatcagctcattgtactacaagggttatggttcacttacaaaaacccaaaagcttgagtggaacaacaggggcatgtccactatccatgcgatattcatcacagtggtgtcagtgtacctggttttcttctccaacctattctctgatgagctggatggactagtaacttatcggagttcaaatctatccaatttcactttgggggtttctgttgggtatttcatcactgaccttgctatgatattatgggcttatccttctcttggtggaatggagtatgtccttcaccatatgctgtcgcttatttctatagtctatgctatgtattctggggaaggacagttgtacacatacatggttctcatctctgaaacaaccacacctggaatcaacctccgatggttccttgataccgctggactgaaaaaatccaaggcctatcttgtcaatggtgttacgatgtttattgcatggctggtggcacggatcattttgttcgtctacttgttttaccacatttacttccactatgatcaggtcaagcagatgcatacgtttagctgcattctgatatttgctgtgcctacaatactgctcgtcatgaacacaatgtggtttgccaagatcttgagaggccttaaaaagacgctagccaagaggcagtgaaaagaagaatggtaaaacaagctcaaggacatcgatagccaaaatccatcccctcgtacagtcactttacagttacatgcacttcccgagtaaagccgtcagtgcagctcgtagcacaagctaaagcccttgcacatgatcctgaaatacgctaaacacagctcatttttttccctggatgctctgccttgtacatacggccgtctgtattgggtgcttacaccttgagggatcgtttggtgaccaggaaaatagatgggaaagaaatccctttgttacggcctcgttcgtttcaactggtttggctttggcccgtttccggcctcattccgggtggaaatggaatttggttgtttctctatgagctgttcgatggctgagtctgacgattgcgctgttgcgtttgtcttttctatttcttccgatcttaaatatacgaggatgtttactttttttttaaaaaaaaactttgatcactcgtcttattcaaaatatttattcaaaaatgcaaac

SEQ ID NO: 219712 - DNA, 309 bp, Zea Mays
atgattggagctttttgttttttaccccattgcaacatttcacaaatttgcgcacaccaagcaagaggggtgttcaatcgaccccaaactatggaagtgttgttacatctggaacaacacttggctgtcatgccccacttgtgtacaggcgagtccactccttcgctgtctcaacagcttcagcttcgttggatttccagtgtttcgcaatgttgtctgagagaggatcatctgggtttggggcgctcagaagtgcctgaatgctcagtagaactgtacgtatctgaagagctggactccatttgtcct

SEQ ID NO: 219713 - DNA, 1844 bp, Zea Mays
accttttttatgttgcacgcatccagggaccatggcagtggtagagagagaaagaaagaaagggaaggcggggggaggccggccaaggcaccaccacaccaccacccgacgaattcaagcatgaggccgccgccgccgccggcggccacgaccatgcgtttccacgacggtgccgacataaagcccccgcttctgggagtcccgtcggcaggtctacttcatcaacaccagacgctgccggcggcctccttcttcatgccgctcccctccttccccgaccatcagcaccagccacatctcccgcccccgccgaagcgccaccactctatgcccgacaacctgttcctcctccaaaaccagctccagccgccgccgtcgcagggtctaccattcccgccactgcataccaccacgcccttccagctccagccaccactgcaaccgccgcggggagcgatgaaaacaaccccggcggcgcagcaacatcaacagctcctggacgagcttgctgcggcggcaatggcggctgaggtcggcaactccatcggcgcgcgagagatattggcgcggctcaatcagcagcttcccccaatcgggaagcctttactccgctccgcttcctacctcagggaggccctcctcctcgcgctcaccgacggccaccaaggctccactcgcgtaacctccccgctcgacgtcgccctcaagctcgtgggcttccttcttgcaggagctcgcataccgccgtggaactgggaacggtcccctgccaatgttgaagctcacagccttcgtgtcaagtgcttcccaccacccgcttgagctgcatcttactcgggagaacctgtcgcaatttgctgtggaccttggcattccatttgagttcactgccatcaatctcgatgcgtttgatcccgcagagctcattgctcctagcgccgatgaggttgtcgctgtttgcctccccgttggttgctctgcacgcacgccaccgctcccgatgttgcttcagttggtgaaacagcttgctcctaagattgttgtggctattgaccacggcagtgaccggggtgacctcccgttttcgcagcacttcatgaattgcttccagtcctgtatgttccttctcgactcactcgatgctgctggcaccaatgcggatgctgccagtaagatcgagaggtttctgatccaaccgagagtagaggatgcagtgcttggccgtcggaaggctgaaaaggcaatggcttggcgggcagtttttacatcggctgggtttgctccagtgccactcagcaaccttgcagaggcacaagctgactgcctcttgaagcgggtgcaggtccgaggattccatgtggagaagtgtggaatgggtctagcactgtactggcagcggggcgagctcgtgtctgtctcggcgtggcggtgctgatcatagcaacctcatccgtcaaccatcgtcgtcgtcgcgcctacactattcgcaggcatgtttaactccggtaatatgcgttttatcttgcaaacattgcaaagaaactattgtcatggttgttccacgcctctgattgctttactgctgtttttggagtattagctaggcctaatgaatgttgcaatcttggtgtgggtgtccccctacaatgtaacatgttggtactagggtctcaacgctgttcgtgctctcttcttggttagccggaggctactttggcgtatttgtggcaatggtgttcgttattttactaggtaaatcagatgaagactgacatatgaactgaaatggttgggcattttttttctttcttggcttcatatccatggttgatgtatggatttct

SEQ ID NO: 219714 - DNA, 3486 bp, Zea Mays
ccttataaaatctatgtaacatactcaatttgtttgcctggaatctagacttgcatggtgtccgttagatgttttgatcccctctacacttctttctctttaagcgtttttagtgttgattattatctggtcaaagtcaagcagatagaaaaagtggagtatgattgcaataactgagagatagtcagttccctgtcaaactatcattctcaagtggacgagctggttgccaatcagtgcttagagtttagtatccattagagacgccaatgttgaccgacgactagaaaattgacctcatagttctatcatggaacttctaaaactcataactctgaatgttcatcccaaaagttttacccgctggcactccccaccacgcattctctctccccacccccaacgcagcgattgcaggaaccatttcacttatctgggagaattcagagaggtacatttcacttatttgggagaattcagagaggtacggagaaattcaatccctttcctcatgattatgtcagtgcatttctctcttgctgctttgatttgattagcctagtttggtaatcggagtaaagcagatagccatgtttgggaaaataagtttctgcagagagtgcacccttgttaatttgttgatcctgtctgtaatagcatcaagatgcttgtcagctcccacagaaagattaggcagtatttttcagaaccaatcaattttagatgggcagacactagtgtccatgagcagaattttcgtgctcggtttctttagccctggagcttcgagcaagcgatatgttggtatatggcacaacgatgtttcagaaagaagagttgtatgggttgccaacaggaacgatccattacaagatacttctggcatacttaagtttgataacagtagcaatctgatcgttttagatgggaggggcaactcattcacagtggcttatggacggggagtgcaagatgtggaggctgcaatgctggataacggcaatttcatcttaaggagcatcacgaaccaagctaagatcatatggcagagctttgactctcctactgatacatggttccctggaattaatattacacttggtgctaaattgctgacttcatggaagagctatgatgacccagcagtaggggattattcttttggacctggcataactaatgcatctcaactcattatctggtggaaagggatccaattttggaccagtttacgctggaatggtgataccaactctctcattccagagctgacatctcttggtatcatccctgttttatttcaatgtgacaaccttacatgtacatacactgccaatcccagagacacaatgacaaagattgtgttagatccaaatggttcattgaacatagcccaatttagtcctgtaactgagtcatggactctgttatggcgacagcctcctagctgtgaggtatctaacatatgtggtgtttttggtatatgcaacaacaatatgtcacccatatgtcattgtccactaggctttgaacaacaagcaggagatacccggaaagggtgcactaggcaaatccaactgcagtgtaatggtgataggtttgttaatatgtccaatatgcgattccctgactcaagagttaaactttctgttatgggagacggcaaatgccaattggaatgcatgaaaaattgctcctgcactgcatacacttattctgtattggatggttgcagcctatggtatggcaatttaacaaatatgcaggacggatataagagtggagcagggactctttatcttcgtgttgctaatagttcagttcaggtcacaaattactttggatagctggtgtacttccttcaattggatttcttattttttgtctgatcttgtttatttggatcagcagatcaaaaaacaaaggaaaaggaaaacaggatggtcatcactccataatgacttcggatgctatcaaactctgggaggaaaacatgcttggagaaggggggtttggcccagtgtacaagggccacttaccggatgggcaagagattgctgttaagagactggcagcaaattcagggcaagggttaactgagtttaaaaacgaagtcctcctcatagctaaacttcagcacagcaatttagtccggctgttaggttgctgcattgaagaggaagagatgctattagtgtatgagtacatgccaaacaaaagcttggatttcttcttatttgaaaaatcaagaagagctttgctagactgggagatgcgcatgaacataatcgaaggggtcgcgcagggtcttatctatctccacaagcattctcggctcagggttatccatagggacctgaaagcaagcaacattttgctggacactgatatgaaccctaagatctcggactttgggatggcgagaatattcgatcccaaaggaacgcaagccaatacgaaaagagttgtaggaacatatggctacatggctcccgagtatgctatggcaggcaatttctccaccaagtccgatgtgtttagctacggagtgttgcttctggagattatcagtggaatgagaaacgctggacctcgaaggcatggcaactccgttagcctccttggttacgcatgggaactatggaacgaaggcaggtgccatgagctcatcgataaaccattacgcggcaggtgtcctgagaacgtagcgttaagatgcatccatgtcagcttgctgtgtgttcaggagcaagctgcggatcggccctccatgactgaggtcatttcaatgattaccaacggaagtgccacgttaccagacccaaagcagcccggtttcctctccatgttggtcccaaacgaaaccgatgtcgctgaagaaacatgctccctgaatggtctctcagtcaccatccttgacggaagatagcactagttcaaatcgccgcctttctttgcttggtccatgcatgcgcgttaccattgcatcactttgcatggtatttcccaaaagttatattacgggagcctgaaagttttgttctcatgcatccaggctaatggtatataagcatcgccgcatcattgagtccttgtccttagaggaacgtatggttgttgatggtgccaacctggcattatgactttctgatttcatcacatattttcatccaggctatatatatgctcgcttttattctgttcggtcaagattcaacacgaggatttaaacgacaatgcaaatgaactggcataaacatttcatcggtggggattgctttctctcttttcctctctctatctacatgatggagacaatgtcagtcgctgcatagtcgcggcatgttcttatgcatggctcgttcatcatgacttttgattggtttggcgagctcaggctggcacacagttgtaaaaaaaagtaagcgttctgatgtgtgacagttgcccaaatcaatctttgtccgttgcgtgacaacgatggtg

SEQ ID NO: 219715 - DNA, 2161 bp, Zea Mays
cgagggtcttcgccctagtcgcctgtgcgcagcgggcctagaggcagcgactgagatatccattccactcccgtcaataattcgtcatgaccactgaccaggttgccttcacggagccgagctcatctatgacgttactgaaattgaaacttgaacggggatggggatccaaggaagaagatgacggatcgtgcaaataaggagccgctatgcccgcggaagaggaagaagcgaataagcgatatatctgcttccaaaaggctagaagctggaattccattcagacacatgtcacaagcaacatgatttggacatttcaacgaacacgtcgttggacgtagcagcagcagcagcctatggtatggcaatttaacaaatatgcaggacggatataagagtggagcagggactctttatcttcgtgttgctaatagttcaggtcacaaattactttggatagctggtgtacttccttcaattggatttcttattttttgtctgatcttgtttatttggatcagcagatcaaaaaacaaaggaaaaggaaaacaggatggtcatcactccataatgacttcggatgctatcaaactctgggagggtgagaaaacaagcacttattttgcggtgttttccttttcacaaataagaaatggtacagacaaattttcaacagaaaacatgcttggagaaggggggtttggcccagtgtacaagggccacttaccggatgggcaagagattgctgttaagagactggcagcaaattcagggcaagggttaactgagtttaaaaacgaagtcctcctcatagctaaacttcagcacagcaatttagtccggctgttaggttgctgcattgaagaggaagagatgctattagtgtatgagtacatgccaaacaaaagcttggatttcttcttatttgagctttgctagactgggagatgcgcatgaacataatcgaaggggtcgcgcagggtcttatctatctccacaagcattctcggctcagggttatccatagggacctgaaagcaagcaacattttgctggacactgatatgaaccctaagatctcggactttgggatggcgagaatattcgatcccaaaggaacgcaagccaatacgaaaagagttgtaggaacatatggctacatggctcccgagtatgctatggcaggcaatttctccaccaagtccgatgtgtttagctacggagtgttgcttctggagattatcagtggaatgagaaacgctggacctcgaaggcatggcaactccgttagcctccttggttacgcatgggaactatggaacgaaggcaggtgccatgagctcatcgataaaccattacgcggcaggtgtcctgagaacgtagcgttaagatgcatccatgtcagcttgctgtgtgttcaggagcaagctgcggatcggccctccatgactgaggtcatttcaatgattaccaacggaagtgccacgttaccagacccaaagcagcccggtttcctctccatgttggtcccaaacgaaaccgatgtcgctgaagaaacatgctccctgaatggtctctcagtcaccatccttgacggaagatagcactagttcaaatcgccgcctttctttgcttggtccatgcatgcgcgttaccattgcatcactttgcatggtatttcccaaaagttatattacgggagcctgaaagttttgttctcatgcatccaggctaatggtatataagcatcgccgcatcattgagtccttgtccttagaggaacgtatggttgttgatggtgccaacctggcattatgactttctgatttcatcacatattttcatccaggctatatatatgctcgcttttattctgttcggtcaagattcaacacgaggatttaaacgacaatgcaaatgaactggcataaacatttcatcggtggggattgctttctctcttttcctctctctatctacatgatggagacaatgtcagtcgctgcatagtcgcggcatgttcttatgcatggctcgttcatcatgacttttgattggtttggcgagctcaggctggcacacagttgtaaaaaaaagtaagcgttctgatgtgtgacagttgcccaaatcaatctttgtccgttgcgtgacaacgatggtg

SEQ ID NO: 219716 - DNA, 2192 bp, Zea Mays
ccttataaaatctatgtaacatactcaatttgtttgcctggaatctagacttgcatggtgtccgttagatgttttgatcccctctacacttctttctctttaagcgtttttagtgttgattattatctggtcaaagtcaagcagatagaaaaagtggagtatgattgcaataactgagagatagtcagttccctgtcaaactatcattctcaagtggacgagctggttgccaatcagtgcttagagtttagtatccattagagacgccaatgttgaccgacgactagaaaattgacctcatagttctatcatggaacttctaaaactcataactctgaatgttcatcccaaaagttttacccgctggcactccccaccacgcattctctctccccacccccaacgcagcgattgcaggaaccatttcacttatctgggagaattcagagaggtacatttcacttatttgggagaattcagagaggtacggagaaattcaatccctttcctcatgattatgtcagtgcatttctctcttgctgctttgatttgattagcctagtttggtaatcggagtaaagcagatagccatgtttgggaaaataagtttctgcagagagtgcacccttgttaatttgttgatcctgtctgtaatagcatcaagatgcttgtcagctcccacagaaagattaggcagtatttttcagaaccaatcaattttagatgggcagacactagtgtccatgagcagaattttcgtgctcggtttctttagccctggagcttcgagcaagcgatatgttggtatatggcacaacgatgtttcagaaagaagagttgtatgggttgccaacaggaacgatccattacaagatacttctggcatacttaagtttgataacagtagcaatctgatcgttttagatgggaggggcaactcattcacagtggcttatggacggggagtgcaagatgtggaggctgcaatgctggataacggcaatttcatcttaaggagcatcacgaaccaagctaagatcatatggcagagctttgactctcctactgatacatggttccctggaattaatattacacttggtgctaaattgctgacttcatggaagagctatgatgacccagcagtaggggattattcttttggacctggcataactaatgcatctcaactcattatctggtggaaagggatccaattttggaccagtttacgctggaatggtgataccaactctctcattccagagctgacatctcttggtatcatccctgttttatttcaatgtgacaaccttacatgtacatacactgccaatcccagagacacaatgacaaagattgtgttagatccaaatggttcattgaacatagcccaatttagtcctgtaactgagtcatggactctgttatggcgacagcctcctagctgtgaggtatctaacatatgtggtgtttttggtatatgcaacaacaatatgtcacccatatgtcattgtccactaggctttgaacaacaagcaggagatacccggaaagggtgcactaggcaaatccaactgcagtgtaatggtgataggtttgttaatatgtccaatatgcgattccctgactcaagagttaaactttctgttatgggagacggcaaatgccaattggaatgcatgaaaaattgctcctgcactgcatacacttattctgtattggatggttgcagcctatggtatggcaatttaacaaatatgcaggacggatataagagtggagcagggactctttatcttcgtgttgctaatagttcaggaaaaggaaaacaggatggtcatcactccataatgacttcggatgctatcaaactctgggagggtgagaaaacaagcacttattttgcggtgttttccttttcacaaataagaaatggtacagacaaattttcaacagaaaacatgcttggagaaggggggtttggcccagtgtacaagggccacttaccggatgggcaagagattgctgttaagagactggcagcaaattcagggcaagggttaactgagtttaaaaacgaagtcctcctcatagctaaacttcagcacagcaatttagtccggctgttaggttgctgcattgaagaggaagagatgctattagtgtatgagtacatgccaaacaaaagc

SEQ ID NO: 219717 - DNA, 3053 bp, Zea Mays
cccgatcggaccataaaaacaaatgaaataaacaaataaaaatacgcgcgacgaacagagctgaacacaaacacccacatcgatccaacccaagccacgcctcggcgacaggccgacagcccacgagcgagatccaacccaagttccgacgccgcgggcgagaccgatcagatccacctcagccgtctcggatggcgtcagcatcgacggcggtgcggatgctccccgacggcggcgctgacgacgaggagcggtggctcgccgagggcatcgccggcgtccagcaaaacgccttctacatgcaccgcgccctcgattccaacaacctcaaggacgcactcaagtactcggcgcagatgctctccgaactgcgcacctcgcgactatcgccgcacaagtactacgagctgtacatgagggcgtttgatgagatgaagaagctggagatgttcttcagggaggagactcgccggggcagctgctctgtggttgatatgtacgagcttgtgcagcatgctgggaatgtcttaccgagactctatctcctgtgcacggtgggatctgtgtacatcaaatcgaaagaggctcctgctaaagatgttcttaaagatctcgttgaaatgtgccgaggcattcagcatccccttcgtggcctttttctgagaagttatctttctcaaataagcagagacaagttgcctgatattggttccgagtatgaagggggcctgcccgagaaaaggaaaagcgtgggaaggaaagaaatgaactgcgtgatctggtaggcaaaaaccttcatgttctaagccagattgagggtgttgaccttgatatgtacaaagaaactgttcttccaaggatattagagcaggtggttaattgtaaggatgaccttgcacagttctacctgatggactgcataatccaagtctttccagatgaataccatttacaaacattggaaacattattgaatgcatttccccagcttcagccaagtgttgatatcaaaacagtactctctcaacttatggacagattgtctaactatgctgcctcaagtcctgaagtgttaccagagttcttgcaagttgaagcttttgctaagttcagtaatgctattggaaaggtgatagaagcccaacctgacatgccagttgttggagccgtaactctatatgtatcgcttctgacttttactctccgtgtacatcctgaccggcttgattatgttgaccaagtgctcggtgcatgtgtcaagaaactttcaggcaaagcaaaacttgaagatagcagggcaacgaagcaaattgttgcacttcttagtgctcccctagaaaaatatagcaatattgttactgcattagaactttcaaactatcctcgggtcatggattatcttgataatgctacaaccaaagtgatggctgtggtaataattcaaagcataatgaaaaacacaacctgcatatctacttctgacaagattgaggcactattcgatttaattaaggggctgataaaggatatggatggggctcaagatgatgaacttgatgaagaagattttaaggaggaacagaactctgtagcacgtctcattcacatgttgcacaatgatgagcctgaagagatgttgaagatcttatgtactgtacagaagcatatacttcagggaggccccaaacgtttaactttcactgtgccttctttagtattctccgctcttaagctggtcaggagattacaaagccaagatggagatgtcactggggaggatgttcctgcaactccaaagaaaatattccagatattgcatcagactatcgacgcactttcttgtgttccttccccagagttagctctgagactatatttgcattgtgcagaggctgccaatgactgtgatttggaaccagttgcttatgagttctttactcaagcgttcatattatatgaagaagaaattgcggattcaaaggctcaaatcactgcaattcacctgataattgggacccttcagcggatgaatatatttggggtggaaaatagagacactctcactcacaagacaacagggtactcagcaaaacttctcaagaagcctgatcaatgccgagcagtttatgcgtgttcacatcttttctgggctgatgaccaagatgggataatggatggtgaaagggttctgctttgtttgaaacgtgccttgagaatcgcaaatgctgctcaacagatggctagtgctacaaggggaagcagtggatccgtaactctatttattgagattttgaacaagtacttgtacttctttgagaaaggaattccgcagatcacaaataccgtgattcaagatttgattgaattgattagaacggagaagcaaagtgataactctgtagctgatccatctacagaggcattcttttctagcactttgcggtacattgaatttcagaagcagaaaggtgggagcataggcgaaaaatatgaacagataaagacgagttcatgagtcagaactagcgcggcgccacgactggtttcgattttgttgagaattgggtcgtttgtttggcatggttcagtgaaatagaaaccataagttttagctcgctccatgtaaaagatgtttatacgagctgttaattctcaaatctcacggtctgagcgggtctgttcgcccattggcaacactttcaggtttagtcaggtggcaataagctgtgtcctttggggagcacaggtctgtacaggattacttgtgttcgtgatcagttctactgctacctgaatttcatcgttgtatatttccgccccttatgcgaagcttatggattttagatctctgtaacattcggagtacatgccttcatttctgagttctgactggacattgatgattgtttcagagtggccagtgcaggacttgaacattttggatgcccgttcgttgacattttaatgttacccattactctgctgtgtggcatgacctcgctgggtttcactcgttcttgctgagaacaatcacaaacacgtgtatccatctg

SEQ ID NO: 219718 - DNA, 3056 bp, Zea Mays
aaacaaatgaaataaacaaataaaaatacgcgcgacgaacagagctgaacacaaacacccacatcgatccaacccaagccacgcctcggcgacaggccgacagcccacgagcgagatccaacccaagttccgacgccgcgggcgagaccgatcagatccacctcagccgtctcggatggcgtcagcatcgacggcggtgcggatgctccccgacggcggcgctgacgacgaggagcggtggctcgccgagggcatcgccggcgtccagcaaaacgccttctacatgcaccgcgccctcgattccaacaacctcaaggacgcactcaagtactcggcgcagatgctctccgaactgcgcacctcgcgactatcgccgcacaagtactacgagctgtacatgagggcgtttgatgagatgaagaagctggagatgttcttcagggaggagactcgccggggcagctgctctgtggttgatatgtacgagcttgtgcagcatgctgggaatgtcttaccgagactctatctcctgtgcacggtgggatctgtgtacatcaaatcgaaagaggctcctgctaaagatgttcttaaagatctcgttgaaatgtgccgaggcattcagcatccccttcgtggcctttttctgagaagttatctttctcaaataagcagagacaagttgcctgatattggttccgagtatgaaggggatgctgaaactattaacgacgcagttgaatttgttcttcagaatttcatagaaatgaacaaactctgggttcggatgcaacatctggggcctgcccgagaaaaggaaaagcgtgggaaggaaagaaatgaactgcgtgatctggtaggcaaaaaccttcatgttctaagccagattgagggtgttgaccttgatatgtacaaagaaactgttcttccaaggatattagagcaggtggttaattgtaaggatgaccttgcacagttctacctgatggactgcataatccaagtctttccagatgaataccatttacaaacattggaaacattattgaatgcatttccccagcttcagccaagtgttgatatcaaaacagtactctctcaacttatggacagattgtctaactatgctgcctcaagtcctgaagtgttaccagagttcttgcaagttgaagcttttgctaagttcagtaatgctattggaaaggtgatagaagcccaacctgacatgccagttgttggagccgtaactctatatgtatcgcttctgacttttactctccgtgtacatcctgaccggcttgattatgttgaccaagtgctcggtgcatgtgtcaagaaactttcaggcaaagcaaaacttgaagatagcagggcaacgaagcaaattgttgcacttcttagtgctcccctagaaaaatatagcaatattgttactgcattagaactttcaaactatcctcgggtcatggattatcttgataatgctacaaccaaagtgatggctgtggtaataattcaaagcataatgaaaaacacaacctgcatatctacttctgacaagattgaggcactattcgatttaattaaggggctgataaaggatatggatggggctcaagatgatgaacttgatgaagaagattttaaggaggaacagaactctgtagcacgtctcattcacatgttgcacaatgatgagcctgaagagatgttgaagatcttatgtactgtacagaagcatatacttcagggaggccccaaacgtttaactttcactgtgccttctttagtattctccgctcttaagctggtcaggagattacaaagccaagatggagatgtcactggggaggatgttcctgcaactccaaagaaaatattccagatattgcatcaggctgccaatgactgtgatttggaaccagttgcttatgagttctttactcaagcgttcatattatatgaagaagaaattgcggattcaaaggctcaaatcactgcaattcacctgataattgggacccttcagcggatgaatatatttggggtggaaaatagagacactctcactcacaagacaacagggtactcagcaaaacttctcaagaagcctgatcaatgccgagcagtttatgcgtgttcacatcttttctgggctgatgaccaagatgggataatggatggtgaaagggttctgctttgtttgaaacgtgccttgagaatcgcaaatgctgctcaacagatggctagtgctacaaggggaagcagtggatccgtaactctatttattgagattttgaacaagtacttgtacttctttgagaaaggaattccgcagatcacaaataccgtgattcaagatttgattgaattgattagaacggagaagcaaagtgataactctgtagctgatccatctacagaggcattcttttctagcactttgcggtacattgaatttcagaagcagaaaggtgggagcataggcgaaaaatatgaacagataaagacgagttcatgagtcagaactagcgcggcgccacgactggtttcgattttgttgagaattgggtcgtttgtttggcatggttcagtgaaatagaaaccataagttttagctcgctccatgtaaaagatgtttatacgagctgttaattctcaaatctcacggtctgagcgggtctgttcgcccattggcaacactttcaggtttagtcaggtggcaataagctgtgtcctttggggagcacaggtctgtacaggattacttgtgttcgtgatcagttctactgctacctgaatttcatcgttgtatatttccgccccttatgcgaagcttatggattttagatctctgtaacattcggagtacatgccttcatttctgagttctgactggacattgatgattgtttcagagtggccagtgcaggacttgaacattttggatgcccgttcgttgacattttaatgttacccattactctgctgtgtggcatgacctcgctgggtttcactcgttcttgctgagaacaatcacaaacacgtgtatccatctg

SEQ ID NO: 219719 - DNA, 3063 bp, Zea Mays
gacgaacagagctgaacacaaacacccacatcgatccaacccaagccacgcctcggcgacaggccgacagcccacgagcgagatccaacccaagttccgacgccgcgggcgagaccgatcagatccacctcagccgtctcggatggcgtcagcatcgacggcggtgcggatgctccccgacggcggcgctgacgacgaggagcggtggctcgccgagggcatcgccggcgtccagcaaaacgccttctacatgcaccgcgccctcgattccaacaacctcaaggacgcactcaagtactcggcgcagatgctctccgaactgcgcacctcgcgactatcgccgcacaagtactacgagctgtacatgagggcgtttgatgagatgaagaagctggagatgttcttcagggaggagactcgccggggcagctgctctgtggttgatatgtacgagcttgtgcagcatgctgggaatgtcttaccgagactctatctcctgtgcacggtgggatctgtgtacatcaaatcgaaagaggctcctgctaaagatgttcttaaagatctcgttgaaatgtgccgaggcattcagcatccccttcgtggcctttttctgagaagttatctttctcaaataagcagagacaagttgcctgatattggttccgagtatgaaggggatgctgaaactattaacgacgcagttgaatttgttcttcagaatttcatagaaatgaacaaactctgggttcggatgcaacatctggggcctgcccgagaaaaggaaaagcgtgggaaggaaagaaatgaactgcgtgatctggtaggcaaaaaccttcatgttctaagccagattgagggtgttgaccttgatatgtacaaagaaactgttcttccaaggatattagagcaggtggttaattgtaaggatgaccttgcacagttctacctgatggactgcataatccaagtctttccagatgaataccatttacaaacattggaaacattattgaatgcatttccccagcttcagccaagtgttgatatcaaaacagtactctctcaacttatggacagattgtctaactatgctgcctcaagtcctgaagtgttaccagagttcttgcaagttgaagcttttgctaagttcagtaatgctattggaaaggtgatagaagcccaacctgacatgccagttgttggagccgtaactctatatgtatcgcttctgacttttactctccgtgtacatcctgaccggcttgattatgttgaccaagtgctcggtgcatgtgtcaagaaactttcaggcaaagcaaaacttgaagatagcagggcaacgaagcaaattgttgcacttcttagtgctcccctagaaaaatatagcaatattgttactgcattagaactttcaaactatcctcgggtcatggattatcttgataatgctacaaccaaagtgatggctgtggtaataattcaaagcataatgaaaaacacaacctgcatatctacttctgacaagattgaggcactattcgatttaattaaggggctgataaaggatatggatggggctcaagatgatgaacttgatgaagaagattttaaggaggaacagaactctgtagcacgtctcattcacatgttgcacaatgatgagcctgaagagatgttgaagatcttatgtactgtacagaagcatatacttcagggaggccccaaacgtttaactttcactgtgccttctttagtattctccgctcttaagctggtcaggagattacaaagccaagatggagatgtcactggggaggatgttcctgcaactccaaagaaaatattccagatattgcatcagactatcgacgcactttcttgtgttccttccccagagttagctctgagactatatttgcattgtgcagaggctgccaatgactgtgatttggaaccagttgcttatgagttctttactcaagcgttcatattatatgaagaagaaattgcggattcaaaggctcaaatcactgcaattcacctgataattgggacccttcagcggatgaatatatttggggtggaaaatagagacactctcactcacaagacaacagggtactcagcaaaacttctcaagaagcctgatcaatgccgagcagtttatgcgtgttcacatcttttctgggctgatgaccaagatgggataatggatggtgaaagggttctgctttgtttgaaacgtgccttgagaatcgcaaatgctgctcaacagatggctagtgctacaaggggaagcagtggatccgtacttgtacttctttgagaaaggaattccgcagatcacaaataccgtgattcaagatttgattgaattgattagaacggagaagcaaagtgataactctgtagctgatccatctacagaggcattcttttctagcactttgcggtacattgaatttcagaagcagaaaggtgggagcataggcgaaaaatatgaacagataaagacgagttcatgagtcagaactagcgcggcgccacgactggtttcgattttgttgagaattgggtcgtttgtttggcatggttcagtgaaatagaaaccataagttttagctcgctccatgtaaaagatgtttatacgagctgttaattctcaaatctcacggtctgagcgggtctgttcgcccattggcaacactttcaggtttagtcaggtggcaataagctgtgtcctttggggagcacaggtctgtacaggattacttgtgttcgtgatcagttctactgctacctgaatttcatcgttgtatatttccgccccttatgcgaagcttatggattttagatctctgtaacattcggagtacatgccttcatttctgagttctgactggacattgatgattgtttcagagtggccagtgcaggacttgaacattttggatgcccgttcgttgacattttaatgttacccattactctgctgtgtggcatgacctcgctgggtttcactcgttcttgctgagaacaatcacaaacacgtgtatccatctg

SEQ ID NO: 219720 - DNA, 3063 bp, Zea Mays
aacacccacatcgatccaacccaagccacgcctcggcgacaggccgacagcccacgagcgagatccaacccaagttccgacgccgcgggcgagaccgatcagatccacctcagccgtctcggatggcgtcagcatcgacggcggtgcggatgctccccgacggcggcgctgacgacgaggagcggtggctcgccgagggcatcgccggcgtccagcaaaacgccttctacatgcaccgcgccctcgattccaacaacctcaaggacgcactcaagtactcggcgcagatgctctccgaactgcgcacctcgcgactatcgccgcacaagtactacgagctgtacatgagggcgtttgatgagatgaagaagctggagatgttcttcagggaggagactcgccggggcagctgctctgtggttgatatgtacgagcttgtgcagcatgctgggaatgtcttaccgagactctatctcctgtgcacggtgggatctgtgtacatcaaatcgaaagaggctcctgctaaagatgttcttaaagatctcgttgaaatgtgccgaggcattcagcatccccttcgtggcctttttctgagaagttatctttctcaaataagcagagacaagttgcctgatattggttccgaggatgctgaaactattaacgacgcagttgaatttgttcttcagaatttcatagaaatgaacaaactctgggttcggatgcaacatctggggcctgcccgagaaaaggaaaagcgtgggaaggaaagaaatgaactgcgtgatctggtaggcaaaaaccttcatgttctaagccagattgagggtgttgaccttgatatgtacaaagaaactgttcttccaaggatattagagcaggtggttaattgtaaggatgaccttgcacagttctacctgatggactgcataatccaagtctttccagatgaataccatttacaaacattggaaacattattgaatgcatttccccagcttcagccaagtgttgatatcaaaacagtactctctcaacttatggacagattgtctaactatgctgcctcaagtcctgaagtgttaccagagttcttgcaagttgaagcttttgctaagttcagtaatgctattggaaaggtgatagaagcccaacctgacatgccagttgttggagccgtaactctatatgtatcgcttctgacttttactctccgtgtacatcctgaccggcttgattatgttgaccaagtgctcggtgcatgtgtcaagaaactttcaggcaaagcaaaacttgaagatagcagggcaacgaagcaaattgttgcacttcttagtgctcccctagaaaaatatagcaatattgttactgcattagaactttcaaactatcctcgggtcatggattatcttgataatgctacaaccaaagtgatggctgtggtaataattcaaagcataatgaaaaacacaacctgcatatctacttctgacaagattgaggcactattcgatttaattaaggggctgataaaggatatggatggggctcaagatgatgaacttgatgaagaagattttaaggaggaacagaactctgtagcacgtctcattcacatgttgcacaatgatgagcctgaagagatgttgaagatcttatgtactgtacagaagcatatacttcagggaggccccaaacgtttaactttcactgtgccttctttagtattctccgctcttaagctggtcaggagattacaaagccaagatggagatgtcactggggaggatgttcctgcaactccaaagaaaatattccagatattgcatcagactatcgacgcactttcttgtgttccttccccagagttagctctgagactatatttgcattgtgcagaggctgccaatgactgtgatttggaaccagttgcttatgagttctttactcaagcgttcatattatatgaagaagaaattgcggattcaaaggctcaaatcactgcaattcacctgataattgggacccttcagcggatgaatatatttggggtggaaaatagagacactctcactcacaagacaacagggtactcagcaaaacttctcaagaagcctgatcaatgccgagcagtttatgcgtgttcacatcttttctgggctgatgaccaagatgggataatggatggtgaaagggttctgctttgtttgaaacgtgccttgagaatcgcaaatgctgctcaacagatggctagtgctacaaggggaagcagtggatccgtaactctatttattgagattttgaacaagtacttgtacttctttgagaaaggaattccgcagatcacaaataccgtgattcaagatttgattgaattgattagaacggagaagcaaagtgataactctgtagctgatccatctacagaggcattcttttctagcactttgcggtacattgaatttcagaagcagaaaggtgggagcataggcgaaaaatatgaacagataaagacgagttcatgagtcagaactagcgcggcgccacgactggtttcgattttgttgagaattgggtcgtttgtttggcatggttcagtgaaatagaaaccataagttttagctcgctccatgtaaaagatgtttatacgagctgttaattctcaaatctcacggtctgagcgggtctgttcgcccattggcaacactttcaggtttagtcaggtggcaataagctgtgtcctttggggagcacaggtctgtacaggattacttgtgttcgtgatcagttctactgctacctgaatttcatcgttgtatatttccgccccttatgcgaagcttatggattttagatctctgtaacattcggagtacatgccttcatttctgagttctgactggacattgatgattgtttcagagtggccagtgcaggacttgaacattttggatgcccgttcgttgacattttaatgttacccattactctgctgtgtggcatgacctcgctgggtttcactcgttcttgctgagaacaatcacaaacacgtgtatccatctg

SEQ ID NO: 219721 - DNA, 1018 bp, Zea Mays
gtttatttccacatccaatccccatggggaatgggtttatgcaaatactcagcaaaacttctcaagaagcctgatcaatgccgagcagtttatgcgtgttcacatcttttctgggctgatgaccaagatgggataatggatggtgaaagggttctgctttgtttgaaacgtgccttgagaatcgcaaatgctgctcaacagatggctagtgctacaaggggaagcagtggatccgtaactctatttattgagattttgaacaagtacttgtacttctttgagaaaggaattccgcagatcacaaataccgtgattcaagatttgattgaattgattagaacggagaagcaaagtgataactctgtagctgatccatctacagaggcattcttttctagcactttgcggtacattgaatttcagaagcagaaaggtgggagcataggcgaaaaatatgaacagataaagacgagttcatgagtcagaactagcgcggcgccacgactggtttcgattttgttgagaattgggtcgtttgtttggcatggttcagtgaaatagaaaccataagttttagctcgctccatgtaaaagatgtttatacgagctgttaattctcaaatctcacggtctgagcgggtctgttcgcccattggcaacactttcaggtttagtcaggtggcaataagctgtgtcctttggggagcacaggtctgtacaggattacttgtgttcgtgatcagttctactgctacctgaatttcatcgttgtatatttccgccccttatgcgaagcttatggattttagatctctgtaacattcggagtacatgccttcatttctgagttctgactggacattgatgattgtttcagagtggccagtgcaggacttgaacattttggatgcccgttcgttgacattttaatgttacccattactctgctgtgtggcatgacctcgctgggtttcactcgttcttgctgagaacaatcacaaacacgtgtatccatctg

SEQ ID NO: 219722 - DNA, 903 bp, Zea Mays
aaggcccagtccgatgactctggccctataactctgagccccatcggagactcggagtcgggggcgccagcgtctcgcctcgccgtcagcagcagcagcagctgcacctccattccacggcttccgtcgtgcgcttcgtctgcacccacaaaggcgacggcgacggcagggggaggagatgaagctgaagcagctggagggcctcttgggtggcctgacccagttctccgaccccaagctggagctggagcagtatgcgacgggccctcacatcgcgtcgcggatgctctacatgagaatagtttcaatgacataactggcaaagtggtagctgtctagctgacttcggctgtggctgtggcactctggctgtggcgagtgctttactggatgctgaacatgttcttggtattgatattgacccacagtcacttgaacttgctcaagaaaatgctgctgatctggagctggacatcgatttagtttggtctgacataaagaacttaaatctgaaagggaagagcaagtgggaagttttgtccttagctgaccaaacaagttcgtcaacatatacctcttttggctcatcatttgagctactactgtcatgacacgtattatgatgagatggctcttgaatttctatgcttcggctttcataagccaaagcttgatgatgtaactaagctagcgaaaagaactgtgtgctacctaatttttcttttaagtatggacgcaacccattgaaagctaactttgctaactgcttatctatgacatggatctgaaaacatcagtttctagtatctctaaaccttcagaaacaatctttactgattcattgaccccttgccagagcgatgccagaccaactaaatctaacacgtaatccttggagaaaac

SEQ ID NO: 219723 - DNA, 850 bp, Zea Mays
aaggcccagtccgatgactctggccctataactctgagccccatcggagactcggagtcgggggcgccagcgtctcgcctcgccgtcagcagcagcagcagctgcacctccattccacggcttccgtcgtgcgcttcgtctgcacccacaaaggcgacggcgacggcagggggaggagatgaagctgaagcagctggagggcctcttgggtggcctgacccagttctccgaccccaaggcagagaatagtttcaatgacataactggcaaagtggtagctgtctagctgacttcggctgtggctgtggcactctggctgtggcgagtgctttactggatgctgaacatgttcttggtattgatattgacccacagtcacttgaacttgctcaagaaaatgctgctgatctggagctggacatcgatttagtttggtctgacataaagaacttaaatctgaaagggaagagcaagtgggaagttttgtccttagctgaccaaacaagttcgtcaacatatacctcttttggctcatcatttgagctactactgtcatgacacgtattatgatgagatggctcttgaatttctatgcttcggctttcataagccaaagcttgatgatgtaactaagctagcgaaaagaactgtgtgctacctaatttttcttttaagtatggacgcaacccattgaaagctaactttgctaactgcttatctatgacatggatctgaaaacatcagtttctagtatctctaaaccttcagaaacaatctttactgattcattgaccccttgccagagcgatgccagaccaactaaatctaacacgtaatccttggagaaaac

SEQ ID NO: 219724 - DNA, 847 bp, Zea Mays
cgttattagagatgatttaacagaacatcccatttctcgtgcggccaaggcccagtccgatgactctggccctataactctgagccccatcggagactcggagtcgggggcgccagcgtctcgcctcgccgtcagcagcagcagcagctgcacctccattccacggcttccgtcgtgcgcttcgtctgcacccacaaaggcgacggcgacggcagggggaggagatgaagctgaagcagctggagggcctcttgggtggcctgacccagttctccgaccccaagctggagctggagcagtatgcgacgggccctcacatcgcgtcgcggatgctctacatgacatgttcttggtattgatattgacccacagtcacttgaacttgctcaagaaaatgctgctgatctggagctggacatcgatttagtttggtctgacataaagaacttaaatctgaaagggaagagcaagtgggaagttttgtccttagctgaccaaacaagttcgtcaacatatacctcttttggctcatcatttgagctactactgtcatgacacgtattatgatgagatggctcttgaatttctatgcttcggctttcataagccaaagcttgatgatgtaactaagctagcgaaaagaactgtgtgctacctaatttttcttttaagtatggacgcaacccattgaaagctaactttgctaactgcttatctatgacatggatctgaaaacatcagtttctagtatctctaaaccttcagaaacaatctttactgattcattgaccccttgccagagcgatgccagaccaactaaatctaacacgtaatccttggagaaaac

SEQ ID NO: 219725 - DNA, 815 bp, Zea Mays
tatgctactgtaatagaatgaagttgcgacattcagataaagagttggagaaaagccttaaagctacctgtgaagagtttataatgtccataactaaattagtagttgacccaatgctttcttttgttactaaggtaactgccgtcaaagttgcattgtcctctggtagccagggtcagaaattagattcagttctagcaaaacctttgaagactcaagcttttgcttctcctgataaagttgctgagctagttcagaaggttgccgctgccattcaacaagatttgcccaaagtaatgaccaagatgaggttgtatttgcaaaatccatctactcggatgatcttattcaaacctatcaagacaaatatagttgaggctcatatacagctgcattcccttctgaagtcggagtactctagtgaagaaatgcaatccatcggtatgttgccgatacctgacctgcagtctcagcttgacagccttttgtagtttgcatacaccatacagcggcgctgctgtagtccatgttgacgttgcagtgcagttctttcaagtaacgcaagtaaagttgttaccacaatttcgaacctctctaccatatcgttgttgtaacttttcattgtttatattgaaaaatggaaatggaacgcctcccatgattcatgtgattgtggacaatctggaagtttgaactcatatcctgtggtgacttatgtatattgtacacgcacgttgtttcctcctctgaaattgactggaatagtttcaacagatcatgggttcatcctcttgtgagatctgcctatctgtggc

SEQ ID NO: 219726 - DNA, 945 bp, Zea Mays
ttttaaccaaacccaaaattcgcccccgagggggatggaatttgggacctggaggatcacctaagaaggattctcaggggtcaggtctcattatttgattggtccaggtcaacatcactagctaggaccttttctcctcgtgttttggagaaccaaattgatgccagaaaagagttggagaaaagccttaaagctacctgtgaagagtttataatgtccataactaaattagtagttgacccaatgctttcttttgttactaaggtaactgccgtcaaagttgcattgtcctctggtagccagggtcagaaattagattcagttctagcaaaacctttgaagactcaagcttttgcttctcctgataaagttgctgagctagttcagaaggttgccgctgccattcaacaagatttgcccaaagtaatgaccaagatgaggttgtatttgcaaaatccatctactcggatgatcttattcaaacctatcaagacaaatatagttgaggctcatatacagctgcattcccttctgaagtcggagtactctagtgaagaaatgcaatccatcggtatgttgccgatacctgacctgcagtctcagcttgacagccttttgtagtttgcatacaccatacagcggcgctgctgtagtccatgttgacgttgcagtgcagttctttcaagtaacgcaagtaaagttgttaccacaatttcgaacctctctaccatatcgttgttgtaacttttcattgtttatattgaaaaatggaaatggaacgcctcccatgattcatgtgattgtggacaatctggaagtttgaactcatatcctgtggtgacttatgtatattgtacacgcacgttgtttcctcctctgaaattgactggaatagtttcaacagatcatgggttcatcctcttgtgagatctgcctatctgtggc

SEQ ID NO: 219727 - DNA, 1260 bp, Zea Mays
cttttctgttccaacatactctccagttacaaaaacagtatcatttctggacatctaatttttgaccgggttggtgacaactcagacatatatataacatggtacagaccattggagaaaacagtttcatgcctttcaaagctatatcgctgcttagagccttctgtcttcactggattagcccaggaagctgtagaagtttgctcaacatctcttcagaatgcaagcagggttatctcaaagaaagcaaccccaatggatggtcagctttttctgattaagcacctcctcattctacgagaacagattgctccatttgatattgagttctctgtcacacataaggagttggatttctcccatttattggatcacctaagaaggattctcaggggtcaggtctcattatttgattggtccaggtcaacatcactagctaggaccttttctcctcgtgttttggagaaccaaattgatgccagaaaagagttggagaaaagccttaaagctacctgtgaagagtttataatgtccataactaaattagtagttgacccaatgctttcttttgttactaaggtaactgccgtcaaagttgcattgtcctctggtagccagggtcagaaattagattcagttctagcaaaacctttgaagactcaagcttttgcttctcctgataaagttgctgagctagttcagaaggttgccgctgccattcaacaagatttgcccaaagtaatgaccaagatgaggttgtatttgcaaaatccatctactcggatgatcttattcaaacctatcaagacaaatatagttgaggctcatatacagctgcattcccttctgaagtcggagtactctagtgaagaaatgcaatccatcggtatgttgccgatacctgacctgcagtctcagcttgacagccttttgtagtttgcatacaccatacagcggcgctgctgtagtccatgttgacgttgcagtgcagttctttcaagtaacgcaagtaaagttgttaccacaatttcgaacctctctaccatatcgttgttgtaacttttcattgtttatattgaaaaatggaaatggaacgcctcccatgattcatgtgattgtggacaatctggaagtttgaactcatatcctgtggtgacttatgtatattgtacacgcacgttgtttcctcctctgaaattgactggaatagtttcaacagatcatgggttcatcctcttgtgagatctgcctatctgtggc

SEQ ID NO: 219728 - DNA, 2255 bp, Zea Mays
ggaccttcacatgaggagatcatgtcatgtttgccttgccggtgaacaggagccgttgttggtcaacagggacatgatcagctaccgatggtctggagcagaatatgagaggtcaagaggagatcaagagccatagccaccattcttggaaacaggtatcaagcagcttttactctcaaaatatgaacattggaaatgaacagtttcttccactgttgaagcgccttgatgattgtatctcgtatgttgaaaacaacccgcaatatgctgaatctgctgtttatttggtcaaatttcgccaacttcaatctcgtgcactgggtatgattcgctcacatgtgttgtcaatacttaaaggtgcttcatcccaggttcaagctgcaattcgaagcagcgattctggcaaaaacattgtcacagagggtgtggaggcatctcttatctatgttcgcttcaaggcggctgctagcgagctaaaaccaatattaggtgaaattgaaagtagatcttctaggaaggagtacgcacagattctttctgagtgtcacagtttgttctgtgagcagcggctgtacttggtacgaggcatggtgcagcaacgaatcttggagtttgcaagaaaagaggccttgccttctttgacaaggtctggctgtgcctatctgatggaggcatgccagtttgagcaccagctttttgcccacttcttcccagcatctgctgctgatgtttctagtatggctcctttaatggaccctctgtgcacctacttgtatgatactctgaggcctagactgatatatgaaggaaacattgattctctttgcgaacttgttgatattctgaaagttgaagtgctgggggaacaactaagcagacgcggtgaatcagtagccggtctccgtccaatattgcaaaggatacttgcagatgttcatgagcggctagcattttgtgctcggactcatatccgtgaagagattgcaaatttccgtccttctgtcgaagatctagattatcctgggaaacttgaacgacctgtggatatgtcttcaagtgctactgttggtgacaactcagacatatatataacatggtacagaccattggagaaaacagtttcatgcctttcaaagctatatcgctgcttagagccttctgtcttcactggattagcccaggaagctgtagaagtttgctcaacatctcttcagaatgcaagcagggttatctcaaagaaagcaaccccaatggatggtcagctttttctgattaagcacctcctcattctacgagaacagattgctccatttgatattgagttctctgtcacacataaggagttggatttctcccatttattggatcacctaagaaggattctcaggggtcaggtctcattatttgattggtccaggtcaacatcactagctaggaccttttctcctcgtgttttggagaaccaaattgatgccagaaaagagttggagaaaagccttaaagctacctgtgaagagtttataatgtccataactaaattagtagttgacccaatgctttcttttgttactaaggtaactgccgtcaaagttgcattgtcctctggtagccagggtcagaaattagattcagttctagcaaaacctttgaagactcaagcttttgcttctcctgataaagttgctgagctagttcagaaggttgccgctgccattcaacaagatttgcccaaagtaatgaccaagatgaggttgtatttgcaaaatccatctactcggatgatcttattcaaacctatcaagacaaatatagttgaggctcatatacagctgcattcccttctgaagtcggagtactctagtgaagaaatgcaatccatcggtatgttgccgatacctgacctgcagtctcagcttgacagccttttgtagtttgcatacaccatacagcggcgctgctgtagtccatgttgacgttgcagtgcagttctttcaagtaacgcaagtaaagttgttaccacaatttcgaacctctctaccatatcgttgttgtaacttttcattgtttatattgaaaaatggaaatggaacgcctcccatgattcatgtgattgtggacaatctggaagtttgaactcatatcctgtggtgacttatgtatattgtacacgcacgttgtttcctcctctgaaattgactggaatagtttcaacagatcatgggttcatcctcttgtgagatctgcctatctgtggc

SEQ ID NO: 219729 - DNA, 835 bp, Zea Mays
gcattcccattctgtaatttcagatgctgttctgtatcgtgttatctcggtttggccatctttttaactatgatctgtagatgttgatattgcaacacatatagttgttgaagatgacggaccaaaaagaagcatactttacatagagaccgccgaccggcctggcctacttcttgagataatcaagatcatcgcggacacaaatattgatgtggaatcagctgagattgatactgaaggtttggttgcgaaggacaagtttcatgtaagttacagaggtggaaaactaaacagctccttatctcaggcgctgaccaattgcctgcgttattacctccgaaggcctgagacagatgaagacagctattgattgttgtgtttgtcgaaccttcctatagtgcattagaatcagaaactttggcttcagttccttcgctatgggccccttgtactgctgcaaatggagttttccattgtagctgataaagtgccgacaaggtgcatccatatgtgcataggtggcactgaatcggggctcactggaccagtttgatattgtagtaatatatatacagctgggagcaacataatttaggtttcgatcatcattatcccatttgattcctgttataagggatcacattggaaaaccctcacatgattgatgttgtctgtattctgtaagttggtgcaatccatttgcatgtaaaactcagctgcgtactgtggcgttctatgtagtggaataaataaaagagcattacgaaatcaccgagcagcttgctcctgctttccaatcagatgtgcttattgtttacagtcaattggaagagct

SEQ ID NO: 219730 - DNA, 1588 bp, Zea Mays
aaacaccccctctccttctctatctcctacagccaaatccccaactcttccaaccgctcctccgcttagcgtgcagatctaacgatcgctccgatcccaagcacaacaacttctccaattccaatcaccagccgatcagatttatgcagtcttactgccgcgagcgccagtcatgccgcgcggcagcagcttggaccagagcttgagcgacgacgagggctcggcaggtgttggggcggtttgggttcggcgtcgctggcaatgtccgggatgtccgactccgctgggggtgtgcgcgcgggcgcggagctgatggtgcagcagttccacctcaaggtgctccacgccgtcctcgccgtgcgcacgccgcgcccgcacgccttcgcggcgccagcggcggcgtcgttcaggcggagggacaggtggttccatctcccgctccacgacccgccgccgccgcccgaggcggctgaccgcctggacgagctggtccccggggagccgctggtggtggacgtcctcctgagccccgccggtagtgtgggagcccgaggggaggtggtggagaggtggactgtggcgtgcgagccctggccggacgccgcgggcggcgaggaggttgccgtgaaccgggcgtacaagcactgcttcacgctgctcagggcaaggacactaaagatggatctggcagattctctgcactctcctcatgcgattcaccacggcaagatgatctggatgatgtggattaccatttcgacgttgatgatgttgatactccagtctcccaacctcggagaattgatgggaaggaaacaggtgatcaggttggttcatcatcccataaatctcaagacgcacaagtaggttctctagtcaacctgctgagaaatgccagcccgctgcgaaatcctagcaattcatcacagatatcaagggccgagtccagcgaagtagcctcagcaagctcggtcacgtcccgcaggacatctgacgcccttgaggagctccagtccttcaaggagataagggagcgactgctgttccggagcagcgcaaaacatcaagagccaccaggaaaaccataaggccattctttgttttgtttctcttaacgtgatcgctgatagactcccaaccgggaaaccatatgcacagcgaactatagttgctgtgttcatgtatatacgagtgctaaagttgatgcttttgattgaagagaaggcaccggcttccatttatttcagcggaacaatcactcgtcgttctcaagagtgatggagtgatgccgctgttgatactcttttgtatatgggaagcgaaaccgatacacgtaggtgggagcgagggagcctgtgaattgtgatggatgaaagcaggtctcattgtgtgcgtgtgtttgtaaattatgtaactgctggaaatcaaatgttcattagacgtcaacctttgaagagttgctcgcacttcgcaagactagttttatttgctcttgctatttgatctggtaatttgtggattggcgacctgcaggctgcagttgtaaaaataactgtcagttttaaattataagatgttttgacttttt

SEQ ID NO: 219731 - DNA, 2166 bp, Zea Mays
acagccaaatccccaactcttccaaccgctcctccgcttagcgtgcagatctaacgatcgctccgatcccaagcacaacaacttctccaattccaatcaccagccgatcagatttatgcagtcttactgccgcgagcgccagtcatgccgcgcggcagcagcttggaccagagcttgagcgacgacgagggctcggcaggtgttggggcggtttgggttcggcgtcgctggcaatgtccgggatgtccgactccgctgggggtgtgcgcgcgggcgcggagctgatggtgcagcagttccacctcaaggtgctccacgccgtcctcgccgtgcgcacgccgcgcccgcacgccttcgcggcgccagcggcggcgtcgttcaggcggagggacaggtggttccatctcccgctccacgacccgccgccgccgcccgaggcggctgaccgcctggacgagctggtccccggggagccgctggtggtggacgtcctcctgagccccgccggtagtgtgggagcccgaggggaggtggtggagaggtggactgtggcgtgcgagccctggccggacgccgcgggcggcgaggaggttgccgtgaaccgggcgtacaagcactgcttcacgctgctcaggtccgtctacgccgtgctccgcgtcctcccggcgtaccgcatcttccgcctcctctgcgccaatccctcctacaactacgagatgggccaccgcgtcgacaccttcgccgagcccttctcgcgcccccaggaggccgccatgcgttcccaacgctttgttcccgtcgaaacccagctcggccgcctcgtcgtttccgtccagtaccttcccagcctcgccgccttcaacctcgagatcacctccctttcgccctccaagataatcccagactacgtcggcagcccagccgctgagcccatgcgcgccttcccggcctcgcttacagaagccacgggctccggcttcccaccatctaatcagcagcagcgcccgcacagctgggcttcgcctgtgttctggtcgcacacgccggcacaccaggccaggtgagcgagaggaggagccctgcacaccgccagaatatgctaccaccaccttcgacgagaagaggagacatgagggcagcaggtgctctacagtctccatctgagagtggccggttgattgggaggatggaggaacttcggatagctgatccatatgtgacctcgtcacccagacataagggcaaggacactaaagatggatctggcagattctctgcactctcctcatgcgattcaccacggcaagatgatctggatgatgtggattaccatttcgacgttgatgatgttgatactccagtctcccaacctcggagaattgatgggaaggaaacaggtgatcaggttggttcatcatcccataaatctcaagacgcacaagtaggttctctagtcaacctgctgagaaatgccagcccgctgcgaaatcctagcaattcatcacagatatcaagggccgagtccagcgaagtagcctcagcaagctcggtcacgtcccgcaggacatctgacgcccttgaggagctccagtccttcaaggagataagggagcgactgctgttccggagcagcgcaaaacatcaagagccaccaggaaaaccataaggccattctttgttttgtttctcttaacgtgatcgctgatagactcccaaccgggaaaccatatgcacagcgaactatagttgctgtgttcatgtatatacgagtgctaaagttgatgcttttgattgaagagaaggcaccggcttccatttatttcagcggaacaatcactcgtcgttctcaagagtgatggagtgatgccgctgttgatactcttttgtatatgggaagcgaaaccgatacacgtaggtgggagcgagggagcctgtgaattgtgatggatgaaagcaggtctcattgtgtgcgtgtgtttgtaaattatgtaactgctggaaatcaaatgttcattagacgtcaacctttgaagagttgctcgcacttcgcaagactagttttatttgctcttgctatttgatctggtaatttgtggattggcgacctgcaggctgcagttgtaaaaataactgtcagttttaaattataagatgttttgacttttt

SEQ ID NO: 219732 - DNA, 935 bp, Zea Mays
cacgggtcagataagcttttctctccccttcgcagctgcaaccgctcgccgcgtgctccctttgtactgaaccgcatcctccccgcgccgacctgctccggcgagttaaacatggccgtcctcctccgcagcacctccgccgccgcctcgactgctggcccctcctcggcgctgctcgccaccaccttccgccgctcccgcggctgccttctgccccgtgccgcgccgcagcgccgcttgtatgtggcccgcgcctcggcccagcccctcgaggtctgcgctaaggagtccatcaccatccctggccgcctcggagactgtcctttcacacagagggttttgttgactatagaggagaagcatctgccttatgatctgaagctagttgatctagctaataagccagattggttatttgaaatcaacccagaaggtaaagtgcctatcgtgaagctcgaggaaaaatggattggtgattctgatgttataacacaagcattagaggagaaataccctgaaccacccttggcaactccaccagaaaaagcttcagttggatcaaaaatattttccactttcattggtttcctcaaaagcaaagatccaagcgatggaacagaagaggcactacttaatgagcttacttcatttgatagttatctaaaagacaatggtccatttattaatggtggaataatttctgctgctgatctctctctgggtcctaaactatatcacatggagataactctgggccactacaagaattggtctgttccagattcactttcttatgtaaaaacatatatgaagtcgattttctcaatggattcttttgtcaaaactcaagctctgacagaggatgtaattgctggatggcgcccaaaagtcatgggttaaattcatttctaaagttagacgttaaggagagggag

SEQ ID NO: 219733 - DNA, 1238 bp, Zea Mays
cacgggtcagataagcttttctctccccttcgcagctgcaaccgctcgccgcgtgctccctttgtactgaaccgcatcctccccgcgccgacctgctccggcgagttaaacatggccgtcctcctccgcagcacctccgccgccgcctcgactgctggcccctcctcggcgctgctcgccaccaccttccgccgctcccgcggctgccttctgccccgtgccgcgccgcagcgccgcttgtatgtggcccgcgcctcggcccagcccctcgaggtctgcgctaaggagtccatcaccatccctggccgcctcggagactgtcctttcacacagagggttttgttgactatagaggagaagcatctgccttatgatctgaagctagttgatctagctaataagccagattggttatttgaaatcaacccagaaggtaaagtgcctatcgtgaagctcgaggaaaaatggattggtgattctgatgttataacacaagcattagaggagaaataccctgaaccacccttggcaactccaccagaaaaagcttcagttggatcaaaaatattttccactttcattggtttcctcaaaagcaaagatccaagcgatggaacagaagaggcactacttaatgagcttacttcatttgatagttatctaaaagacaatggtccatttattaatggtggaataatttctgctgctgatctctctctgggtcctaaactatatcacatggagataactctgggccactacaagaattggtctgttccagattcactttcttatgtaaaaacatatatgaagtcgattttctcaatggattcttttgtcaaaactcaagctctgacagaggatgtaattgctggatggcgcccaaaagtcatgggttaaattcatttctaaagttagacgttaaggtaaactgcataataagtgcatatatccccttttaatagaatgaataaatttggcatgcttagatttccttggttcgctattttgtgtctatggaaataatgatgacgggatacacacctcatgattacctagagaactggaaacatgggaggcttaagcttgtcgttggttaataagatgcaaaagtatatgtattatgtatttccaatgtatgtataactgcatttgtataaaaatacaaatacatttataaagaataatgaaatgtttagcgagccattgtgaggaattctgctatttgcttataatac

SEQ ID NO: 219734 - DNA, 2016 bp, Zea Mays
atggcaactaagatactgaagcagcttgacacattagtaccttcacagaaggaaaacacatcagaaacaaagcagaaacatgagagtgccatatatttcgaggaagatgtttctcgacaaaagaaagtacaagcagagagagatcttttggaaccttctccatcagaagtacctgatggtattgcatcgaacaaatcaatctcacaaattaccttgaacaaggaaaagcctccagccttttcttccagaggatttcaaaatcagttttgggaggaccagttacacagaaattagaaagcaagttaaatggagataatcaacgagtgccttccaagaattctggacaagttgcatctttcacaagtaatcctgtatttaaggttgatggccctgggcatgcgtcaaactctgttctctcagctgtacaatcttataatacatcaactggctcagtttcatttcaaagtgctggctcttctaccatctccactaacttaacttcaaacattacacagagctgttcaactggaggcagtttcactttctccaatactcgttttggtagtttatcggcaacctcaaatatgtttgcagcaaaatctttagcgttgtcttgtacagcaagccccggtgcttctttgggtttccctccagttcatactgcaagttctccagctgctcaccgcaaatctgaagcagcaaatagcagtatcagttttagttccatgcagcagtttggcattgcaggttcttccacagtgcaggacaaatccaaggcagtagacagcagtaccccttttggctttccccagaagtttgacaccgtgagttccgcttcagaggatatgtccaaggcagactctcctgagccgacatttttttctgggaatcataatgtgcaatcagaaaattgcagttccctgttcacacagagtccaggaaataatttgagttccaaatcttcagaaaatttgaactctggaagctcgcatagttttgcagattcaccagttggttcagcaacaatgtgctctagcccttcgaattcaaactctctgttttcttgggctgctggctcaggtgcaagaactgctccaccatcttcccctgctacaagctcatcttttgcttttagttccagtccagcattttcagcacaaccagtattcgccagcaaattgactacacctgcttcactttcatatggctcaccaaatactggccctgctacatcaccattcagctcaatgccaagcgctgtattttcattcacgtcagctactccttcaataccaaatccatcacccacaacaccaatatttggtgaccctactgtacagatgaatggagggaacatagttattgacaggaatgggtccccttcccctgcaacttcgccatttggcttgccaagcagctctccatcgactccaactttcagtacgcctgcaactcagtttgcttctagtacatcaggctcacctggagtttttgaaattggcaagtatagtcaagcttcttcaggtgggttctcaatgggccctagtggtggcaacgacaaatcaaacagaagaattgtcagagttaagagaaggaaatgaaataccaatatttttcaagttgctctgagcatttataagactaaggcaatcagcacgtagaactttttgtttcacatcatttgtctgcggtggcaatgagaatgagatgccattcttaaattgatgatcacaattctggcacagtagcagcaatggaactagccttttcgcgatacggtcgcccatgacattttgttgtacggtttgtcacaacaatgctataatgaaatatataggtacttctccaacttgtattaaacatgttcagcgatcaagctgccctttttttgtgcaattggatcctgaaactaaatttcatcctaataataataatttaggcacgccaattattattattgattatgcaggtgagatttatgtactatatttttttactgtggggagcgagtcaaat

SEQ ID NO: 219735 - DNA, 2793 bp, Zea Mays
atcgatttgatctcggcacggcccgcccgcatcctcttctccttccctgtcgctttttctgtctacagcttccatggcgctctctctctctgaatgaatactcctccatcttgccttcacctttttcctcctttttatatcaatatataaaatgttgaggttccagggcaaccagcgggtttgaagtttgaactcagtccctccccccgcaagctttctctctctctctctctctctctgatcaaatgtggcgagatctgtgtgagtaagcgtgaataccactacggtttttcgtcctccccttcccttcttgagctacttgagctactctggtcacttcttggagccggcaactgccagttgggggttttttaggacaaagggagcaaaaaaaaacgaacaccttcctgagcttaagacagcatggatcagtacgaggtgctggagcagatcggcaaaggagcatttggctctgccctgctggtcaggcacaagctggagaggaagaagtatgtgttgaaaaagatccgtcttgcgcgtcagacagaccgcactcgccggtccgcccaccaagagatgcagctcattgctaatgtgaggaatccattcattgtggagcacaaggattcatgggtggataagggttgctacgtctgcattgttatagggtactgcgagggaggagacatggctgaagctattaaaagggctaatgatacccacttttctgaggagaagctttgccagtggctagtgcagcttctcatggcccttgactatttgcatgcacatcacattcttcaccgtgatgtgaagtgctcgaatatatttctcactagggaccaaaacataagactcggaacaccaagttacatgtgcccagaactcctcgccgatataccttatggtaccaaatctgacatttggtcactaggatgctgcatgtatgaaatggctgcgctcaaacctgcttttagagcttttgatatgcaaaaccttatcaacaagattaccaagtcgatagtatcacctttgccaacaagatattctggtgcatttcgaagacttgttaggagcatgctacggagaagtccagagcataggccaagtgcagccgaactacttaagcatccacatctgcagccgtacgtcctgcaactccatctgaagtcacacctttctcgcagcatagttcctgttcaccagtctccaagcgagaagaggatgacattcgccgcagagcccgtttgcagaagcaagggcaggaggaactctttaggcagcgaaaggatgatagcagcctttagcaaaccttctcctgatagaagttctgtcagctctattcggagtgtcaaggacgactacaccgccacacagagtgtcagagagctatcggttgatgaaagcatggtcgaggttgctagtaaacccgtggcatcaaggacctcagatgtcatgaggactccgaaggcgactccgtggaagatgatgacgactctgaggaatcggctagaagctccacaagcatcatatgacagaacgagtcatacagagttttcaagaacaccggttgacaagaggaacagccgcgtggcccgcagagcatcgcttcctctgcccgtatttgagaccccgaagcagcgcagcagcatgagcgtcctggagcggctggagtcccccgacgtctccgtgaactcgcctcgcatcgacagaatcgccgagtttccgctagcttcgtgcgaggaccccttgttctcgaccgtgaagccaccgacacccgccagcgccagcgccagcgccacgcctccgttcgtggaccggtccatcaccaaggacaagtgcacggcccagacgctccggtccgcggcccacgacggtggcaacggcagaagcgaggacggcggcggtttgtcctcgggtcgcaccaccaccacggcagcgtcaagcggtgggacgtcggggtcgttgcagccgaaggggcggttcgacacgacgtcgtaccagcagcgcgcggaggcgctggagggcctgctggagttcagcgcgcagctgctgcagcaggagcggtacgaggagctcggggtcctgctgaggccgttcggccccgacgagatggtgtcccccagggagacggccatctggctcaccaagagcttcaaggaggcgatggccacgggcttgtagcggtggcctcctttcaccggcatggacggatcaggaattcaggatcgcccatcagccttgcaggctgtagacggccggatggcatcgccggtgctggcgtgtgtaggtcaggtaggtaggctatgagaattgagaagagagaggcgttagcgttgacggatcagttgttagttgctgggagtggacacaacaccatctcagtgttggccccccggtttattttgttactatgctagcagttcttagttagttaatggcgctctggctagctagctagtgatgtaccaatgcaacccccccccccccccccccccccccccagcagaattagtagcatcagggagtagcagtagaggtagagctggaggagtcttgagctaggaaggagaaggggattagtgagatataattcctatactgtgatgtagcccaagtatgtaccagtagcttcatatgcatcagtgctgactgctgaagaacattcagacatctatggattcagccattcaggccgattgctacgcttatctgcagttatttgctcctgcaatccaggagtgtggaatgggcgctgacactgttttggccttgccggtgcctccctcatat

SEQ ID NO: 219736 - DNA, 915 bp, Zea Mays
gcttgctaacgaacaaaactagatatctccgccactagcactgatggcgagaccgccccggtgcatcttaaggggcgagagggcaggggaaaagcagcagcagcaaaactggtcaggggccagcacaccgagatccaagcatttcactatcgagcaacggagaaggacaacgataaatgacaggtatgcatcttgactagctcgctgagggggatggcttggtggatctaatgttcgtttgcttgtatcgctactaggcctgctgttgatcgaaaggagcaagcgagcaacaccagtggactacccttgaaaattgtgacctggcaagtctaaaagccaccaagctgaggatcgcaagctttgtccacggttcagacggcctgaggatcgcaagcttcgtccacggttcagacggccactgtggatcgaggtgcggcaggtcggggcgccgccgcggattgtaggctcgaccgagactacttcgtcaccaacgtcctcgtatgttctcatatatgggtggaagataaagatttgtcctgggttgatggtgaggtatttcgaattgatggccaaaacgcccatgttcgcacaaccaaggggaaggcgggatggcgtattgtggcggctacgagggaccgatgttcctgtgtggcagtgacaacgataccgtggagccaaggcaatgtcagcaagctgatttttcagattggaatctatggttctttttaaagatcgaatatgttctagcatcttaaaaagatttgtcagaatgtaaacatttgttctgaggtcatttaggcctcaaacagaatttcttggacttatttcgttggagggaatgggacatcttgagatctaaatgtgtatagaagatccaaatgtgtatagaacatatatttttatgggtatcaaaca

SEQ ID NO: 219737 - DNA, 3260 bp, Zea Mays
gccgcaccttgccccgcatcacgcagtccaggcgcaattcctgctcgcgaaggtttcgggaaaggttgaacaccgcatttcgcctccggtgtctgtctgcctgcctggctcgtgctcctcggcgtcgccctcacccccatctcgaggccgccaccccgccgccatcctggctcaccccacgacgcaaatctgtgtgccgcccctcccctcccatatcgccatctctcctcccctccccggtcaccacccatacctcagccacctcggcggttgtgctaggggcgatggtggtggaggctgcggtcgcagctgtgttagtggaggagatgtggtggcggcagctagacagcatcgtgagcgcggtgtcgtttgggctcatgtccatgttccttgccattgccatcctcgagcacttcctccgccccctggcccacacgctcgagcacgcgccgccccgggggatccgccaccgcctcctcctcttcctcagccgtggcggtgagcgcagcgccgcccccagtttagatcttgaggcggcgacgaagcttcaagcccacgcgcccctcgagatggggccgatgcggacgcggatccgaaactggaccatggggccgacggggtggccgcgtggtgggtgtgggtcgcgctcaccgtctgcgttgatgtcgtcggcgtcggtctcgcgctcgtcgggttcctctactgaacaaggtttctagggattccccggtttctaggaattccgtcgtcgcttggcgctgccctgttatcgtaggtgtcgccagctgccggtcctgtggcccgtgcaggtgcagccatgcccttccatggtgtgccacaccagctctcggaggtgcacaagaagcgcacgctctaccatcccgagttgccctctgcctccaggtacgcacctcctcgttacggcggtcgaaatgttcatgaacgcgagctctcagaggtgtagaagaagcgcacgctcagaggtgcagaacagatacgcacctcctccagagtaagaattttctctgcttcccggttaggaagaaacaacattctgatttaatctgtattttttccaaacaaattgacatatctaggagcatttgttgcagcttttgagctctaattatttaaagttcaaacaactcaatctatttgattttaattgtaattacaacgcagtagtattgttctattgtcttattgtgagtggttcatggttcaaacttttttgacgccttaaaaaatttatatctccaactttttctttggtgcaaaatttggcccagtacagacaaaagcttttatgacatggtttagtagccatctgtttggcatttcgtttgttactcatccatcggacatgcatttggtcccaaaaaaaggttgtttgtcaggatgaagcttgctaacgaacaaaactagatatctccgccactagcactgatggcgagaccgccccggtgcatcttaaggggcgagagggcaggggaaaagcagcagcagcaaaactggtcaggggccagcacaccgagatccaagcatttcactatcgagcaacggagaaggacaacgataaatgacaggtatgcatcttgactagctcgctgagggggatggcttggtggatctaatgttcgtttgcttgtatcgctactaggcctgctgttgatcgaaaggagcaagcgagcaacaccagtggactacccttgaaaattgtgacctggcaagtctaaaagccaccaagctgaggatcgcaagctttgtccacggttcagacggcctgaggatcgcaagcttcgtccacggttcagacggccactgtggatcgaggtgcggcaggtcggggcgccgccgcggattgtaggctcgaccgagactacttcgtcaccaacgtcctcgtatgtaagagtgaaaattatttgcctattgccgacatacttatctaaagtccaacttcttatcaaataaagtatgtgaagatttacgtgtttttttttctgttttcataccaccatattacctccttaaatggttttcccaggttttagcaagcatcactataaagcacgagtgaaggttctcccaggttttaataagaatagctacaaagcctactctgaataaatttgtctagatgttttagtaggttcaactgtaaacatccaatagttaatgtacctaccacttttaagaaatcacttctttgagttgttcacttgttgtagaggttaatgccaccaatgctgggacagaaacaagtgagttgaagcaagatcgacagatttgataaaggttctcatatatgggtggaagataaagatttgtcctgggttgatggtgaggtatttcgaattgatggccaaaacgcccatgttcgcacaaccaaggggaaggcggtatgtgttgctctgcttttgaagtctgtcacaaaccctttttagtttgttttttagttcttcataatttcatagttctgtttctgacccagagtttctcgcacaaccaatgttgttaactgaatagttaaactgaataaaaggtatgatgtttcacatttttaattttaaaaattatttcttttattataggcaagaggttacctctattgaaggagatgacaggtgtctattattatagcagtaaatcatctttgttgctcctactacacccgttttgagctagaaatttcgtacttaatcaccattacaatatgacagaagtgtaggatatgcacaaaagcacttattgagttgagtggtaatatatactgccaactccaagggaatttgattttattactcaacgtttatgcctttcatttactaccttcattttttttccagaagtgtttagtgcatcaacattgttttcagtaaatgtctttgactgttgccttttattgctatatgtcgggccgttttgttgcgttgttgtgcacgcggttgtagggatggcgtattgtggcggctacgagggaccgatgttcctgtgtggcagtgacaacgataccgtggagccaaggcaatgtcagcaagctgatttttcagattggaatctatggttctttttaaagatcgaatatgttctagcatcttaaaaagatttgtcagaatgtaaacatttgttctgaggtcatttaggcctcaaacagaatttcttggacttatttcgttggagggaatgggacatcttgagatctaaatgtgtatagaagatccaaatgtgtatagaacatatatttttatgggtatcaaaca

SEQ ID NO: 219738 - DNA, 3884 bp, Zea Mays
gcgcatcccgccccgcccgcggccgcaccttgccccgcatcacgcagtccaggcgcaattcctgctcgcgaaggtttcgggaaaggttgaacaccgcatttcgcctccggtgtctgtctgcctgcctggctcgtgctcctcggcgtcgccctcacccccatctcgaggccgccaccccgccgccatcctggctcaccccacgacgcaaatctgtgtgccgcccctcccctcccatatcgccatctctcctcccctccccggtcaccacccatacctcagccacctcggcggttgtgctaggggcgatggtggtggaggctgcggtcgcagctgtgttagtggaggagatgtggtggcggcagctagacagcatcgtgagcgcggtgtcgtttgggctcatgtccatgttccttgccattgccatcctcgagcacttcctccgccccctggcccacacgctcgagcacgcgccgccccgggggatccgccaccgcctcctcctcttcctcagccgtggcggtgagcgcagcgccgcccccagtttagatcttgaggcggcgacgaagcttcaagcccacgcgcccctcgagatggggccgatgcggacgcggatccgaaactggaccatggggccgacggggtggccgcgtggtgggtgtgggtcgcgctcaccgtctgcgttgatgtcgtcggcgtcggtctcgcgctcgtcgggttcctctactgaacaaggtttctagggattccccggtttctaggaattccgtcgtcgcttggcgctgccctgttatcgtaggtgtcgccagctgccggtcctgtggcccgtgcaggtgcagccatgcccttccatggtgtgccacaccagctctcggaggtgcacaagaagcgcacgctctaccatcccgagttgccctctgcctccaggtacgcacctcctcgttacggcggtcgaaatgttcatgaacgcgagctctcagaggtgtagaagaagcgcacgctcagaggtgcagaacagatacgcacctcctccagagtaagaattttctctgcttcccggttaggaagaaacaacattctgatttaatctgtattttttccaaacaaattgacatatctaggagcatttgttgcagcttttgagctctaattatttaaagttcaaacaactcaatctatttgattttaattgtaattacaacgcagtagtattgttctattgtcttattgtgagtggttcatggttcaaacttttttgacgccttaaaaaatttatatctccaactttttctttggtgcaaaatttggcccagtacagacaaaagcttttatgacatggtttagtagccatctgtttggtaaatatttgttatttccatgtatggtaaccgatttctccaaagggatacatttgtagaactaatcatttactcttgatggtttgtaggcatttcgtttgttactcatccatcggacatgcatttggtcccaaaaaaaggttgtttgtcaggatgaagcttgctaacgaacaaaactagatatctccgccactagcactgatggcgagaccgccccggtgcatcttaaggggcgagagggcaggggaaaagcagcagcagcaaaactggtcaggggccagcacaccgagatccaagcatttcactatcgagcaacggagaaggacaacgataaatgacaggtatgcatcttgactagctcgctgagggggatggcttggtggatctaatgttcgtttgcttgtatcgctactaggcctgctgttgatcgaaaggagcaagcgagcaacaccagtggactacccttgaaaattgtgacctggcaagtctagtaagtgatgcttgcatcataatacattcacttgagactacatgaatgccccctaatattttagggatgaggcgacagggaatagccctttcactgtcttcatctacttttgttctccaggtttgcattctatttacgaattacattagcagtcattctttgaagtattgagtttctccatgttttcacatttatagcatgtcttagatgcatagtctagagaatttgattttattcttgttctaaatattgcatttgatggaacagaacgagaccttactacgttgcacttatccaaattgatcagaagttaattttaacatcataaagaaaatatctgatttacagatgtccgcccaaaacataccaccaggaaaatattgcacatattatccttccctctaaatctcatcaggtatgctgaacaggggcgcaaaacttctaaaaacattgtagcatgccttctctaaaactaagcttttttgttacttgttttttcaagacaagcggcacaaaacatagccaacattccagttgttacactcaaccaagtaaatatgatgacacgatggccatcttcctggcgctgcggtcgccgaagctggaggtgttgggcctcaccactaccttcggcaacgtccacaccgccctcgccacgcgcaacgcgctccacctggtgccgccgcctaccttccttcctctctctcccccaccctgctcgtctgttccacccactccgaccgcggctcacatttgcttctgatgtgtgtgcttgagctggaggctgttggcaggactgacatccctatggcagagggatcccatccaacgatcaagaaagccaccaagctgaggatcgcaagctttgtccacggttcagacggcctgaggatcgcaagcttcgtccacggttcagacggccactgtggatcgaggtgcggcaggtcggggcgccgccgcggattgtaggctcgaccgagactacttcgtcaccaacgtcctcgtataggttaatgccaccaatgctgggacagaaacaagtgagttgaagcaagatcgacagatttgataaaggttctcatatatgggtggaagataaagatttgtcctgggttgatggtgaggtatttcgaattgatggccaaaacgcccatgttcgcacaaccaaggggaaggcggtatgtgttgctctgcttttgaagtctgtcacaaaccctttttagtttgttttttagttcttcataatttcatagttctgtttctgacccagagtttctcgcacaaccaatgttgttaactgaatagttaaactgaataaaaggtatgatgtttcacatttttaattttaaaaattatttcttttattataggcaagaggttacctctattgaaggagatgacaggtgtctattattatagcagtaaatcatctttgttgctcctactacacccgttttgagctagaaatttcgtacttaatcaccattacaatatgacagaagtgtaggatatgcacaaaagcacttattgagttgagtggtaatatatactgccaactccaagggaatttgattttattactcaacgtttatgcctttcatttactaccttcattttttttccagaagtgtttagtgcatcaacattgttttcagtaaatgtctttgactgttgccttttattgctatatgtcgggccgttttgttgcgttgttgtgcacgcggttgtagggatggcgtattgtggcggctacgagggaccgatgttcctgtgtggcagtgacaacgataccgtggagccaaggcaatgtcagcaagctgatttttcagattggaatctatggttctttttaaagatcgaatatgttctagcatcttaaaaagatttgtcagaatgtaaacatttgttctgaggtcatttaggcctcaaacagaatttcttggacttatttcgttggagggaatgggacatcttgagatctaaatgtgtatagaagatccaaatgtgtatagaacatatatttttatgggtatcaaaca

SEQ ID NO: 219739 - DNA, 512 bp, Zea Mays
gccagctcatcagccgagtggttgtgccgtggaagctttcgtttaccgttcccatcccccgtcgtctctcctctccttcccactctcccacccgtcctccattgctcccttcctctctctcgcggagtcgctgcgatctagccaccgagcacgagcgtcctactcgccgcggaccttgctcatggccgcggggtcgatccgggtcaccatggaggtgggcgccgacggcgtcgcgctcatcaccatcgccaacccgcccgtcaacgcgctccaccccatcatcatcgcggggctcaaggacaagtacgcggaggccttgcgccgtgacgacgttaaggcaatcgtgctcactggtgctggaggcaagttctgtggaggatttgatatcaacgttttcacaaaggggatgtatcacttatgccggacgtatccgtcgagcttgtgtcaaacatgatggaagagggaaaaaaaccttctgttgcagccattcaaggtcttgcattgggtggtgg

SEQ ID NO: 219740 - DNA, 969 bp, Zea Mays
cttttaaatacaccaccagcccacggctgcccagctctctctgactctctctcgcgtcgggcacgcagtcgcacaagtagtgaactcaaacgggatctcctgctctgcctccctcgtcttcctctgcccgtgcgcgtttcagagcacgtacggagagggcgagcagcagcttgcggccgggcaccatcatgtggtggaggtgctggagaacctggcgttcctggcgaacgccagcaacctggtgacctacctgatggggttcatgcactactcgccgtcgcagtcggccacggcggtcaccaacttcatgggcacggccttcctgctcgcgctcctcggcggcttcctctccgacgccttcttcaccacctacaccatctacatcgccagcgccttcatcgagctcatggggctggtgatcctgacggtccaggcgcggacgcagtcgctgatgccgccgcagtgcgccaagccgggggctccgtgcgagcccgtgtcgggcgccaagaaggcgatgctgttcgcggggctgtacctcacggcgctgggcgtgggcgggatcaagggctccctcccctcccacggcgcggagcagttcgacgagcatgcggcgcgggggcgcaagggccgctccaccttcttcaactacttcgtcttctgcctctcctgcggcgccctcgtcgccgtcaccttcgccgtatgggtcgaggacaacaagggctggcagtgggggttcggcatctccaccatcgccatcctgctctccatcccgctcttcgtcgccggctccagccgctaccggaacaaggtgcccacggggagcccgctcaccaccatcgccaaggtcctcatcgccgccgcgctcgcgcgccgcggctgcgcgccgagctccagcaacggcgccgtcatcgaccgcgcgcccagccccacggggagcaccgacatgaaagagtactgcgagcccggggt

SEQ ID NO: 219741 - DNA, 860 bp, Zea Mays
cttttaaatacaccaccagcccacggctgcccagctctctctgactctctctcgcgtcgggcacgcagtcgcacaagtagtgaactcaaacgggatctcctgctctgcctccctcgtcttcctctgcccgtgcgcgtttcagagcacgtacggagagggcgagcagcagcttgcggccgggcaccatcatggaggacgtcgcgccgggtgcggagccgtgggaggggtacgtggactggaggaaccggccggcgaccaggtcccggcacggcggcatggccgccgcctccttcgtcctcggggctggtgatcctgacggtccaggcgcggacgcagtcgctgatgccgccgcagtgcgccaagccgggggctccgtgcgagcccgtgtcgggcgccaagaaggcgatgctgttcgcggggctgtacctcacggcgctgggcgtgggcgggatcaagggctccctcccctcccacggcgcggagcagttcgacgagcatgcggcgcgggggcgcaagggccgctccaccttcttcaactacttcgtcttctgcctctcctgcggcgccctcgtcgccgtcaccttcgccgtatgggtcgaggacaacaagggctggcagtgggggttcggcatctccaccatcgccatcctgctctccatcccgctcttcgtcgccggctccagccgctaccggaacaaggtgcccacggggagcccgctcaccaccatcgccaaggtcctcatcgccgccgcgctcgcgcgccgcggctgcgcgccgagctccagcaacggcgccgtcatcgaccgcgcgcccagccccacggggagcaccgacatgaaagagtactgcgagcccggggt

SEQ ID NO: 219742 - DNA, 1756 bp, Zea Mays
attctcttgcgttttgcgggcttcgttttggatttgtgggtggatctgatcggattttcgtggtttcccctctcccaattccgaagaatccagtcaggtgttcctggaggctaaggaggaaatcagcagctagcaacccagcaccggtagatctgaccccatctacctccctggaagtcaatgtttcggtgccaccccctccggctcctcctccagttcctcgccagaccgacgaggtcagggtccccgaagccgagcaggagcagagcaagcatgtcaccctggaggaggcccctgctgctgctgctgccccagcacaggcgtcggtgctgccacctggtgcgccaaccgaagagctcgccgcaatcaagatccagaccgccttccgaggttacctggcaaggagggcactaagagcactacgaggccttgtacgattgaagtcattggttgagggtaattcagttaagcgtcaatctgcaagcactctgcgctgtatgcaaactctatcgcgggtgcagtcacaaatacgatctaggagagcaaagatgtccgaggagaaccaggccctccaacgccagctcctacttaaacaggaactggagaatttcagaatgggtgagaactgggacgacagcactcaatccaaggagcaaatcgaggcaagcctaataagcaggcaagaggcagcgataagaagagaaagagctcttgcatatgcattttcacatcagtggaagagcacatcaagatctgcgaacccaatgtttgtagacccaaataacttgcagtggggctggagctggttggagcgctggatggcagcaaaaccttgggagggacgcaatgggaccgacaaggagagcaacattgatcgcggctccgtcaagaatatgagcttgaaccttggagttggagagggtgagatcacaaaagctttcaaccgccgggactcaaagccagagaagccatcaccaccgactccaaaaccggcccgtccagcttccaggcaatccccttcgacgccctctgctagagtggccccaatacctgcgaggaggaaatccagcacgccaaagaatgggctttcacaggtggacgatgacgtgaggagcgtgctcagtgtgcagtctgagcgaccaaggaggcacagcatagccacgacgtcgaccatgcgggacgatgagagcctcgcgagctccccgtcgctcccgagctacatggttcccacagaatctgcgagggccaaatctcgcacagcaacggccaatggcgcagagacgcctgagaaaggaggctctgctggaccagtcaagaagaggttgtctttccaaggtggagctgcggctgcctcaccgatgcgacggcattctggccctcccaaggtggagagcgctgtgaaggacattgctgcgccaccacagcctgaggccttggtagccaatggtggtggaagcaagtgacttgtattgacaagttccaggatgggggagcgggttatggtcttatggagggacatgtttcatccgtgaacagaagttaagagtggtgccggatctacgaatggtttgaattgttttcccgttacaaccacattgtttgctgtataagattcactgtacctgccagttggttccatttgttgttttctgtaaaacaaacatcaatttgtcactagaatctgtgatgcttgtatgtaaacaggtcctctatttatgtgagccatatatttcattttcagaagattccttgtgct

SEQ ID NO: 219743 - DNA, 5571 bp, Zea Mays
atcgaaactaacctttccaatctattcggcaggatctgctttgcgacgctgtcaaaggaactcgctcgaccaccgaaccccccttgccctagcgctccccgcctccgcctctcgccgccggcgagatgatccctgtcagcgccgatatccctgtggagctgcgcttccttctcgaatgcgccaccggctccaacttcgactccattcggctcgagctctgccagttagttgacagtggcttggatggatgcattttggtgctccgagtatgtctgaatcaaatgttgctaaatgctggggaggtcaagaacctccagttgcaacaaaagcttctatctgatgttttcagatattgtttacataagacctgcttcacaactagtttttgtgaggcgctggcaacgatagccttgacggatgattttcttgaaagcttgacaaatctgctggagctctcagttgctgagaaaattggtgttggacttgcgctgtcagattctgaggactcagagatgaagcaaaaagggcaatggttttcaattgctcaaattgaaaagctgtgtacgagtcatatccaatctctatcaaatggtcaaattcatgaaattgtcatgtttctgcatcagtctgatggcctgtcaaagcatatggacacttttaataatattatatctctactaaaagtcacggagaggccattttttgtacctgttacgaatggagattttgatagccaagcaaatccttcaagacatttggagatgtactttggtagcacaaatgatgattttgagtcacttctgtctgaaattgggaaagagataagcatggctgacattgtagccgagttaggttacggatttactgttgacagcactcactgtaaggaaatactttccattgtggagcctcttgatgatatcgccatatctaagttgcttggggctgttgtcggcactcatattggtcttggagaggcccataacacatatgcaacatttgtatctgctattcgtaatagccacacgaatgactcacctcagccgactaaatggaacacagatgtccttgtggactcaatcaatgaacttgccccaagtacaaactgggtgcgtgtaattgaatatcttgatcatgagggtttcaatatacctgatgaagcgagcttttatctattgatgtctatatacgagtgtgcttgcaaggatccatttccacttcatgctgtttgtgggtcattgtgggaaaacacagaaggccagatatcgttcttaaagcatgcagtttgtgctccatctgataaatttacatttgcacattcttctagacacctggcatttcaggacttggcaggccctagtcaaggcaatcatgcttggttctgccttgaccttctagaagttttatgccaactagctgaagttgggtacactgcatctgtacgatcaatgcttgagtatccactgggacattgccctgagctcttacttgttggtgttagccatatcagtaccgtgtataatcttctccaaaatgaagtactgtcctgcgtatttcctgctttactgaaggatccaacaaagcgcaatgtagtgaattatctctggcatacaaactcatatctcacacttcaaggttttgttgatgctcataatgatccagattgtttgctaagaattgttgatgtttgtcatgacttgaagattctgtcgactgtccttgattctactccatttgcattttccattaaattggctgctgcttccttgaggaaagactatagtaatcttgagaaatggctgactgaaaagctatctctttatggaaaaggttttgttgaggaatgtgtgaattttctgaaagcaactatgagcaacacagattacgtcttagagggcacgacacaacctcaatctattgtcagaaacatatattgggagtcttcttatgccttcataaaggtctacatggttctccagtctcactcggggcagctcttgtcagatgcaatattggatgaaataaggaaactgtgtgtttcgtttgaatcgaggaatcctagctctgctgtaagagagcttgctaattcagacggagggtcagatgacattgaagtagaggctaatgcatattttcaacacatgttctctggacagataagtgttgattccatgatacaaatgcttgggcgcttcaaagaatctacagataagagggaggtatcaattttcaactgtatgatctcaaatctttttaaagaatatacattcttccccaagtatcctgataagcagcttaagatagcagctgttctgtttggatctcttattaaacatcaacttgtggctcactccgaacttggaattgctctgcgtggtgttcgtgatgccttacgcaaacctgttgattcaaagatgtttatgtttggtacatcagcactggaacagtttatggaccgtgtcatagagtggccacgatactgtaattacatattgcagatctcacatcttcgtggaacacatttagaaatggtttctgttattgagagagccctagccaaaatctcctcaagtcaaaatgagccaaatgttggcaacctgctttctgcagagcagcatgtttctggttcatcatccatggaaggcatagaggcatctgaatcatcatggttgatgggtaccatcccaagtcaactaggaaggcctctttcttctcctttgcaacataggcagcagggtcttctctcggagaggtctgaggtttctatgaattcactgaataagagcaatttatccagtcagcctccccttgcttcatcgtctgctgatttgactattaattcaaagacaactgctccaccctctttactagcttcacctcatcagtctatcagtgtgtcaacgagtgtgcatgttggatttctgcgttctcgaagtaccccaggattaccgaggcagccttcatatactactggatttgggactgctttgaatatagagacgcttgttgcagcagcggaacaaagagatataccaattgagacacctccacctgaagttcaggacaagattctttttatgatcaacaatatatccatctcaaacatggaagctaaggcaaaggaatttaatgaggtcatacaggaacaacattatccttggtttgcacaatacatggtcatgaaaagggcaagcattgaaccaaatttccatgatctgtatttgaagttctttgataaattaaactcaaaatccttgaacaaggaaatgctgaaggctacgtatgagaactgcaaggtcttgttaagatcagaccttatcaaatctagttctgaggagcgttccttgctaaaaaacttaggcagctggttgggcaagttcaccattggtaggaaccaggcactaagggctaaggagattgacccaaaatctcttattgtggaggcgtacgagaaaggattgatgattgcggtcataccattcacttcaaagattcttgaaccttgccagtcaagtatcgcatatcgtcctccaaatccctggaccattggaattctaagtctacttgctgaaatttataatcttccaaacctgaagatgaatctgaaatttgatatcgaggttctgtttaagaatcttacagttgacatgaaggatgtgaaaccaacttccctgcttaaagatcgtctgcgcgaggtcgaaggaaatccggatttttcaaataaagatgttactacctctcaaacccctgtggttccagaagttcttccagggactattccttcatcaactcatgttgaactgcagcctgagatcaatattacatcccgagctatgagtcttccaaatatactcaatcagtatgtggctcctgtccgtctacccacaaacagcacggtagaagctgacaaagttgctctgatgatgcctgagcaagtgtcctccttgacccagcttatggcagctattccacgtgatgagatatgcttcaaaataaacccaaagcttggctcaattggtccacaattgcagtatagcaaaattatggatttggctttggataaggctaacagggagataatactccctgttattcaaagaagtgtgacaatagcaagccgaactacaaaagaacttatcctgaaggattatgcactggagtctgataacaatatgataactcgatctgcacatttgatggttggaacattagccggaagtcttgcccatgttacttgcaaggaacctcttcgtgtcgcactatattccaatcttcggaatctcattcaaaaccttatgagtggcagtgaaactatcgagcaaattattcacatgctagtcaacgataatctggatcttggctgtgccatcattgaggctgtggcaacacgtcaggctgttgaattgattgatgcagaaatagcccagtcattttcacaacaaaggaaacaaagagagggcggtggtcctacatatcatgaaacttttgcttatgctcaagggccgtttgctcgtgtacctgaagcattaagttctaagcctgggcatttatctgcttcccaacagagagtgtacgaggactttgttcatgtatggcatccccacaatcaaaatgtgggagctacaggttctggtctgtctggtgttgctactgtctcgagtactcttggtgtacttcgagcttacagtccaaattcgacatcagcatcctccagtaatttgtcaactgtccatatgggtggactaacatgtataactcagccgacagaactggggtctgaggatactgttatcgcacaatttttgagtaatcctgcccaagttggaccaagcgagtctcctgtcctatttagtggaacagttggtgctgcatctacattttctccattggcatctaatgaccttcctgaaataagtgctatggtgccccctccatcaacatctgctgatcgtctgggatctattttacctgaacctttgaatactggggatgctttggagagatacaaacaggttgctcagaagctggaagccttgattgctaatgatggtaaacatgtggaaattcagtctgttattgcagaagttcctgatatgttacgccggtgtgttagccgtgatgaggctgcattagtagtagcgcaaaaggttttcaaaagtttgtacgataatgcatcaaatagtgcttatgtctcctggcttctagcaaccttaattgcaatacgagatgtctgcaagcttgttgtcaaagagttaacaagttgggtaatatattcagatgaagagaagaagtttaacattgaaatcatttttggccttattcattccaagttgctgaatcttggggagtacaacgttcatttgacaaagctaattgatgggggaagaaataaggttgcaacggagtttgcaatgtctcttgtccaaacattgattacacaagatcctgttagcatatcagagcttcacaatgttgttgatgcaatatcgaaagtggcagtcctgttttctgagtggtgtcagatatgtagtcatgtaaatgctagtgatgcaatatacagtcgttttgtca

SEQ ID NO: 219744 - DNA, 5681 bp, Zea Mays
cgaggatcgaaactaacctttccaatctattcggcaggatctgctttgcgacgctgtcaaaggaactcgctcgaccaccgaaccccccttgccctagcgctccccgcctccgcctctcgccgccggcgagatgatccctgtcagcgccgatatccctgtggagctgcgcttccttctcgaatgcgccaccggctccaacttcgactccattcggctcgagctctgccagttagttgacagtggcttggatggatgcattttggtgctccgagtatgtctgaatcaaatgttgctaaatgctggggaggtcaagaacctccagttgcaacaaaagcttctatctgatgttttcagatattgtttacataagacctgcttcacaactagtttttgtgaggcgctggcaacgatagccttgacggatgattttcttgaaagcttgacaaatctgctggagctctcagttgctgagaaaattggtgttggacttgcgctgtcagattctgaggactcagagatgaagcaaaaaggtagtcatttctgtatggtcattgatatcgcctcttctgttccagggcaatggttttcaattgctcaaattgaaaagctgtgtacgagtcatatccaatctctatcaaatggtcaaattcatgaaattgtcatgtttctgcatcagtctgatggcctgtcaaagcatatggacacttttaataatattatatctctactaaaagtcacggagaggccattttttgtacctgttacgaatggagattttgatagccaagcaaatccttcaagacatttggagatgtactttggtagcacaaatgatgattttgagtcacttctgtctgaaattgggaaagagataagcatggctgacattgtagccgagttaggttacggatttactgttgacagcactcactgtaaggaaatactttccattgtggagcctcttgatgatatcgccatatctaagttgcttggggctgttgtcggcactcatattggtcttggagaggcccataacacatatgcaacatttgtatctgctattcgtaatagccacacgaatgactcacctcagccgactaaatggaacacagatgtccttgtggactcaatcaatgaacttgccccaagtacaaactgggtgcgtgtaattgaatatcttgatcatgagggtttcaatatacctgatgaagcgagcttttatctattgatgtctatatacgagtgtgcttgcaaggatccatttccacttcatgctgtttgtgggtcattgtgggaaaacacagaaggccagatatcgttcttaaagcatgcagtttgtgctccatctgataaatttacatttgcacattcttctagacacctggcatttcaggacttggcaggccctagtcaaggcaatcatgcttggttctgccttgaccttctagaagttttatgccaactagctgaagttgggtacactgcatctgtacgatcaatgcttgagtatccactgggacattgccctgagctcttacttgttggtgttagccatatcagtaccgtgtataatcttctccaaaatgaagtactgtcctgcgtatttcctgctttactgaaggatccaacaaagcgcaatgtagtgaattatctctggcatacaaactcatatctcacacttcaaggttttgttgatgctcataatgatccagattgtttgctaagaattgttgatgtttgtcatgacttgaagattctgtcgactgtccttgattctactccatttgcattttccattaaattggctgctgcttccttgaggaaagactatagtaatcttgagaaatggctgactgaaaagctatctctttatggaaaaggttttgttgaggaatgtgtgaattttctgaaagcaactatgagcaacacagattacgtcttagagggcacgacacaacctcaatctattgtcagaaacatatattgggagtcttcttatgccttcataaaggttctccagtctcactcggggcagctcttgtcagatgcaatattggatgaaataaggaaactgtgtgtttcgtttgaatcgaggaatcctagctctgctgtaagagagcttgctaattcagacggagggtcagatgacattgaagtagaggctaatgcatattttcaacacatgttctctggacagataagtgttgattccatgatacaaatgcttgggcgcttcaaagaatctacagataagagggaggtatcaattttcaactgtatgatctcaaatctttttaaagaatatacattcttccccaagtatcctgataagcagcttaagatagcagctgttctgtttggatctcttattaaacatcaacttgtggctcactccgaacttggaattgctctgcgtggtgttcgtgatgccttacgcaaacctgttgattcaaagatgtttatgtttggtacatcagcactggaacagtttatggaccgtgtcatagagtggccacgatactgtaattacatattgcagatctcacatcttcgtggaacacatttagaaatggtttctgttattgagagagccctagccaaaatctcctcaagtcaaaatgagccaaatgttggcaacctgctttctgcagagcagcatgtttctggttcatcatccatggaaggcatagaggcatctgaatcatcatggttgatgggtaccatcccaagtcaactaggaaggcctctttcttctcctttgcaacataggcagcagggtcttctctcggagaggtctgaggtttctatgaattcactgaataagagcaatttatccagtcagcctccccttgcttcatcgtctgctgatttgactattaattcaaagacaactgctccaccctctttactagcttcacctcatcagtctatcagtgtgtcaacgagtgtgcatgttggatttctgcgttctcgaagtaccccaggattaccgaggcagccttcatatactactggatttgggactgctttgaatatagagacgcttgttgcagcagcggaacaaagagatataccaattgagacacctccacctgaagttcaggacaagattctttttatgatcaacaatatatccatctcaaacatggaagctaaggcaaaggaatttaatgaggtcatacaggaacaacattatccttggtttgcacaatacatggtcatgaaaagggcaagcattgaaccaaatttccatgatctgtatttgaagttctttgataaattaaactcaaaatccttgaacaaggaaatgctgaaggctacgtatgagaactgcaaggtcttgttaagatcagaccttatcaaatctagttctgaggagcgttccttgctaaaaaacttaggcagctggttgggcaagttcaccattggtaggaaccaggcactaagggctaaggagattgacccaaaatctcttattgtggaggcgtacgagaaaggattgatgattgcggtcataccattcacttcaaagattcttgaaccttgccagtcaagtatcgcatatcgtcctccaaatccctggaccattggaattctaagtctacttgctgaaatttataatcttccaaacctgaagatgaatctgaaatttgatatcgaggttctgtttaagaatcttacagttgacatgaaggatgtgaaaccaacttccctgcttaaagatcgtctgcgcgaggtcgaaggaaatccggatttttcaaataaagatgttactacctctcaaacccctgtggttccagaagttcttccagggactattccttcatcaactcatgttgaactgcagcctgagatcaatattacatcccgagctatgagtcttccaaatatactcaatcagtatgtggctcctgtccgtctacccacaaacagcacggtagaagctgacaaagttgctctgatgatgcctgagcaagtgtcctccttgacccagcttatggcagctattccacgtgatgagatatgcttcaaaataaacccaaagcttggctcaattggtccacaattgcagtatagcaaaattatggatttggctttggataaggctaacagggagataatactccctgttattcaaagaagtgtgacaatagcaagccgaactacaaaagaacttatcctgaaggattatgcactggagtctgataacaatatgataactcgatctgcacatttgatggttggaacattagccggaagtcttgcccatgttacttgcaaggaacctcttcgtgtcgcactatattccaatcttcggaatctcattcaaaaccttatgagtggcagtgaaactatcgagcaaattattcacatgctagtcaacgataatctggatcttggctgtgccatcattgaggctgtggcaacacgtcaggctgttgaattgattgatgcagaaatagcccagtcattttcacaacaaaggaaacaaagagagggcggtggtcctacatatcatgaaacttttgcttatgctcaagggccgtttgctcgtgtacctgaagcattaagttctaagcctgggcatttatctgcttcccaacagagagtgtacgaggactttgttcatgtatggcatccccacaatcaaaatgtgggagctacaggttctggtctgtctggtgttgctactgtctcgagtactcttggtgtacttcgagcttacagtccaaattcgacatcagcatcctccagtaatttgtcaactgtccatatgggtggactaacatgtataactcagccgacagaactggggtctgaggatactgttatcgcacaatttttgagtaatcctgcccaagttggaccaagcgagtctcctgtcctatttagtggaacagttggtgctgcatctacattttctccattggcatctaatgaccttcctgaaataagtgctatggtgccccctccatcaacatctgctgatcgtctgggatctattttacctgaacctttgaatactggggatgctttggagagatacaaacaggttgctcagaagctggaagccttgattgctaatgatggtaaacatgtggaaattcagtctgttattgcagaagttcctgatatgttacgccggtgtgttagccgtgatgaggctgcattagtagtagcgcaaaaggttttcaaaagtttgtacgataatgcatcaaatagtgcttatgtctcctggcttctagcaaccttaattgcaatacgagatgtctgcaagcttgttgtcaaagagttaacaagttgggtaatatattcagatgaagagaagaagtttaacattgaaatcatttttggccttattcattccaagttgctgaatcttggggagtacaacgttcatttgacaaagctaattgatgggggaagaaataaggttgcaacggagtttgcaatgtctcttgtccaaacattgattacacaagatcctgttagcatatcagagcttcacaatgttgttgatgcaatatcgaaagttctagctgcccaggtaaacaaagaggaaagcattgctaatgaaactacactaattgatccaaatcaggtggcagtcctgttttctgagtggtgtcagatatgtagtcatgtaaatgctagtgatgcaatatacagtcgttttgtca

SEQ ID NO: 219745 - DNA, 5540 bp, Zea Mays
ctttccaatctattcggcaggatctgctttgcgacgctgtcaaaggaactcgctcgaccaccgaaccccccttgccctagcgctccccgcctccgcctctcgccgccggcgagatgatccctgtcagcgccgatatccctgtggagctgcgcttccttctcgaatgcgccaccggctccaacttcgactccattcggctcgagctctgccagttagttgacagtggcttggatggatgcattttggtgctccgagtatgtctgaatcaaatgttgctaaatgctggggaggtcaagaacctccagttgcaacaaaagcttctatctgatgttttcagatattgtttacataagacctgcttcacaactagtttttgtgaggcgctggcaacgatagccttgacggatgattttcttgaaagcttgacaaatctgctggagctctcagttgctgagaaaattggtgttggacttgcgctgtcagattctgaggactcagagatgaagcaaaaagggcaatggttttcaattgctcaaattgaaaagctgtgtacgagtcatatccaatctctatcaaatggtcaaattcatgaaattgtcatgtttctgcatcagtctgatggcctgtcaaagcatatggacacttttaataatattatatctctactaaaagtcacggagaggccattttttgtacctgttacgaatggagattttgatagccaagcaaatccttcaagacatttggagatgtactttggtagcacaaatgatgattttgagtcacttctgtctgaaattgggaaagagataagcatggctgacattgtagccgagttaggttacggatttactgttgacagcactcactgtaaggaaatactttccattgtggagcctcttgatgatatcgccatatctaagttgcttggggctgttgtcggcactcatattggtcttggagaggcccataacacatatgcaacatttgtatctgctattcgtaatagccacacgaatgactcacctcagccgactaaatggaacacagatgtccttgtggactcaatcaatgaacttgccccaagtacaaactgggtgcgtgtaattgaatatcttgatcatgagggtttcaatatacctgatgaagcgagcttttatctattgatgtctatatacgagtgtgcttgcaaggatccatttccacttcatgctgtttgtgggtcattgtgggaaaacacagaaggccagatatcgttcttaaagcatgcagtttgtgctccatctgataaatttacatttgcacattcttctagacacctggcatttcaggacttggcaggccctagtcaaggcaatcatgcttggttctgccttgaccttctagaagttttatgccaactagctgaagttgggtacactgcatctgtacgatcaatgcttgagtatccactgggacattgccctgagctcttacttgttggtgttagccatatcagtaccgtgtataatcttctccaaaatgaagtactgtcctgcgtatttcctgctttactgaaggatccaacaaagcgcaatgtagtgaattatctctggcatacaaactcatatctcacacttcaaggttttgttgatgctcataatgatccagattgtttgctaagaattgttgatgtttgtcatgacttgaagattctgtcgactgtccttgattctactccatttgcattttccattaaattggctgctgcttccttgaggaaagactatagtaatcttgagaaatggctgactgaaaagctatctctttatggaaaaggttttgttgaggaatgtgtgaattttctgaaagcaactatgagcaacacagattacgtcttagagggcacgacacaacctcaatctattgtcagaaacatatattgggagtcttcttatgccttcataaagtctcactcggggcagctcttgtcagatgcaatattggatgaaataaggaaactgtgtgtttcgtttgaatcgaggaatcctagctctgctgtaagagagcttgctaattcagacggagggtcagatgacattgaagtagaggctaatgcatattttcaacacatgttctctggacagataagtgttgattccatgatacaaatgcttgggcgcttcaaagaatctacagataagagggaggtatcaattttcaactgtatgatctcaaatctttttaaagaatatacattcttccccaagtatcctgataagcagcttaagatagcagctgttctgtttggatctcttattaaacatcaacttgtggctcactccgaacttggaattgctctgcgtggtgttcgtgatgccttacgcaaacctgttgattcaaagatgtttatgtttggtacatcagcactggaacagtttatggaccgtgtcatagagtggccacgatactgtaattacatattgcagatctcacatcttcgtggaacacatttagaaatggtttctgttattgagagagccctagccaaaatctcctcaagtcaaaatgagccaaatgttggcaacctgctttctgcagagcagcatgtttctggttcatcatccatggaaggcatagaggcatctgaatcatcatggttgatgggtaccatcccaagtcaactaggaaggcctctttcttctcctttgcaacataggcagcagggtcttctctcggagaggtctgaggtttctatgaattcactgaataagagcaatttatccagtcagcctccccttgcttcatcgtctgctgatttgactattaattcaaagacaactgctccaccctctttactagcttcacctcatcagtctatcagtgtgtcaacgagtgtgcatgttggatttctgcgttctcgaagtaccccaggattaccgaggcagccttcatatactactggatttgggactgctttgaatatagagacgcttgttgcagcagcggaacaaagagatataccaattgagacacctccacctgaagttcaggacaagattctttttatgatcaacaatatatccatctcaaacatggaagctaaggcaaaggaatttaatgaggtcatacaggaacaacattatccttggtttgcacaatacatggtcatgaaaagggcaagcattgaaccaaatttccatgatctgtatttgaagttctttgataaattaaactcaaaatccttgaacaaggaaatgctgaaggctacgtatgagaactgcaaggtcttgttaagatcagaccttatcaaatctagttctgaggagcgttccttgctaaaaaacttaggcagctggttgggcaagttcaccattggtaggaaccaggcactaagggctaaggagattgacccaaaatctcttattgtggaggcgtacgagaaaggattgatgattgcggtcataccattcacttcaaagattcttgaaccttgccagtcaagtatcgcatatcgtcctccaaatccctggaccattggaattctaagtctacttgctgaaatttataatcttccaaacctgaagatgaatctgaaatttgatatcgaggttctgtttaagaatcttacagttgacatgaaggatgtgaaaccaacttccctgcttaaagatcgtctgcgcgaggtcgaaggaaatccggatttttcaaataaagatgttactacctctcaaacccctgtggttccagaagttcttccagggactattccttcatcaactcatgttgaactgcagcctgagatcaatattacatcccgagctatgagtcttccaaatatactcaatcagtatgtggctcctgtccgtctacccacaaacagcacggtagaagctgacaaagttgctctgatgatgcctgagcaagtgtcctccttgacccaggttttgccagcacaaacacaatcaccatcaccatctccattctctgttaatcagcttatggcagctattccacgtgatgagatatgcttcaaaataaacccaaagcttggctcaattggtccacaattgcagtatagcaaaattatggatttggctttggataaggctaacagggagataatactccctgttattcaaagaagtgtgacaatagcaagccgaactacaaaagaacttatcctgaaggattatgcactggagtctgataacaatatgataactcgatctgcacatttgatggttggaacattagccggaagtcttgcccatgttacttgcaaggaacctcttcgtgtcgcactatattccaatcttcggaatctcattcaaaaccttatgagtggcagtgaaactatcgagcaaattattcacatgctagtcaacgataatctggatcttggctgtgccatcattgaggctgtggcaacacgtcaggctgttgaattgattgatgcagaaatagcccagtcattttcacaacaaaggaaacaaagagagggcggtggtcctacatatcatgaaacttttgcttatgctcaagggccgtttgctcgtgtacctgaagcattaagttctaagcctgggcatttatctgcttcccaacagagagtgtacgaggactttgttcatgtatggcatccccacaatcaaaatgtgggagctacaggttctggtctgtctggtgttgctactgtctcgagtactcttggtgtacttcgagcttacagtccaaattcgacatcagcatcctccagtaatttgtcaactgtccatatgggtggactaacatgtataactcagccgacagaactggggtctgaggatactgttatcgcacaatttttgagtaatcctgcccaagttggaccaagcgagtctcctgtcctatttagtggaacagttggtgctgcatctacattttctccattggcatctaatgaccttcctgaaataagtgctatggtgccccctccatcaacatctgctgatcgtctgggatctattttacctgaacctttgaatactggggatgctttggagagatacaaacaggttgctcagaagtctgttattgcagaagttcctgatatgttacgccggtgtgttagccgtgatgaggctgcattagtagtagcgcaaaaggttttcaaaagtttgtacgataatgcatcaaatagtgcttatgtctcctggcttctagcaaccttaattgcaatacgagatgtctgcaagcttgttgtcaaagagttaacaagttgggtaatatattcagatgaagagaagaagtttaacattgaaatcatttttggccttattcattccaagttgctgaatcttggggagtacaacgttcatttgacaaagctaattgatgggggaagaaataaggttgcaacggagtttgcaatgtctcttgtccaaacattgattacacaagatcctgttagcatatcagagcttcacaatgttgttgatgcaatatcgaaagttctagctgcccaggtaaacaaagaggaaagcattgctaatgaaactacactaattgatccaaatcag

SEQ ID NO: 219746 - DNA, 5557 bp, Zea Mays
cgaggatcgaaactaacctttccaatctattcggcaggatctgctttgcgacgctgtcaaaggaactcgctcgaccaccgaaccccccttgccctagcgctccccgcctccgcctctcgccgccggcgagatgatccctgtcagcgccgatatccctgtggagctgcgcttccttctcgaatgcgccaccggctccaacttcgactccattcggctcgagctctgccagttagttgacagtggcttggatggatgcattttggtgctccgagtatgtctgaatcaaatgttgctaaatgctggggaggtcaagaacctccagttgcaacaaaagcttctatctgatgttttcagatattgtttacataagacctgcttcacaactagtttttgtgaggcgctggcaacgatagccttgacggatgattttcttgaaagcttgacaaatctgctggagctctcagttgctgagaaaattggtgttggacttgcgctgtcagattctgaggactcagagatgaagcaaaaaggtagtcatttctgtatggtcattgatatcgcctcttctgttccagggcaatggttttcaattgctcaaattgaaaagctgtgtacgagtcatatccaatctctatcaaatggtcaaattcatgaaattgtcatgtttctgcatcagtctgatggcctgtcaaagcatatggacacttttaataatattatatctctactaaaagtcacggagaggccattttttgtacctgttacgaatggagattttgatagccaagcaaatccttcaagacatttggagatgtactttggtagcacaaatgatgattttgagtcacttctgtctgaaattgggaaagagataagcatggctgacattgtagccgagttaggttacggatttactgttgacagcactcactgtaaggaaatactttccattgtggagcctcttgatgatatcgccatatctaagttgcttggggctgttgtcggcactcatattggtcttggagaggcccataacacatatgcaacatttgtatctgctattcgtaatagccacacgaatgactcacctcagccgactaaatggaacacagatgtccttgtggactcaatcaatgaacttgccccaagtacaaactgggtgcgtgtaattgaatatcttgatcatgagggtttcaatatacctgatgaagcgagcttttatctattgatgtctatatacgagtgtgcttgcaaggatccatttccacttcatgctgtttgtgggtcattgtgggaaaacacagaaggccagatatcgttcttaaagcatgcagtttgtgctccatctgataaatttacatttgcacattcttctagacacctggcatttcaggacttggcaggccctagtcaaggcaatcatgcttggttctgccttgaccttctagaagttttatgccaactagctgaagttgggtacactgcatctgtacgatcaatgcttgagtatccactgggacattgccctgagctcttacttgttggtgttagccatatcagtaccgtgtataatcttctccaaaatgaagtactgtcctgcgtatttcctgctttactgaaggatccaacaaagcgcaatgtagtgaattatctctggcatacaaactcatatctcacacttcaaggttttgttgatgctcataatgatccagattgtttgctaagaattgttgatgtttgtcatgacttgaagattctgtcgactgtccttgattctactccatttgcattttccattaaattggctgctgcttccttgaggaaagactatagtaatcttgagaaatggctgactgaaaagctatctctttatggaaaaggttttgttgaggaatgtgtgaattttctgaaagcaactatgagcaacacagattacgtcttagagggcacgacacaacctcaatctattgtcagaaacatatattgggagtcttcttatgccttcataaaggttctccagtctcactcggggcagctcttgtcagatgcaatattggatgaaataaggaaactgtgtgtttcgtttgaatcgaggaatcctagctctgctgtaagagagcttgctaattcagacggagggtcagatgacattgaagtagaggctaatgcatattttcaacacatgttctctggacagataagtgttgattccatgatacaaatgcttgggcgcttcaaagaatctacagataagagggaggtatcaattttcaactgtatgatctcaaatctttttaaagaatatacattcttccccaagtatcctgataagcagcttaagatagcagctgttctgtttggatctcttattaaacatcaacttgtggctcactccgaacttggaattgctctgcgtggtgttcgtgatgccttacgcaaacctgttgattcaaagatgtttatgtttggtacatcagcactggaacagtttatggaccgtgtcatagagtggccacgatactgtaattacatattgcagatctcacatcttcgtggaacacatttagaaatggtttctgttattgagagagccctagccaaaatctcctcaagtcaaaatgagccaaatgttggcaacctgctttctgcagagcagcatgtttctggttcatcatccatggaaggcatagaggcatctgaatcatcatggttgatgggtaccatcccaagtcaactaggaaggcctctttcttctcctttgcaacataggcagcagggtcttctctcggagaggtctgaggtttctatgaattcactgaataagagcaatttatccagtcagcctccccttgcttcatcgtctgctgatttgactattaattcaaagacaactgctccaccctctttactagcttcacctcatcagtctatcagtgtgtcaacgagtgtgcatgttggatttctgcgttctcgaagtaccccaggattaccgaggcagccttcatatactactggatttgggactgctttgaatatagagacgcttgttgcagcagcggaacaaagagatataccaattgagacacctccacctgaagttcaggacaagattctttttatgatcaacaatatatccatctcaaacatggaagctaaggcaaaggaatttaatgaggtcatacaggaacaacattatccttggtttgcacaatacatggtcatgaaaagggcaagcattgaaccaaatttccatgatctgtatttgaagttctttgataaattaaactcaaaatccttgaacaaggaaatgctgaaggctacgtatgagaactgcaaggtcttgttaagatcagaccttatcaaatctagttctgaggagcgttccttgctaaaaaacttaggcagctggttgggcaagttcaccattggtaggaaccaggcactaagggctaaggagattgacccaaaatctcttattgtggaggcgtacgagaaaggattgatgattgcggtcataccattcacttcaaagattcttgaaccttgccagtcaagtatcgcatatcgtcctccaaatccctggaccattggaattctaagtctacttgctgaaatttataatcttccaaacctgaagatgaatctgaaatttgatatcgaggttctgtttaagaatcttacagttgacatgaaggatgtgaaaccaacttccctgcttaaagatcgtctgcgcgaggtcgaaggaaatccggatttttcaaataaagatgttactacctctcaaacccctgtggttccagaagttcttccagggactattccttcatcaactcatgttgaactgcagcctgagatcaatattacatcccgagctatgagtcttccaaatatactcaatcagtatgtggctcctgtccgtctacccacaaacagcacggtagaagctgacaaagttgctctgatgatgcctgagcaagtgtcctccttgacccagcttatggcagctattccacgtgatgagatatgcttcaaaataaacccaaagcttggctcaattggtccacaattgcagtatagcaaaattatggatttggctttggataaggctaacagggagataatactccctgttattcaaagaagtgtgacaatagcaagccgaactacaaaagaacttatcctgaaggattatgcactggagtctgataacaatatgataactcgatctgcacatttgatggttggaacattagccggaagtcttgcccatgttacttgcaaggaacctcttcgtgtcgcactatattccaatcttcggaatctcattcaaaaccttatgagtggcagtgaaactatcgagcaaattattcacatgctagtcaacgataatctggatcttggctgtgccatcattgaggctgtggcaacacgtcaggctgttgaattgattgatgcagaaatagcccagtcattttcacaacaaaggaaacaaagagagggcggtggtcctacatatcatgaaacttttgcttatgctcaagggccgtttgctcgtgtacctgaagcattaagttctaagcctgggcatttatctgcttcccaacagagagtgtacgaggactttgttcatgtatggcatccccacaatcaaaatgtgggagctacaggttctggtctgtctggtgttgctactgtctcgagtactcttggtgtacttcgagcttacagtccaaattcgacatcagcatcctccagtaatttgtcaactgtccatatgggtggactaacatgtataactcagccgacagaactggggtctgaggatactgttatcgcacaatttttgagtaatcctgcccaagttggaccaagcgagtctcctgtcctatttagtggaacagttggtgctgcatctacattttctccattggcatctaatgaccttcctgaaataagtgctatggtgccccctccatcaacatctgctgatcgtctgggatctattttacctgaacctttgaatactggggatgctttggagagatacaaacaggttgctcagaagtctgttattgcagaagttcctgatatgttacgccggtgtgttagccgtgatgaggctgcattagtagtagcgcaaaaggttttcaaaagtttgtacgataatgcatcaaatagtgcttatgtctcctggcttctagcaaccttaattgcaatacgagatgtctgcaagcttgttgtcaaagagttaacaagttgggtaatatattcagatgaagagaagaagtttaacattgaaatcatttttggccttattcattccaagttgctgaatcttggggagtacaacgttcatttgacaaagctaattgatgggggaagaaataaggttgcaacggagtttgcaatgtctcttgtccaaacattgattacacaagatcctgttagcatatcagagcttcacaatgttgttgatgcaatatcgaaagttctagctgcccaggtaaacaaagaggaaagcattgctaatgaaactacactaattgatccaaatcag

SEQ ID NO: 219747 - DNA, 5671 bp, Zea Mays
cgaggatcgaaactaacctttccaatctattcggcaggatctgctttgcgacgctgtcaaaggaactcgctcgaccaccgaaccccccttgccctagcgctccccgcctccgcctctcgccgccggcgagatgatccctgtcagcgccgatatccctgtggagctgcgcttccttctcgaatgcgccaccggctccaacttcgactccattcggctcgagctctgccagttagttgacagtggcttggatggatgcattttggtgctccgagtatgtctgaatcaaatgttgctaaatgctggggaggtcaagaacctccagttgcaacaaaagcttctatctgatgttttcagatattgtttacataagacctgcttcacaactagtttttgtgaggcgctggcaacgatagccttgacggatgattttcttgaaagcttgacaaatctgctggagctctcagttgctgagaaaattggtgttggacttgcgctgtcagattctgaggactcagagatgaagcaaaaaggtagtcatttctgtatggtcattgatatcgcctcttctgttccagggcaatggttttcaattgctcaaattgaaaagctgtgtacgagtcatatccaatctctatcaaatggtcaaattcatgaaattgtcatgtttctgcatcagtctgatggcctgtcaaagcatatggacacttttaataatattatatctctactaaaagtcacggagaggccattttttgtacctgttacgaatggagattttgatagccaagcaaatccttcaagacatttggagatgtactttggtagcacaaatgatgattttgagtcacttctgtctgaaattgggaaagagataagcatggctgacattgtagccgagttaggttacggatttactgttgacagcactcactgtaaggaaatactttccattgtggagcctcttgatgatatcgccatatctaagttgcttggggctgttgtcggcactcatattggtcttggagaggcccataacacatatgcaacatttgtatctgctattcgtaatagccacacgaatgactcacctcagccgactaaatggaacacagatgtccttgtggactcaatcaatgaacttgccccaagtacaaactgggtgcgtgtaattgaatatcttgatcatgagggtttcaatatacctgatgaagcgagcttttatctattgatgtctatatacgagtgtgcttgcaaggatccatttccacttcatgctgtttgtgggtcattgtgggaaaacacagaaggccagatatcgttcttaaagcatgcagtttgtgctccatctgataaatttacatttgcacattcttctagacacctggcatttcaggacttggcaggccctagtcaaggcaatcatgcttggttctgccttgaccttctagaagttttatgccaactagctgaagttgggtacactgcatctgtacgatcaatgcttgagtatccactgggacattgccctgagctcttacttgttggtgttagccatatcagtaccgtgtataatcttctccaaaatgaagtactgtcctgcgtatttcctgctttactgaaggatccaacaaagcgcaatgtagtgaattatctctggcatacaaactcatatctcacacttcaaggttttgttgatgctcataatgatccagattgtttgctaagaattgttgatgtttgtcatgacttgaagattctgtcgactgtccttgattctactccatttgcattttccattaaattggctgctgcttccttgaggaaagactatagtaatcttgagaaatggctgactgaaaagctatctctttatggaaaaggttttgttgaggaatgtgtgaattttctgaaagcaactatgagcaacacagattacgtcttagagggcacgacacaacctcaatctattgtcagaaacatatattgggagtcttcttatgccttcataaaggttctccagtctcactcggggcagctcttgtcagatgcaatattggatgaaataaggaaactgtgtgtttcgtttgaatcgaggaatcctagctctgctgtaagagagcttgctaattcagacggagggtcagatgacattgaagtagaggctaatgcatattttcaacacatgttctctggacagataagtgttgattccatgatacaaatgcttgggcgcttcaaagaatctacagataagagggaggtatcaattttcaactgtatgatctcaaatctttttaaagaatatacattcttccccaagtatcctgataagcagcttaagatagcagctgttctgtttggatctcttattaaacatcaacttgtggctcactccgaacttggaattgctctgcgtggtgttcgtgatgccttacgcaaacctgttgattcaaagatgtttatgtttggtacatcagcactggaacagtttatggaccgtgtcatagagtggccacgatactgtaattacatattgcagatctcacatcttcgtggaacacatttagaaatggtttctgttattgagagagccctagccaaaatctcctcaagtcaaaatgagccaaatgttggcaacctgctttctgcagagcagcatgtttctggttcatcatccatggaaggcatagaggcatctgaatcatcatggttgatgggtaccatcccaagtcaactaggaaggcctctttcttctcctttgcaacataggcagcagggtcttctctcggagaggtctgaggtttctatgaattcactgaataagagcaatttatccagtcagcctccccttgcttcatcgtctgctgatttgactattaattcaaagacaactgctccaccctctttactagcttcacctcatcagtctatcagtgtgtcaacgagtgtgcatgttggatttctgcgttctcgaagtaccccaggattaccgaggcagccttcatatactactggatttgggactgctttgaatatagagacgcttgttgcagcagcggaacaaagagatataccaattgagacacctccacctgaagttcaggacaagattctttttatgatcaacaatatatccatctcaaacatggaagctaaggcaaaggaatttaatgaggtcatacaggaacaacattatccttggtttgcacaatacatggtcatgaaaagggcaagcattgaaccaaatttccatgatctgtatttgaagttctttgataaattaaactcaaaatccttgaacaaggaaatgctgaaggctacgtatgagaactgcaaggtcttgttaagatcagaccttatcaaatctagttctgaggagcgttccttgctaaaaaacttaggcagctggttgggcaagttcaccattggtaggaaccaggcactaagggctaaggagattgacccaaaatctcttattgtggaggcgtacgagaaaggattgatgattgcggtcataccattcacttcaaagattcttgaaccttgccagtcaagtatcgcatatcgtcctccaaatccctggaccattggaattctaagtctacttgctgaaatttataatcttccaaacctgaagatgaatctgaaatttgatatcgaggttctgtttaagaatcttacagttgacatgaaggatgtgaaaccaacttccctgcttaaagatcgtctgcgcgaggtcgaaggaaatccggatttttcaaataaagatgttactacctctcaaacccctgtggttccagaagttcttccagggactattccttcatcaactcatgttgaactgcagcctgagatcaatattacatcccgagctatgagtcttccaaatatactcaatcagtatgtggctcctgtccgtctacccacaaacagcacggtagaagctgacaaagttgctctgatgatgcctgagcaagtgtcctccttgacccagcttatggcagctattccacgtgatgagatatgcttcaaaataaacccaaagcttggctcaattggtccacaattgcagtatagcaaaattatggatttggctttggataaggctaacagggagataatactccctgttattcaaagaagtgtgacaatagcaagccgaactacaaaagaacttatcctgaaggattatgcactggagtctgataacaatatgataactcgatctgcacatttgatggttggaacattagccggaagtcttgcccatgttacttgcaaggaacctcttcgtgtcgcactatattccaatcttcggaatctcattcaaaaccttatgagtggcagtgaaactatcgagcaaattattcacatgctagtcaacgataatctggatcttggctgtgccatcattgaggctgtggcaacacgtcaggctgttgaattgattgatgcagaaatagcccagtcattttcacaacaaaggaaacaaagagagggcggtggtcctacatatcatgaaacttttgcttatgctcaagggccgtttgctcgtgtacctgaagcattaagttctaagcctgggcatttatctgcttcccaacagagagtgtacgaggactttgttcatgtatggcatccccacaatcaaaatgtgggagctacaggttctggtctgtctggtgttgctactgtctcgagtactcttggtgtacttcgagcttacagtccaaattcgacatcagcatcctccagtaatttgtcaactgtccatatgggtggactaacatgtataactcagccgacagaactggggtctgaggatactgttatcgcacaatttttgagtaatcctgcccaagttggaccaagcgagtctcctgtcctatttagtggaacagttggtgctgcatctacattttctccattggcatctaatgaccttcctgttagtgaaataagtgctatggtgccccctccatcaacatctgctgatcgtctgggatctattttacctgaacctttgaatactggggatgctttggagagatacaaacaggttgctcagaagctggaagccttgattgctaatgatggtaaacatgtggaaattcagtctgttattgcagaagttcctgatatgttacgccggtgtgttagccgtgatgaggctgcattagtagtagcgcaaaaggttttcaaaagtttgtacgataatgcatcaaatagtgcttatgtctcctggcttctagcaaccttaattgcaatacgagatgtctgcaagcttgttgtcaaagagttaacaagttgggtaatatattcagatgaagagaagaagtttaacattgaaatcatttttggccttattcattccaagttgctgaatcttggggagtacaacgttcatttgacaaagctaattgatgggggaagaaataaggttgcaacggagtttgcaatgtctcttgtccaaacattgattacacaagatcctgttagcatatcagagcttcacaatgttgttgatgcaatatcgaaacttgcatggggaccaggttcacctgaatcgttgcaacaattgattgggatcgcaaggaataatgttctagctgcccaggtaaacaaagaggaaagcattgctaatgaaactacactaattgatccaaatcag

SEQ ID NO: 219748 - DNA, 5236 bp, Zea Mays
atgtcaaagggcgaggatcgaaactaacctttccaatctattcggcaggatctgctttgcgacgctgtcaaaggaactcgctcgaccaccgaaccccccttgccctagcgctccccgcctccgcctctcgccgccggcgagatgatccctgtcagcgccgatatccctgtggagctgcgcttccttctcgaatgcgccaccggctccaacttcgactccattcggctcgagctctgccagttagttgacagtggcttggatggatgcattttggtgctccgagtatgtctgaatcaaatgttgctaaatgctggggaggtcaagaacctccagttgcaacaaaagcttctatctgatgttttcagatattgtttacataagacctgcttcacaactagtttttgtgaggcgctggcaacgatagccttgacggatgattttcttgaaagcttgacaaatctgctggagctctcagttgctgagaaaattggtgttggacttgcgctgtcagattctgaggactcagagatgaagcaaaaaggtagtcatttctgtatggtcattgatatcgcctcttctgttccagggcaatggttttcaattgctcaaattgaaaagctgtgtacgagtcatatccaatctctatcaaatggtcaaattcatgaaattgtcatgtttctgcatcagtctgatggcctgtcaaagcatatggacacttttaataatattatatctctactaaaagtcacggagaggccattttttgtacctgttacgaatggagattttgatagccaagcaaatccttcaagacatttggagatgtactttggtagcacaaatgatgattttgagtcacttctgtctgaaattgggaaagagataagcatggctgacattgtagccgagttaggttacggatttactgttgacagcactcactgtaaggaaatactttccattgtggagcctcttgatgatatcgccatatctaagttgcttggggctgttgtcggcactcatattggtcttggagaggcccataacacatatgcaacatttgtatctgctattcgtaatagccacacgaatgactcacctcagccgactaaatggaacacagatgtccttgtggactcaatcaatgaacttgccccaagtacaaactgggtgcgtgtaattgaatatcttgatcatgagggtttcaatatacctgatgaagcgagcttttatctattgatgtctatatacgagtgtgcttgcaaggatccatttccacttcatgctgtttgtgggtcattgtgggaaaacacagaaggccagatatcgttcttaaagcatgcagtttgtgctccatctgataaatttacatttgcacattcttctagacacctggcatttcaggacttggcaggccctagtcaaggcaatcatgcttggttctgccttgaccttctagaagttttatgccaactagctgaagttgggtacactgcatctgtacgatcaatgcttgagtatccactgggacattgccctgagctcttacttgttggtgttagccatatcagtaccgtgtataatcttctccaaaatgaagtactgtcctgcgtatttcctgctttactgaaggatccaacaaagcgcaatgtagtgaattatctctggcatacaaactcatatctcacacttcaaggttttgttgatgctcataatgatccagattgtttgctaagaattgttgatgtttgtcatgacttgaagattctgtcgactgtccttgattctactccatttgcattttccattaaattggctgctgcttccttgaggaaagactatagtaatcttgagaaatggctgactgaaaagctatctctttatggaaaaggttttgttgaggaatgtgtgaattttctgaaagcaactatgagcaacacagattacgtcttagagggcacgacacaacctcaatctattgtcagaaacatatattgggagtcttcttatgccttcataaaggttctccagtctcactcggggcagctcttgtcagatgcaatattggatgaaataaggaaactgtgtgtttcgtttgaatcgaggaatcctagctctgctgtaagagagcttgctaattcagacggagggtcagatgacattgaagtagaggctaatgcatattttcaacacatgttctctggacagataagtgttgattccatgatacaaatgcttgggcgcttcaaagaatctacagataagagggaggtatcaattttcaactgtatgatctcaaatctttttaaagaatatacattcttccccaagtatcctgataagcagcttaagatagcagctgttctgtttggatctcttattaaacatcaacttgtggctcactccgaacttggaattgctctgcgtggtgttcgtgatgccttacgcaaacctgttgattcaaagatgtttatgtttggtacatcagcactggaacagtttatggaccgtgtcatagagtggccacgatactgtaattacatattgcagatctcacatcttcgtggaacacatttagaaatggtttctgttattgagagagccctagccaaaatctcctcaagtcaaaatgagccaaatgttggcaacctgctttctgcagagcagcatgtttctggttcatcatccatggaaggcatagaggcatctgaatcatcatggttgatgggtaccatcccaagtcaactaggaaggcctctttcttctcctttgcaacataggcagcagggtcttctctcggagaggtctgaggtttctatgaattcactgaataagagcaatttatccagtcagcctccccttgcttcatcgtctgctgatttgactattaattcaaagacaactgctccaccctctttactagcttcacctcatcagtctatcagtgtgtcaacgagtgtgcatgttggatttctgcgttctcgaagtaccccaggattaccgaggcagccttcatatactactggatttgggactgctttgaatatagagacgcttgttgcagcagcggaacaaagagatataccaattgagacacctccacctgaagttcaggacaagattctttttatgatcaacaatatatccatctcaaacatggaagctaaggcaaaggaatttaatgaggtcatacaggaacaacattatccttggtttgcacaatacatggtcatgaaaagggcaagcattgaaccaaatttccatgatctgtatttgaagttctttgataaattaaactcaaaatccttgaacaaggaaatgctgaaggctacgtatgagaactgcaaggtcttgttaagatcagaccttatcaaatctagttctgaggagcgttccttgctaaaaaacttaggcagctggttgggcaagttcaccattggtaggaaccaggcactaagggctaaggagattgacccaaaatctcttattgtggaggcgtacgagaaaggattgatgattgcggtcataccattcacttcaaagattcttgaaccttgccagtcaagtatcgcatatcgtcctccaaatccctggaccattggaattctaagtctacttgctgaaatttataatcttccaaacctgaagatgaatctgaaatttgatatcgaggttctgtttaagaatcttacagttgacatgaaggatgtgaaaccaacttccctgcttaaagatcgtctgcgcgaggtcgaaggaaatccggatttttcaaataaagatgttactacctctcaaacccctgtggttccagaagttcttccagggactattccttcatcaactcatgttgaactgcagcctgagatcaatattacatcccgagctatgagtcttccaaatatactcaatcagtatgtggctcctgtccgtctacccacaaacagcacggtagaagctgacaaagttgctctgatgatgcctgagcaagtgtcctccttgacccagcttatggcagctattccacgtgatgagatatgcttcaaaataaacccaaagcttggctcaattggtccacaattgcagtatagcaaaattatggatttggctttggataaggctaacagggagataatactccctgttattcaaagaagtgtgacaatagcaagccgaactacaaaagaacttatcctgaaggattatgcactggagtctgataacaatatgataactcgatctgcacatttgatggttggaacattagccggaagtcttgcccatgttacttgcaaggaacctcttcgtgtcgcactatattccaatcttcggaatctcattcaaaaccttatgagtggcagtgaaactatcgagcaaattattcacatgctagtcaacgataatctggatcttggctgtgccatcattgaggctgtggcaacacgtcaggctgttgaattgattgatgcagaaatagcccagtcattttcacaacaaaggaaacaaagagagggcggtggtcctacatatcatgaaacttttgcttatgctcaagggccgtttgctcgtgtacctgaagcattaagttctaagcctgggcatttatctgcttcccaacagagagtgtacgaggactttgttcatgtatggcatccccacaatcaaaatgtgggagctacaggttctggtctgtctggtgttgctactgtctcgagtactcttggtgtacttcgagcttacagtccaaattcgacatcagcatcctccagtaatttgtcaactgtccatatgggtggactaacatgtataactcagccgacagaactggggtctgaggatactgttatcgcacaatttttgagtaatcctgcccaagttggaccaagcgagtctcctgtcctatttagtggaacagttggtgctgcatctacattttctccattggcatctaatgaccttcctgaaataagtgctatggtgccccctccatcaacatctgctgatcgtctgggatctattttacctgaacctttgaatactggggatgctttggagagatacaaacaggttgctcagaagtacctagttatcccttaattggggatgggtacttgaaacccgaatggggatgggtatgggatgagttttgcacccatgatggggatgagtttgggatgctataacccgatggagaattccccattgacatctctactcgtgcttgatagggaggtttgag

SEQ ID NO: 219749 - DNA, 246 bp, Zea Mays
tacaacgccctcaactacacagggaggatctgcttggtcagagtaaaaaggcagatgacatgagcagagttgctgggttagataaccaaggaattgttggccttcagaggcaaattatgaaagatattggtttattgtggtttgctcagtagtgtttgctcgatggaccttactaaaatggtgcgattaactgtttgcatggggtcatgtagcactatttcttcacatcatttccatttgcatttc

SEQ ID NO: 219750 - DNA, 1036 bp, Zea Mays
cctgcgctcgcgtctgatccgggcgcgcgcaactggctggcgaagctggggtcggagcgcgagcgcgcggggaaggagcgcaaggggtggtcggtgacggtgcacgacctgtcggggtcgccggtggcgctggcgtcgatggtgacgccgttcgtggcgtccccgggtacggaccacgtgagccggtccagcccgggcgcctggctcatcctgcgccccgcggacgggacctgggcgccgtggggccgcctcgagtgctggcgcgggcgcggcgacaccctcggctaccgcttcgagctggtgcccggccacgccacggggggcgccggcgtctgcgtcgccgaggccagcgtcccggcctcccgcggcgggcgcttcgccatcgacctcacggcggcggcgcagccgttctggtgcagcagcagcggcgacatgggccacggcatctggcccttcggcggcttcgtgatgtcggcggcggtccagggggaaggccgctgcagcaggcccaccgtggaggtgggcgtcgcgcacgtcgggtgcgccgaggacgccgcggccttcgtcgccctcgccgccgccgtcgacctcagcatggacgcgtgccgcctcttctcgtgcaagctgcgcagggagctgtcgacggcgtcccgcgccgagtttctccggtgaccgggcttctaggtgctttttagagtctagaagcggtggaactcgggtttctgtgcctactgcggaaggattctcaagcgttctctggactctggtggaggagaaagaaacaccgctgatgtgaaccatgtgatgtcttcgtgttctgctcttgttttgttccttttgcgtggagcgaaggcttctgccggagctagctgctatatggaacgaagaagaggccggcatcctaatgtccgtccaccgtccatttcccggcccagcgtctcgttctcgacgacgaagggggagggggagtcagaaaagggtatggagagacggggtggagacccacaaagacagatcaaaatttacaaaataaccc

SEQ ID NO: 219751 - DNA, 2788 bp, Zea Mays
gaaacgtcctcgtggacgtgcaatagccactgcgcgagtcggtgtcggggctggtgtcggacgaatacggggaggagacgcctgctcctacgccctctgtcgagaatgaggtggcacggaggtggaggcatgaggggagagagaaaagaagtagaatgacgaacgaggtggtgacaactgagacgatgaccattattatcgtgcagaggtataaatagccaaatggatcgtgtttggcgagccgacccgaggcacgacatatttaatagtgtctgggccaacccaacacgagcgtcgtgcggtgcttgggccgtagcctcggcccgtagtgctggcccgacccgacatgattattttttttaaaaaaaatatatacatatgtacaatttatattcaatattataatcacctgatcatgatattctactggttagatagtttcgcccagagtcttccaccacccttcaattagagtgtgggacagtgggttcaaacctcacctcctacatcactttttaacataccccatgatgcaccgctcgctttttaatattttacgctgaattgatttggaaaaaattatagggattttttttataaaaaaatgacgcggtacgaccgttgaaactggtggtttaagtataaaatagagagtagaaaaatttaaaagttttaatccctctcagtcttttacaatctccttgtaaacgaacaagacctcccctgataccttggaaccaacacgccagagacacaaattacagagccggctccacagagacacttcactgctgcaaagagcagcagccacgagcttcaactccacgcaagattaccccaagttctcaacacgtacccgacggccgaacacgtgactccagccagtgagggcacaccacgtcaccccgccgccactcatatataaaacctattgacctcactacccgccgccggcgaccaccagacagcagccccatcaccccctgagtcctgactcctgagtcctgacgcaccgcgaggccgggccaaatcgtcgagagccaagtcagcgaagccccgaaccctccctccctcccatggccgtccgccgcaggaccgcggcggccgctgccggggacccgcctccgcaggcgccaccggcagatgaggcggcggcggtggcaccagacgaaccggtcctccgggcgccgaacctgcgcgtggccgctgtggcagcggcgctcttcctcgcgcccttctcgtacctcgcgttcgtgcactactccctgaccgccgatctgcagcgatccatcctcaaatgcggcgccatgagcctcgttgggttctgcgtcgcgctcaagctcatccctatcgcggcccgctaccacctccgccgccgtatgttcggctacgacatcaacaagaaaggcttgcctacgggtcaaatcaaagtgcctgaggcactaggccttgttgtggggattgtctatttggtcattgctattatatttcagcagtttcactatgccccagactccatttggcttgttgaatataatgcagcattgacatccatctgctttatgattcttcttggatttgttgatgatgttcttgatgttccatggagagtgaaattggcgctgccaacatttgcagcactcccattgttgatggcatatgctggtggcacttccatcatcattccaaagcctttaaccccttatgttgggctaacagttttggagctaggtttattttacaagctattcatgctcttgttagcagtcttttgtacaaactcgataaatatacatgctggcctaaatggacttgaagttgggcagacagttgttatatctgcggcggttttgatacataatgtaatgcgcatagcatcttctacagatattgaaactcagcaagctcatgaattctctatttatcttgtcttgccattcctaaccatttcattagctctgctagcttttaactggtatccttcaattgtttttgttggtgatacctacacctattttgctggaatggctttggctgtgataggaattttgggacatttcaggcgagacgttgttgctcttctttttacctcaagttcttaatttcctgtgttcggtcccacagctctttcactttgttccttgcccaagacataggttgccgaggtttgatcctggagcgggtctgttgactggtaccaaagatgggaatctggttaacatattccttaggttatttggaaagtgctcagagagggccctttgcataaggctccttattttccaggctctatgttgcgtattctgcttctggctaaggcacatgctcaccggatggtacaagtgataacctgcaatcggctctccatcctgacacccagctcgttgggaaaaaaaatcagctgcatctgatggctgttgttttcctcgacatacttgtagactaaccagagtaggtttttggattcatttcctgtgtatacttgtgctaactacagtttccaagtctttgtaaccatatttatgcaatgccttggcttcaaggaagtcttcggtatacttgtgtaccaagagcctgtttcttctctgatatcctgtttggttcaaggagtaggatgatggaattggaaagagtaaaatgtatcttaatggttagtttgaaaactccaatctgaggggatttagatggaaattagttcattttttgacaaatcctcttcaatcctgaagagaatttgagtttccaaactagccctaagagctagtattgaaacttaaatcttctccgg

SEQ ID NO: 219752 - DNA, 2745 bp, Zea Mays
gaaacgtcctcgtggacgtgcaatagccactgcgcgagtcggtgtcggggctggtgtcggacgaatacggggaggagacgcctgctcctacgccctctgtcgagaatgaggtggcacggaggtggaggcatgaggggagagagaaaagaagtagaatgacgaacgaggtggtgacaactgagacgatgaccattattatcgtgcagaggtataaatagccaaatggatcgtgtttggcgagccgacccgaggcacgacatatttaatagtgtctgggccaacccaacacgagcgtcgtgcggtgcttgggccgtagcctcggcccgtagtgctggcccgacccgacatgattattttttttaaaaaaaatatatacatatgtacaatttatattcaatattataatcacctgatcatgatattctactggttagatagtttcgcccagagtcttccaccacccttcaattagagtgtgggacagtgggttcaaacctcacctcctacatcactttttaacataccccatgatgcaccgctcgctttttaatattttacgctgaattgatttggaaaaaattatagggattttttttataaaaaaatgacgcggtacgaccgttgaaactggtggtttaagtataaaatagagagtagaaaaatttaaaagttttaatccctctcagtcttttacaatctccttgtaaacgaacaagacctcccctgataccttggaaccaacacgccagagacacaaattacagagccggctccacagagacacttcactgctgcaaagagcagcagccacgagcttcaactccacgcaagattaccccaagttctcaacacgtacccgacggccgaacacgtgactccagccagtgagggcacaccacgtcaccccgccgccactcatatataaaacctattgacctcactacccgccgccggcgaccaccagacagcagccccatcaccccctgagtcctgactcctgagtcctgacgcaccgcgaggccgggccaaatcgtcgagagccaagtcagcgaagccccgaaccctccctccctcccatggccgtccgccgcaggaccgcggcggccgctgccggggacccgcctccgcaggcgccaccggcagatgaggcggcggcggtggcaccagacgaaccggtcctccgggcgccgaacctgcgcgtggccgctgtggcagcggcgctcttcctcgcgcccttctcgtacctcgcgttcgtgcactactccctgaccgccgatctgcagcgatccatcctcaaatgcggcgccatgagcctcgttgggttctgcgtcgcgctcaagctcatccctatcgcggcccgctaccacctccgccgccgtatgttcggctacgacatcaacaagaaaggcttgcctacgggtcaaatcaaagtgcctgaggcactaggccttgttgtggggattgtctatttggtcattgctattatatttcagcagtttcactatgccccagactccattttgtttttgttgtcttcttgttgcagtggcttgttgaatataatgcagcattgacatccatctgctttatgattcttcttggatttgttgatgatgttcttgatgttccatggagagtgaaattggcgctgccaacatttgcagcactcccattgttgatggcatatgctggtggcacttccatcatcattccaaagcctttaaccccttatgttgggctaacagttttggagctaggtttattttacaagctattcatgctcttgttagcagtcttttgtacaaactcgataaatatacatgctggcctaaatggacttgaagttgggcagacagttgttatatctgcggcggttttgatacataatgtaatgcgcatagcatcttctacagatattgaaactcagcaagctcatgaattctctatttatcttgtcttgccattcctaaccatttcattagctctgctagcttttaactggaattttgggacatttcagcgagacgttgttgctcttctttttacctcaagttcttaatttcctgtgttcggtcccacagctctttcactttgttccttgcccaagacataggttgccgaggtttgatcctggagcgggtctgttgactggtaccaaagatgggaatctggttaacatattccttaggttatttggaaagtgctcagagagggccctttgcataaggctccttattttccaggctctatgttgcgtattctgcttctggctaaggcacatgctcaccggatggtacaagtgataacctgcaatcggctctccatcctgacacccagctcgttgggaaaaaaaatcagctgcatctgatggctgttgttttcctcgacatacttgtagactaaccagagtaggtttttggattcatttcctgtgtatacttgtgctaactacagtttccaagtctttgtaaccatatttatgcaatgccttggcttcaaggaagtcttcggtatacttgtgtaccaagagcctgtttcttctctgatatcctgtttggttcaaggagtaggatgatggaattggaaagagtaaaatgtatcttaatggttagtttgaaaactccaatctgaggggatttagatggaaattagttcattttttgacaaatcctcttcaatcctgaagagaatttgagtttccaaactagccctaagagctagtattgaaacttaaatcttctccgg

SEQ ID NO: 219753 - DNA, 377 bp, Zea Mays
cctgtcgggacgaggaggcctagcaggggagatgcgatgcgaggagctggtgccatagtgggctactggtcactgccggcgcgttgtgcattgccctggtccccgcctccccggaccggaccccggccgccccctcccgcggtcccgcccggcctccgctccggactctcttgcatatgggactgtgagatgacccgccgcgcgccgcgtaaaaacctctgggcatcgagccacttccgggcgtggcagtggcactagggtcggtgcaggcacatcgggggagggcggctcggccagggctcagccgttgctgctcggtcgggacagagaggagcgaggcgagggaagggaggagaggtgaggggagagagaagagg

SEQ ID NO: 219754 - DNA, 509 bp, Zea Mays
tgcctataaagctttccctccctcatctcacgaaaccctactgcggcttcaggactcgacctcttgcgccgccgccatgaccttcaagcgccgcaacggcggccgcaacaagcatggccgcggtcacgtcaagtacatccggtgctcaaactgcgccaagtgctgccccaaggacaaggcgatcaagaggtttcaggtgaggaacatcgtggaacaggcggccatcagggacgtccaggaagcatgcgtctatgatggtaaaatctctctattcctctagatctgtttcgttagtaataaatctttaatgcaacctgttgttttgacgagggtaaacgtgttctatggctcaggctacgtcctcccgaagctgtacgccaaggtgcaccactgcgtctcgtgcgcgatccacgctcacatcgtccgcgtccgatcccgtgagaagcgcagggaccgcaagccgccggagcgcttcaggcgcaggtctgatctgacatgccacatatctg

SEQ ID NO: 219755 - DNA, 1602 bp, Zea Mays
agaaaagtgaagcccaacaaagattcatatcgccgaagggtgttcttcaagtacgagaaaaggattaggacgcgcagccctccagagaagatctttgagtacttcgcatccgtccacagcccggaaggtgagatgcacatgttacctacggacctgatgagggcagtcgttcccattttccccccatcagagtccaaaattgtcagggaagggagattgaggggggagcgccaccctggcgagctacaatgtgccccgtctgactttttcatgttattcgatacaaatgctgatggagtcatctcctttgccgagtatatcttctttgtaacattacttagcatccctgaatcaagtttcaatgtggctttcaagatgtttgaccttgaccacaatggggaaattgacaaagatgagtttaggaaggtgatgacactgatgcgatcctataatagacaaggagctgcccacagggatggtttacgctttgggcgtaaggttggtcagccagtggaaaatggtggactcgtcgagtacttctttggcaaggatgggaatgaacatctacactatgataagttctctagttttttgaaacaattgcatgatgagattgtccgcttggagttcagtcactacgatttgaaatcatcgaacacaatatctgcaaaggactttgcgttatctatggttgcttctgctgatatgaatcacatagacaagttattggatagagttgatgatttggatgacaatcttgacctcaaggatctgcgcattacctttgaggagttcaaggcatttgctgatcttcgaagaaggttggaaccatttgcaatggctatcttcagctatggcaaagtaaatggtttgttgacgaagcaggatctaaaacgtgctgcatcacatgtttgtggagtggacttgactgacaaagtagtggacataattttccatgtatttgatgctaactgcgatggtaacctgagctcagaggagttcttgaggtcattacaaagaagagaaaatgacattcgccagccagcaacttctggttttctaggggtgatcgcctgctggctgaactgtacaaagtgttctcttcaacaaatgctgccccagtagattcttttgacagtcgtgacactgttccattgtccttggttgctctgtattaaatgagctggagaacgtgatcgacaaccgatagagttctgaagtgtgaagaggacttttggtgtaaatattaccctgcggccccttcttaatactgattagagttggtcataccacatagcagctgtaaggaataccttccgttcttgtccaagggctccgataacatacatcttctcgcttgtttgggagcaaggataccaaataggattggagaggctaaaatgcttttgctattcaaacaaaccctaaatgtccatcgacttagctggagccttgctaacgatcttgcttttaagctcatccctgatgctaatattctgtggattgtggccggacaatcaaacttgtaatgactaaggtcttgtttgaaatcaatctagttttgaaaaaaccagtttttatcttttagctaggagatgcgag

SEQ ID NO: 219756 - DNA, 1949 bp, Zea Mays
tgtgcgtgtgcgtccccgcgttgccgcttccctccttcctcccgtcctcggcgaatcgaagccgctagcccccgacatccatggccgccggtttagcccgtctccgatccgctgtcgagcggctcgggtcctcccgcgcccgcgcccgtgcccgccccttctccgcagccgttgctgaggccgcggccgcggtgaccgccagctcggggctggggatctggctgctgtcgtcgaacccgcactcgctggcggattccggccaggcggaggatgccgccaccgcaggcggcggaggcaacattgccttccccgctgctgtcggcggtgtcggagccaccggggagcgggagggcaggttcctgttcggagattcatatcgccgaagggtgttcttcaagtacgagaaaaggattaggacgcgcagccctccagagaagatctttgagtacttcgcatccgtccacagcccggaaggtgagatgcacatgttacctacggacctgatgagggcagtcgttcccattttccccccatcagagtccaaaattgtcagggaagggagattgaggggggagcgccaccctggcgagctacaatgtgccccgtctgactttttcatgttattcgatacaaatgctgatggagtcatctcctttgccgagtatatcttctttgtaacattacttagcatccctgaatcaagtttcaatgtggctttcaagatgtttgaccttgaccacaatggggaaattgacaaagatgagtttaggaaggtgatgacactgatgcgatcctataatagacaaggagctgcccacagggatggtttacgctttgggcgtaaggttggtcagccagtggaaaatggtggactcgtcgagtacttctttggcaaggatgggaatgaacatctacactatgataagttctctagttttttgaaacaattgcatgatgagattgtccgcttggagttcagtcactacgatttgaaatcatcgaacacaatatctgcaaaggactttgcgttatctatggttgcttctgctgatatgaatcacatagacaagttattggatagagttgatgatttggatgacaatcttgacctcaaggatctgcgcattacctttgaggagttcaaggcatttgctgatcttcgaagaaggttggaaccatttgcaatggctatcttcagctatggcaaagtaaatggtttgttgacgaagcaggatctaaaacgtgctgcatcacatgtttgtggagtggacttgactgacaaagtagtggacataattttccatgtatttgatgctaactgcgatggtaacctgagctcagaggagttcttgaggtcattacaaagaagagaaaatgacattcgccagccagcaacttctggttttctaggggtgatcgcctgctggctgaactgtacaaagtgttctcttcaacaaatgctgccccagtagattcttttgacagtcgtgacactgttccattgtccttggttgctctgtattaaatgagctggagaacgtgatcgacaaccgatagagttctgaagtgtgaagaggacttttggtgtaaatattaccctgcggccccttcttaatactgattagagttggtcataccacatagcagctgtaaggaataccttccgttcttgtccaagggctccgataacatacatcttctcgcttgtttgggagcaaggataccaaataggattggagaggctaaaatgcttttgctattcaaacaaaccctaaatgtccatcgacttagctggagccttgctaacgatcttgcttttaagctcatccctgatgctaatattctgtggattgtggccggacaatcaaacttgtaatgactaaggtcttgtttgaaatcaatctagttttgaaaaaaccagtttttatcttttagctaggagatgcgag

SEQ ID NO: 219757 - DNA, 1001 bp, Zea Mays
aagggccaacatcttagcccatttgattgactccaaaagtaaaaaaaaaacaattcacacagttttgtatccattttctatttttctcctctcgagtagcgtggcgggcgtggacgcggcggcgatgctgcggtcggcgctgcggcggggaggggcgtccgcgaggcaggtcgcgttggcgggagaagcctcgccgagagacctcctccggatgcgcgtggcggagcgggagcgcgcgaggcggcggcgtcgcgacccgggccgcgacgagttcttcgtgcccacgccagagtcgctggcgtggctcgactcggtctccctccccatggtgctcaccgccgccgccgtggccctcttcaccaagctcctcatgatggaacatgaagctacagatcaagaaaggagagagcgcaagataaagaatagccaccctgatcaaggaacagtaaggatgctatctcgtgaagaatgggaggaggtccaagaagtcaggccaaggaccccttttgaatcaaagttagctcgtccacatgcccggataagaacgggggagccagtgcgactggttagtagatgtttcttgtggaggatgtcaaggattgggctactgatgtaatcgcagattcttttaccagagcagaagaagctaccaagaaaaaatgatttagaagaatctaaaacacccggtgtatctgctttatcgtttctctgaatctaaaacacccagttgtaaccgagttcttttacagatccatgaccatatgggtattacggccactatggtattctgagagtgaagccctgagtcccttggtctatgtttcggtgcaccatggtaaacaactgcttcacccgggcctcttggagaaagagcgatataataaagaatactaggtgaattgacacggtgaaatttctcttaaaatttgcgccatgtattggtataaggttaatcgtaccactattttgttcttgtttatatacgtgatacttgtatacaa

SEQ ID NO: 219758 - DNA, 1353 bp, Zea Mays
ccggtctctattccccaattgcccctcacctccattaccttccccgtctccctcgtacattcgacattccccttcccctgccattcggtcccgctcccgccgcctccgccgcgattccactctcccttccgcctccgccgcgattccactctcccttccgcctccgccgcgattcttgtctcccttccgcctccgccgcttaccgccgcggccacgccgcaagcgtttcgtctcgggatccccacttcgtctcgctcgagcggtagagccacgctcccaccgcccaggcgtccgccgcggaggcgtcggtggcctatctgagcaggctctcctcgtcgggcttttttgctttagagggagagacttcctggtcggcgcgccgcgagaagagcaccagccatgtcgcaaactaactgggaggcggacaagatgctggatgtatacatatatgattattttatgaagagaaatttgcaggcaactgcaaaggccttccaagcagagggaaaggtctcttcggatccagttgcaattgacgcacctggtggatttcttttcgagtggtggtcggttttttgggatatattcatagcaagaactaatgagaagcattcagatgttgcagcctcatatattgaggtacaaatgagcacattattccagactcagctcatgaaagccagggagcaacaacatcaacagcagcaacagatccctcaacagaggcagcagcagccacagcatatacaaatgcaacaaatgctgttgcaaagagctgtgcagcagcagcagcagcagcagcaacaacaacaacaacaacaacaacaacaacaacaacaacaacaacaacaacaacctcagcagcagcagcagcagcagctgcaacagcaacagctgcaacagcagcgtagagatggttctcatcttctcaatggttctgcaaatggaatttctggaaacaatcctttaatgcggcaaaaccaaagtactgcaaatgttatggcaacaaaaatgtacgaggaaaggttaaaggtaccttccgagagagactctttggaagaggcatcattgaagcaaaggtacggagagaatgctgggcaactacttgattcaaatgaagcatcattgttgaaagcagcttcaagcgcgcaatcctcagggcaaattttgcatggaactgttggtggcttgtcaggcactctgcaacaagttcaggccaggagccctcaacttcctggtcctgctcagcagggtatcaagacagagattaatcccattctgacccccagagctgcaggcccagaagggtcatttataggtgctcaaggatctaatcaagctgggaacaatttg

SEQ ID NO: 219759 - DNA, 1875 bp, Zea Mays
ccggtctctattccccaattgcccctcacctccattaccttccccgtctccctcgtacattcgacattccccttcccctgccattcggtcccgctcccgccgcctccgccgcgattccactctcccttccgcctccgccgcgattccactctcccttccgcctccgccgcgattcttgtctcccttccgcctccgccgcttaccgccgcggccacgccgcaagcgtttcgtctcgggatccccacttcgtctcgctcgagcggtagagccacgctcccaccgcccaggcgtccgccgcggaggcgtcggtggcctatctgagcaggctctcctcgtcgggcttttttgctttagagggagagacttcctggtcggcgcgccgcgagaagagcaccagccatgtcgcaaactaactgggaggcggacaagatgctggatgtatacatatatgattattttatgaagagaaatttgcaggcaactgcaaaggccttccaagcagagggaaaggtctcttcggatccagttgcaattgacgcacctggtggatttcttttcgagtggtggtcggttttttgggatatattcatagcaagaactaatgagaagcattcagatgttgcagcctcatatattgaggtaaacatttttttgcatttaattgtcctttctgtgatcaaattttatttaacgtgtgcccgtttgacctatttgcttctttttgtaagtccttcaacaaagagtatattattttgtgcttgtaaaagtacacctagatttgcgagtatttttcaatgcaatttttagttctacacatataacttaatgttttcaaactaaatagcttttaaaaggttattaatgtttgtagttttaaagtttggctataaaacttatcctaaacgatatgtttttatgaccggagggtgtggcttttgctaatcaactgtttggtctgtggatcagtttctgttcatggcatacatttatctttgttttcttttggtatacatgtctggttttgcacctttttctctcctaggacatgttgttacctaaggattgaagtttataaatcgtgatctgtctttgctgcatcaatagacatgagtgttggcagggtttgctgtcctagcaatactaacccaggtacaaatgagcacattattccagactcagctcatgaaagccagggagcaacaacatcaacagcagcaacagatccctcaacagaggcagcagcagccacagcatatacaaatgcaacaaatgctgttgcaaagagctgtgcagcagcagcagcagcagcagcaacaacaacaacaacaacaacaacaacaacaacaacaacaacaacaacaacaacctcagcagcagcagcagcagcagctgcaacagcaacagctgcaacagcagcgtagagatggttctcatcttctcaatggttctgcaaatggaatttctggaaacaatcctttaatgcggcaaaaccaaagtactgcaaatgttatggcaacaaaaatgtacgaggaaaggttaaaggtaccttccgagagagactctttggaagaggcatcattgaagcaaaggtacggagagaatgctgggcaactacttgattcaaatgaagcatcattgttgaaagcagcttcaagcgcgcaatcctcagggcaaattttgcatggaactgttggtggcttgtcaggcactctgcaacaagttcaggccaggagccctcaacttcctggtcctgctcagggtatcaagacagagattaatcccattctgacccccagagctgcaggcccagaagggtcatttataggtgctcaagtaaaaaaatgtgcttggcgtattcaaccttgtcacatgata

SEQ ID NO: 219760 - DNA, 1279 bp, Zea Mays
tccaccccaaaatggcactcgcgccatcacccccagcgctgccgcccaacccggcgctccctttgccgtggtgggggcgggccggccgcggtgcgctcctcggcgcccgcgcccgcgtccgcgccgtccgcgcggcgctacggcccccgagccagtggtccgtcgggagctggcggggccgcccggcgcagcagcagcccgagtacccggacaaggcggacctggaagacgtgctgcggacggtgggaacgttcccgcccatcgtcttcgccggcgaggcgcgcaccctcgaggagcgcctcgcggaggccgccgtcggccgggccttcctcctccagggcggcgactgcgccgagagcttcaaggagttcaacgccaacaacatcagggacaccttccgcgtcctcctgcaaatgtccgttgtgctcatgttcggaggccagatgcctgtcgtcaaggtgggaagaatggcagggcagtttgcgaagccaaggtcagatggttttgaggagcggaatggattgaagttgccaagctatagaggggacaatatcaatggggatgcattcaatggggagtcaaggttgccagatccacaccgcatgataagggcgtactcacagtctgcagcaacactgaatctgctgcgggcattcgcaactggaggttatgctgcaatgcagagggtagcacaatggaaccttgatttcacagagaacagcgaacaaggtgataggtacatggagttggctcaccgagttgacgaagctttggggttcatgtcagctgctgggctccctttagatcaccctataatgacaacagcagaattctggacgtcacatgagtgccttcttctaccttatgagcaagcgctcactcgtgaggattccaccacgggcctctattatgactgctctgcccacttcctatgggtcggagagcgcactcgccagcttgatggtgctcacgttgagttccttcgaggcattgccaaccctcttggtatcaaggttagtgacaagatggacccagcagaacttgtgcggttgattgatatattgaatcccgaaaacagggctgggagaataaccatcatcacaagaatgggacctgaaaacatgagggtgaaacttccacacctgatacgcgctgtccgtggggccggtcagatagtaacatgggttactgacccaatgcatgggaacactatgaaggccccttgcggactcaaaacccgctcgttcgacaggattttggtgttcgtccgacttgacct

SEQ ID NO: 219761 - DNA, 2414 bp, Zea Mays
ttccaccccaaaatggcactcgcgccatcacccccagcgctgccgcccaacccggcgctccctttgccgtggtgggggcgggccggccgcggtgcgctcctcggcgcccgcgcccgcgtccgcgccgtccgcgcggcgctacggcccccgagccagtggtccgtcgggagctggcggggccgcccggcgcagcagcagcccgagtacccggacaaggcggacctggaagacgtgctgcggacggtgggaacgttcccgcccatcgtcttcgccggcgaggcgcgcaccctcgaggagcgcctcgcggaggccgccgtcggccgggccttcctcctccagggcggcgactgcgccgagagcttcaaggagttcaacgccaacaacatcagggacaccttccgcgtcctcctgcaaatgtccgttgtgctcatgttcggaggccagatgcctgtcgtcaaggtgggaagaatggcagggcagtttgcgaagccaaggtcagatggttttgaggagcggaatggattgaagttgccaagctatagaggggacaatatcaatggggatgcattcaatggggagtcaaggttgccagatccacaccgcatgataagggcgtactcacagtctgcagcaacactgaatctgctgcgggcattcgcaactggaggttatgctgcaatgcagagggtagcacaatggaaccttgatttcacagagaacagcgaacaaggtgataggtacatggagttggctcaccgagttgacgaagctttggggttcatgtcagctgctgggctccctttagatcaccctataatgacaacagcagaattctggacgtcacatgagtgccttcttctaccttatgagcaagcgctcactcgtgaggattccaccacgggcctctattatgactgctctgcccacttcctatgggtcggagagcgcactcgccagcttgatggtgctcacgttgagttccttcgaggcattgccaaccctcttggtatcaaggttagtgacaagatggacccagcagaacttgtgcggttgattgatatattgaatcccgaaaacagggctgggagaataaccatcatcacaagaatgggacctgaaaacatgagggtgaaacttccacacctgatacgcgctgtccgtggggccggtcagatagtaacatgggttactgacccaatgcatgggaacactatgaaggccccttgcggactcaaaacccgctcgttcgacaggattttgcatggccgctatgggcatcggcgactgcgccaccaccagccagcgcggcgacctggacatcccgtacccgttgagcatcgggcgcgggtgctaccactacacgggcgatcgagggcggggcgacatcacctgcaggcgcaccgcgcgcggcggctaccagcctaccaggccttcagcggcgagtccgttgaggtcatcgccatctccgtgcgccgcggccaggcgcgcgtctgcattctgcaacgacatccagacctggtgctacaacacctagctcacggtccatgggcaaagtacaacagcctgtgggggatcgacctctccgactcgtagttccggatctccgacgaggccaacctcttcgtcgtcgtgcgctgcaactcgctggcgtacgtgcagtccttcaacgccggcatcgagtacatgaccggctgcatggccacgtgcccggacgcgagtgaacggctcctgcgccgggcgccggcatgggctgctggcctgctgccaggcggccatcccgcccagggcatcaacacgtacggcatgcagttcgacgaccgcgtcaacaccgccgcggccgtcacgggcttcagcccctgcagctacgccggccgtgctcatggaggccgccgcgttcgacttccgcaccacctacgtcaccaccggggacttcatgacatccaccggcgggaaggtgcagctgctgctgctggactgggtggtcagtagagagacgtgccgggaggcggcacggaacgccacggcgtacatgtgcgtcagcggcagctgcgagcgcgtcgactcgtggaacggaccgggctacctgcctacctctgcaactgctccgcggcccctacgtccctgccggatcctaacaacaagtacccttgctctgttcctggaacttgcaccaacactcctggaagcttcatctgctcctgccccgacaatcatccacggcgacgtcaagtcgcccaacttcctcattgaggagggctacgccgccaaggtgtccgacttcgtgccagtggcggacccaggatttagagtgtgggtattcgaaaattttctaggatgatttttaaagactaaagtttttctattggtatagatagataattatttgtatatataacatataattaagtataaac

SEQ ID NO: 219762 - DNA, 587 bp, Zea Mays
ccgtacatgacagtttggtcgtccagggtgaggtgcgtgcgttctttgatgtccacgaacaagaagggagccaccctggaggagtgcatctagagatgactggacaaaatgttacagagtgcatcggcggttcacgtacggtgaccttcgatgatctggggtcacgctaccacacgcactgcgacccaaggctcaatgcctcacagtctctggagatggcatttatcatcgccgagcgccttaggaaaaggaggatggcctcgtcgcctttgtacacgaaccagctgggttccattccatcaatgggtctgtgaacaacactaggttcactgtcaaggactagtccttgggttttgtttcagctgctgtgtcaaactttgctggcatgcactggtaaactagatagcctgctgtactgctcattcccggcactgggtctgccctcaaagtataatagatactcatcactttttgaccactctatttatcttgttcattattcctggaatgttttcccgaaatgtctgtctaccatgtactgctgttcctctttcttacatgtgtgttaactaggagcgttttggtcc

SEQ ID NO: 219763 - DNA, 2738 bp, Zea Mays
ccgccttcttcctcagttcctcttctgtgtcttccccagtccccactccaccccgccgcagggctggaatggtctgtcgccttgtcgcgtccgtgatccgtcccttggcctctcgcagcggacagcggccctccgccccctccaaatagcagcgaaacccctcgcgtttaaactattccctgatccaacccctcctcaaactctgacgacgcctccttccgtgcccgtccgtcctctataagggcgccgccgaggagagagaacgatgacttcagctctccggcggaaggcggcgcagatggcttccgcggcgacacagtgcttcagctactcctcgttgccggccacgtgggctctgcggcagcggggcggcggtgccagcgtgctccggctctcttcccggcggaccttctcggtctccgcggcggccgggttcgacaaccagaaccgcgagtatgtgatcgtcgggggagggaacgctgcgggttacgccgccaggacgttcgtcgagcatggcatggctgacggccgcctttgcatcgtctccaaggagccagttccaccatacgagcggccagccttgaccaaaggctatctttttcctccggacaagaaaccggctcgcctacctggtttccatacatgcgttggatctggtggacagcgacagactgctgaatggtacaaggagaatggtatagaggtgctgtatgaggatccagttgtagcatttgatggcaaaacgcaaaccttaaagacttcatcggggaaagttctgaaatacggctcacttattatttctactggatgtgaagcatcgagattacctgagaaaattggagggaaattacctggagttcactacatacgggatgttgctgatgctgatgctctagtatcctcattgggaagtgcaaagaaggtggtggttattggtgggggctatattggcatggaggtagctgcagcagcttgtggctggaatcttgacacaactattatattcccagaggaccacattatgccaagattatttacaccctcgcttgctaagaagtatgaggaactgtatcagcaaaatggtgtcaaattcataaagggagctcttatcgaaaaacttggagctggctctgatggaagggtgtcttctgcagtacttaaggatggatctgtagttgaagctgatacagttatgctatttatttccttctaatggttcatgcagtagtactatacaactgaaattattacttttactgccagataaatttaaatatcatattcattttttgatccacttctctgtgagaaccaatgttcttcacttcttcatagatacaaaatcttcaaccttctgtagttacttatagactcaatttgatagatttgttcactcgatattcaatacaagggtagttgatatatttactcattgtctcattcacttaagcccataaagtaaaaaagaagacaaaaagtatttgatattcttgttgttttaacaagatgaaaggacaggcctgacgcagtggtgagaagccttttcactgagccaaaggtcctaggttcgatgcagcctctctgcattggcttgcctcggttataccttccttagaccccactcatgtgggagctgccaacactgggtttatcatgtcctcttgttttaacaagattaagtgcaggtaattgttggtataggagcaaaaccagttgtcagcccgtttgaagctgttggagttaaccctaaagttggtggaatagaggttgattccttgttcagaactagtgtacctggcatctttgcaattggagatgtagcagcgttccccctgaagatgtacaatagaattgctcgagtggaacatgtggatcatgctcggaagtctgcgcaccactgtgtagagacgctcctaacatcccagacaaaagcgtatgactaccttccatacttctactcgagggtttttgagtacgagggaagttcgaggaaagtctggtggcagttttatggcgacaatgtcggcgaagcagtcgaagtagggaactttgatccaaaggttgcgactttctggatcgactctgatagccggctgaagggtgttttcctcgagagtggaacctcagaggaattctcgcttcttccgcagctcgccaaatctcagcctgttgttgacaagtcaaagctccaggccgcgacttctgttgaagatgcattagagattgcaagaagctcactccggtccagtgccatggtttagctctcagaatctagtactttcttgaacccgaggctgtgcgctgctcgagcggttcatagcgtcgagaccacgtcagcaataacgcacaattacatagaatctattcccactggggttgtaacattcttcagtgcacctgcgtcggctatttccagcttgaaataaacctggttgccctttgaggggttgatgaggatgatagattgaagcctttatgctacttttttcttgatggtcttctgatcactcatgcattcatgtttactgctcgacatatagttcgtttaacagtccctcttttccgaagttactgtaagacgtgttttcccctatattcattatttttgctgtgtatctagacatagggctagtttgtaaactcaaatttccttcggattagagaggattgaagaagaaattagttttgaagggaatttgagttttcaaactagttcatagtatatatgtgagcgtatg

SEQ ID NO: 219764 - DNA, 389 bp, Zea Mays
ctgccctgccagccgcctagccgtcctcagtcggcagccgctacaatgtcacccagacttcagactccggccagagtccagagccgccaggacgctagaccttgaaggaagcaattgaaatcaataactctgttcctcaaggattgagcagttctatatttacaaagaggccagatattatttttaagtggctcgggccccatggtagtgattgtggtatagtgaatgtgaacatacctactaatggtgctgaaattggtggagcatttggtggagaaaaagcagctggtggtggacgagaagcagggagtgattcctggaagcagtacatgaggagggcgacttggagggaggtcctagaggtagtaagtcacttgtttactccatga

SEQ ID NO: 219765 - DNA, 7562 bp, Zea Mays
gcagtacagcagagcaaagcaaagaggaacaccatttcccttgcctgcttgccaacccaccaccaccaccaccaccacccacgaaggcagcagcaacccagcaccaccgatccatccatccactcgtcattcctccgccccgccgctcgccttcacccatctccgaccccgctccgccaccaaaccctaggctaccagctcttcccaccccgtgtgctccgctcccctgagggcggctcgcgcgccatttctccgctcgatttcctaaaaccgtactctcggattcgggatcgggccgcgacggggcctcctcttgctctcgctcttccgtccggtcggccgctgaggacaataaaggaggttgcgctcatgccgggggcgccgctcaggtgacttgctggggggccatgcataggtactccagcaacagcgctgggttcagcggtggcagggacggcgcgaggttggaagcctcgcccttctcgtcctcctcctctgggtaccctgtcagctccaggcggcagcagcagctagttccatacaagctaaagtgtgacaaagatccacttaataacaagcttgggccacctgacttctatccacaaacaccaaactgtcccgaagagacattaaccaaagagtatgcacaagctgggtacaaggagactgttgaaggaattgaggaagcaagagagattgtactcagccagatcccgtacttctgtaagccagatgctgtcataaagtgcaaggagaagcgtttaagagcgatcaatgaatctcgtgctcaaaagagaaaggctggccaagtttatggagttcctctttctggatctctactgatcaagcctggagtttacccagagcaaagaccatgtaatgaggacgcccgcagaaaatggattgaggcccttgctcagccaaacaagcgactgcgttcattgtctgagcacgttcctcatggttaccgtaggaaatcactttttgaaggtctaattcgatataatgttccgttgctaagagcaacatggtttattaaagtcacatacctgaaccagacccgacagacacctaacagtatttcagtagcgggttctgataaccaacgctctaatcagtggacaaaggatgttgttgaatatttacaacatattttggacgaattttgttctaaagagggtgcattcgtgcatccatcttttagagagcagtcatcaccaggacctactgctggaaccaatcagataaaaatgaaaactgaagcatctccagctgctggagacattgaagaacccttggtgcacttcaaatggcggtatatggttcgtctcatccaatggcatctcacagaagaattgcttgttccctcagtacttatcgaatggctatctaaccaactccaggagagagattcagttgacgttttagaacttctcttgcctattatgcttggtctggttgacaccattactctctcacaaacatatgtgcgcatgtttgtggagctactagtgagacgtctcaatgatgcttctgttgttgatagtccaaaaggaccttcagtttcttctgttatagcagagttactgcggtacatggtacttgcagtgccagatacatttatttctttggattgctttcctctcccatcttttgtggttcctgatgtatatggtagaggtgctttgttgaagataactagcagtggtggaatttcaagttctaaaaggtgtgatgcttatcggtatttgtcctgtggttatgctgtttgttcaattcaaaaacgtgcatatgatctcgcaacagttgctaaccctaaccttcaagcacgtggtgcagccaaagtggtacaggctttggacatagctcttgtcacaggaaatttgtcagtggcatattcttcactctttaatgatttatctgatacgttaatggaagagagatggattaaagaagtcagccccagtctgcagtcttctctgatgtggattgggactgttgagctatcccttatctgttctatatttttcctttgtgaatgggcgacatgtgattatcgtgattgtcgagcatctccctctcggaatgtgaaatttacaggaagaagagatttgtctcagatacatatggcagtgtctatcttgaagaataaaatggatgagatgaataatttgtctcgttctaagagtagcactcgcgttaccctgaataatatcaccaaaggttcttcactgaccgatgcttgtttgacagcagctgctgtggatgacacttctggattgcaaagtaatgcaaagaatgtggatgagaagaaggatacgaatgatatctttgaaagccctggtccactgcatgatatcattgtgtgttggttggatcagcatgaagttagcagtgttgcaggttttacccgggtggatgttctcatcgtagaacttatccgcaatggtatattttttcctcaggcttatgtcaggcagctaattattagtggaattactgacaagaacgacacaatgttggatgttgaaagaaaaaggaggcatcacagaactttgaagcagcttcctgggtcttctttatttgatattcttgaggaaactaggaccgtggaagagcaacagttatatgagatgatgtcgacatactccagcgagcggcgccttgttctctctgaactttcatgtgatcactcattttatgcaagtggcagaggcgagtatactgcaagttcctgcattcggaagcagagtgatcttccacttgcatcaggaggtgataagcatggaagagtgccagaacaagtagaagatgttaaagccctattgtcaagtctgttgggttttacatatccttccccagtggaatccgaacctcgccaaatcaaaacaagctttcaagaatcagcaacttcaacactctcacaagttgagactggagaagcaaaaagtggatgtgaggtttgtatgaggtccaaagggcagaaattggatgatactgccactcctttccaagggttttcattgattcaatcggacgaggaagatatttggtgggtgaggaaaggcacaaagttacaagaatctttcaacattgaacctgttcagaagtctgttaagcaaacttctaggggtagggcaaaagtggttcgtaaaacacaaagtcttgcacaacttgcagctgctagaattgaaggtagccaggggacatctaccagtcatgtctgtgaaagcaaaatgagctgtccccaccataaacctaatattgatggcgataatgttaaggattttgatcacacgagggtggcaaatctgactgaaattgggaagtcactaaaaagacttagattgcttgagaggcgatctgtctcttcttggttgttgaaaacagtaagacaacttattgaaggaaatgaaacaacggctgctaaagctaccaattccataagcattctttctttgcagtctgatgacaaaacgacatccaaatggaggctaggtgatgaagaactactgtcagttctctatttactggatacatgctgtgatttagtctcttgtgcaaggttccttgtatggttactagcgaaaattcgtggtggaatgggctcttcgggccaacctgggaggagttctatgcatacgaggaacagagatcaccaagtttgtcaggtcagcgaggcacttgtgttctcatctctgcttaggtacgagaacatacttcttgcggctgacatcctgcctgatgttctaagtgctttagtgaacagaaattctgtgtcagcaattgtcaggcatcctggttcaacagcttttgcttacgtacgatactttttgaagaaatatagagatgtggctggtgtggccaagtgggaaaaaagctttcggaccacttgtgatcagcgcctgttagctgagcttgataacgggcggtccattgatggcgaattgatttcttcttcgggggtttcagcaggcgaggagattgatgagcaggtccgccaaaagttgaatggaaggagttcaagacttgtgcagaatatgaaagaaatagtgcaacggcaagctgatgaaattcagcgcagtttgaaggaaaagaaagttctagcaactcccaggaatccacccacttttgagaaagaagatagctatcaaattgcacatgacattgtttcgggcttagtagaatgcatcaggcaaaatgggggtgcaaatccagatggagacctttcaacagttgcttctgctgtttctgcaattgttgcgaatgctgggcatgtgatagcaaaacatttggattttgcaggaggtaactatcaaggtgttaattctgtgagtaattcactaaatttcgttaggcacactttgcgtgtccatataaattctctttgcttgctgaaagaaactcttggggaccgcttcagccgtgcatttgaaatagctctggctgttgaaacttctggagctgttacagcagcttttgcttctccaaagatgcaccgcaatcagtttcaaccatctcctgaggcccatgatgcatatggaaatcatacaagtgatctcagcaactcagggaaaggttttgttgggagaactgctaaagtatctgctgctgtttctgctcttgtcgtgggggctgttgttcatggagctgttagtcttgagcggatggttgctgctttaaaaataaaagatggtttggatattctgcagctcctgagaggtttgaaatcaagttcgaatggtgtatcccgtcctactggaacttttaggattgaacattccacagatgttttggtacattggtttagggttctattggggaactgcagaactgtctatgatgggcttattgcagatattcttggagattcgtacattcttgcactctcaaggttgcagcagatgcttcctcttagtgtaatctttcctccggcctactcaatttttgccatggttctttggagacgatatatttttaaccgcgaagatccacagctttatcagtctctgtcaaacgcaataagcgatattaccagacatcaaccttttcgggagatttgcttccgcaatacacatcggctgtataatcttctggcttcagatgttggtgattcagagtttgcagcaatgcttgaaactcatagtcctgacaggaattcaaaaatactgccatttatacctctccgtgcccggctttttctggacgctcttattgattgcaacacaccaactattcagggagatggagcttcggagccttgtgaccccaaagataatgaattaaagctttcagagaggcttatgcaacttcttgatactcttcaacctgcaaagttccattggcaatgggttgagatgaggcttcttttagatgaacaagctcttatggaaaaagttgcagcaggcaagacagcacttgaatcacttcggtcgttatcccctaaagctgaggggtttaccctttctgatagtgaaaaagggtttactgaagtcattctgtcaaggctacttgctagacctgatgctgctcctctctattcagaagctgtccgccttcttggcaagcttcaggagtcccttgttatggatgtgaaatggattttacaagggcaagatgctattcttggccgcaggtcaacaagacagcagcttgttcatattgcccaacgaaaagggctttcaacaaaggcacaggtttggaaaccatggggttggtccagcttgcttagcgatgttattcctaataaaactgcaaaaaggaagttggaagtcacatcaattgaggaaggtgaagttgtggatgatactgttgatgctaaaaggcctagcaagactccccctcatagtgttgatagaagctttgaagcgattagatccataaataaatatttaactgagaaagcccttgctgaattagtattgccatgcatcgacagaagttctgctgatatccgtggtatactttctgttgatctgatcaaacagatggggactatcagtgaacatatcaaagcaatagcacggaatggtgctaaacaagctggttcagtcccttcaggtaatgaagtgccatcaagcaaatcaagtggtcgtaaaggaattcgaggtggaagcccaaacattggcagaagagctccggttggtaatgacccaagccctccgtcggcttctgctctgagggcagcattgtggttacgcctccaattcatcattaggttgcttccagtaatcatggcagataggagcatgagacaaacacttgcttctgcaatcctaggcctgcttgcaacgcgcatgatttatgaagatgcagatctgccccttccacctaccaatgcaactgctttaaggcgggaggtggattccctgctggagcctcccctggacgtcctgcttgatcggcctggtgaaagtctttttgagaggcttttatgtgttctccatgcacttcttggcagctacaaaccaagttggctgaagtcaaggtcagcctctaggtcgacaattagaatccaacgagatttttccgcatttgataacgaagcagccgagggtttacagtctgcgttggatcacatggaattgcctgaaacaatcaggcggaggatccaagcagccatgcctcttcttccaccatcccggcacccttctttgcaatgtcaacctccgcagttgtcgttggctgcattaacaccactccagagcagtacatctggtgtaggtccgcaacagaaaagttgttctgcgagctgggtgcccactaacgtctcaggcagaagcaaggcggcgttgccttcgcatgatcctgaaatggaggtagatccatggaatctgctcgaagatggcacaagctgcccctcaacagcatctggaagccatggcgcgagtggagtgacgggtgaccatgctaatctgaaagcgtgcagctggcttaagggtgctgtgagggtgaggaggacagaactgacctacattggctctttagacgatgacacctgacgtgtgtatgattattttggtgaattgtggaggaaattagtctcacctgttggcactggagtgaatggtggaaaccaaccatggcccttggctttaggatggttgttgttggtgtagaatacatacacatcgctgcccccgttttgttttgttttgttttgttttagggccttgtgggggcggctgtatataatggaaaaacatttgatccattactgaggcatggcccgagaagacaccttcaaatgggcttctgtgtaagcttgcttatttgagaagtaggaagccatgcagtagattttgtatccaaaagccgtgtacttgtttttgtctgatatgtaatctagcgcatgtcacacatatgtattcccttcctttgattgaagggctaatggtatgatgtcttttttttttgataaaacatgaggggtgagagcccctactggaaattaaataaaaaaatatgtacaaggagttacacgtttcttaattactcctgttctaaaatatagttttttctaaccctctttttttatgtccacattcaaataaatgagaggt

SEQ ID NO: 219766 - DNA, 7501 bp, Zea Mays
gcagtacagcagagcaaagcaaagaggaacaccatttcccttgcctgcttgccaacccaccaccaccaccaccaccacccacgaaggcagcagcaacccagcaccaccgatccatccatccactcgtcattcctccgccccgccgctcgccttcacccatctccgaccccgctccgccaccaaaccctaggctaccagctcttcccaccccgtgtgctccgctcccctgagggcggctcgcgcgccatttctccgctcgatttcctaaaaccgtactctcggattcgggatcgggccgcgacggggcctcctcttgctctcgctcttccgtccggtcggccgctgaggacaataaaggaggttgcgctcatgccgggggcgccgctcaggtgacttgctggggggccatgcataggtactccagcaacagcgctgggttcagcggtggcagggacggcgcgaggttggaagcctcgcccttctcgtcctcctcctctgggtaccctgtcagctccaggcggcagcagcagctagttccatacaagctaaagtgtgacaaagatccacttaataacaagcttgggccacctgacttctatccacaaacaccaaactgtcccgaagagacattaaccaaagagtatgcacaagctgggtacaaggagactgttgaaggaattgaggaagcaagagagattgtactcagccagatcccgtacttctgtaagccagatgctgtcataaagtgcaaggaggcactaaagaagcgtttaagagcgatcaatgaatctcgtgctcaaaagagaaaggctggccaagtttatggagttcctctttctggatctctactgatcaagcctggagtttacccagagcaaagaccatgtaatgaggacgcccgcagaaaatggattgaggcccttgctcagccaaacaagcgactgcgttcattgtctgagcacgttcctcatggttaccgtaggaaatcactttttgaaggtctaattcgatataatgttccgttgctaagagcaacatggtttattaaagtcacatacctgaaccagacccgacagacacctaacagtatttcagtagcgggttctgataaccaacgctctaatcagtggacaaaggatgttgttgaatatttacaacatattttggacgaattttgttctaaagagggtgcattcgtgcatccatcttttagagagcagtcatcaccaggacctactgctggaaccaatcagataaaaatgaaaactgaagcatctccagctgctggagacattgaagaacccttggtgcacttcaaatggcggtatatggttcgtctcatccaatggcatctcacagaagaattgcttgttccctcagtacttatcgaatggctatctaaccaactccaggagagagattcagttgacgttttagaacttctcttgcctattatgcttggtctggttgacaccattactctctcacaaacatatgtgcgcatgtttgtggagctactagtgagacgtctcaatgatgcttctgttgttgatagtccaaaaggaccttcagtttcttctgttatagcagagttactgcggtacatggtacttgcagtgccagatacatttatttctttggattgctttcctctcccatcttttgtggttcctgatgtatatggtagaggtgctttgttgaagataactagcagtggtggaatttcaagttctaaaaggtgtgatgcttatcggtatttgtcctgtggttatgctgtttgttcaattcaaaaacgtgcatatgatctcgcaacagttgctaaccctaaccttcaagcacgtggtgcagccaaagtggtacaggctttggacatagctcttgtcacaggaaatttgtcagtggcatattcttcactctttaatgatttatctgatacgttaatggaagagagatggattaaagaagtcagccccagtctgcagtcttctctgatgtggattgggactgttgagctatcccttatctgttctatatttttcctttgtgaatgggcgacatgtgattatcgtgattgtcgagcatctccctctcggaatgtgaaatttacaggaagaagagatttgtctcagatacatatggcagtgtctatcttgaagaataaaatggatgagatgaataatttgtctcgttctaagagtagcactcgcgttaccctgaataatatcaccaaaggttcttcactgaccgatgcttgtttgacagcagctgctgtggatgacacttctggattgcaaagtaatgcaaagaatgtggatgagaagaaggatacgaatgatatctttgaaagccctggtccactgcatgatatcattgtgtgttggttggatcagcatgaagttagcagtgttgcaggttttacccgggtggatgttctcatcgtagaacttatccgcaatggtatattttttcctcaggcttatgtcaggcagctaattattagtggaattactgacaagaacgacacaatgttggatgttgaaagaaaaaggaggcatcacagaactttgaagcagcttcctgggtcttctttatttgatattcttgaggaaactaggaccgtggaagagcaacagttatatgagatgatgtcgacatactccagcgagcggcgccttgttctctctgaactttcatgtgatcactcattttatgcaagtggcagaggcgagtatactgcaagttcctgcattcggaagcagagtgatcttccacttgcatcaggaggtgataagcatggaagagtgccagaacaagtagaagatgttaaagccctattgtcaagtctgttgggttttacatatccttccccagtggaatccgaacctcgccaaatcaaaacaagctttcaagaatcagcaacttcaacactctcacaagttgagactggagaagcaaaaagtggatgtgaggtttgtatgaggtccaaagggcagaaattggatgatactgccactcctttccaagggttttcattgattcaatcggacgaggaagatatttggtgggtgaggaaaggcacaaagttacaagaatctttcaacattgaacctgttcagaagtctgttaagcaaacttctaggggtagggcaaaagtggttcgtaaaacacaaagtcttgcacaacttgcagctgctagaattgaaggtagccaggggacatctaccagtcatgtctgtgaaagcaaaatgagctgtccccaccataaacctaatattgatggcgataatgttaaggattttgatcacacgagggtggcaaatctgactgaaattgggaagtcactaaaaagacttagattgcttgagaggcgatctgtctcttcttggttgttgaaaacagtaagacaacttattgaaggaaatgaaacaacggctgctaaagctaccaattccataagcattctttctttgcagtctgatgacaaaacgacatccaaatggaggctaggtgatgaagaactactgtcagttctctatttactggatacatgctgtgatttagtctcttgtgcaaggttccttgtatggttactagcgaaaattcgtggtggaatgggctcttcgggccaacctgggaggagttctatgcatacgaggaacagagatcaccaagtttgtcaggtacgagaacatacttcttgcggctgacatcctgcctgatgttctaagtgctttagtgaacagaaattctgtgtcagcaattgtcaggcatcctggttcaacagcttttgcttacgtacgatactttttgaagaaatatagagatgtggctggtgtggccaagtgggaaaaaagctttcggaccacttgtgatcagcgcctgttagctgagcttgataacgggcggtccattgatggcgaattgatttcttcttcgggggtttcagcaggcgaggagattgatgagcaggtccgccaaaagttgaatggaaggagttcaagacttgtgcagaatatgaaagaaatagtgcaacggcaagctgatgaaattcagcgcagtttgaaggaaaagaaagttctagcaactcccaggaatccacccacttttgagaaagaagatagctatcaaattgcacatgacattgtttcgggcttagtagaatgcatcaggcaaaatgggggtgcaaatccagatggagacctttcaacagttgcttctgctgtttctgcaattgttgcgaatgctgggcatgtgatagcaaaacatttggattttgcaggaggtaactatcaaggtgttaattctgtgagtaattcactaaatttcgttaggcacactttgcgtgtccatataaattctctttgcttgctgaaagaaactcttggggaccgcttcagccgtgcatttgaaatagctctggctgttgaaacttctggagctgttacagcagcttttgcttctccaaagatgcaccgcaatcagtttcaaccatctcctgaggcccatgatgcatatggaaatcatacaagtgatctcagcaactcagggaaaggttttgttgggagaactgctaaagtatctgctgctgtttctgctcttgtcgtgggggctgttgttcatggagctgttagtcttgagcggatggttgctgctttaaaaataaaagatggtttggatattctgcagctcctgagaggtttgaaatcaagttcgaatggtgtatcccgtcctactggaacttttaggattgaacattccacagatgttttggtacattggtttagggttctattggggaactgcagaactgtctatgatgggcttattgcagatattcttggagattcgtacattcttgcactctcaaggttgcagcagatgcttcctcttagtgtaatctttcctccggcctactcaatttttgccatggttctttggagacgatatatttttaaccgcgaagatccacagctttatcagtctctgtcaaacgcaataagcgatattaccagacatcaaccttttcgggagatttgcttccgcaatacacatcggctgtataatcttctggcttcagatgttggtgattcagagtttgcagcaatgcttgaaactcatagtcctgacaggaattcaaaaatactgccatttatacctctccgtgcccggctttttctggacgctcttattgattgcaacacaccaactattcagggagatggagcttcggagccttgtgaccccaaagataatgaattaaagctttcagagaggcttatgcaacttcttgatactcttcaacctgcaaagttccattggcaatgggttgagatgaggcttcttttagatgaacaagctcttatggaaaaagttgcagcaggcaagacagcacttgaatcacttcggtcgttatcccctaaagctgaggggtttaccctttctgatagtgaaaaagggtttactgaagtcattctgtcaaggctacttgctagacctgatgctgctcctctctattcagaagctgtccgccttcttggcaagcttcaggagtcccttgttatggatgtgaaatggattttacaagggcaagatgctattcttggccgcaggtcaacaagacagcagcttgttcatattgcccaacgaaaagggctttcaacaaaggcacaggtttggaaaccatggggttggtccagcttgcttagcgatgttattcctaataaaactgcaaaaaggaagttggaagtcacatcaattgaggaaggtgaagttgtggatgatactgttgatgctaaaaggcctagcaagactccccctcatagtgttgatagaagctttgaagcgattagatccataaataaatatttaactgagaaagcccttgctgaattagtattgccatgcatcgacagaagttctgctgatatccgtggtatactttctgttgatctgatcaaacagatggggactatcagtgaacatatcaaagcaatagcacggaatggtgctaaacaagctggttcagtcccttcaggtaatgaagtgccatcaagcaaatcaagtggtcgtaaaggaattcgaggtggaagcccaaacattggcagaagagctccggttggtaatgacccaagccctccgtcggcttctgctctgagggcagcattgtggttacgcctccaattcatcattaggttgcttccagtaatcatggcagataggcctgcttgcaacgcgcatgatttatgaagatgcagatctgccccttccacctaccaatgcaactgctttaaggcgggaggtggattccctgctggagcctcccctggacgtcctgcttgatcggcctggtgaaagtctttttgagaggcttttatgtgttctccatgcacttcttggcagctacaaaccaagttggctgaagtcaaggtcagcctctaggtcgacaattagaatccaacgagatttttccgcatttgataacgaagcagccgagggtttacagtctgcgttggatcacatggaattgcctgaaacaatcaggcggaggatccaagcagccatgcctcttcttccaccatcccggcacccttctttgcaatgtcaacctccgcagttgtcgttggctgcattaacaccactccagagcagtacatctggtgtaggtccgcaacagaaaagttgttctgcgagctgggtgcccactaacgtctcaggcagaagcaaggcggcgttgccttcgcatgatcctgaaatggaggtagatccatggaatctgctcgaagatggcacaagctgcccctcaacagcatctggaagccatggcgcgagtggagtgacgggtgaccatgctaatctgaaagcgtgcagctggcttaagggtgctgtgagggtgaggaggacagaactgacctacattggctctttagacgatgacacctgacgtgtgtatgattattttggtgaattgtggaggaaattagtctcacctgttggcactggagtgaatggtggaaaccaaccatggcccttggctttaggatggttgttgttggtgtagaatacatacacatcgctgcccccgttttgttttgttttgttttgttttagggccttgtgggggcggctgtatataatggaaaaacatttgatccattactgaggcatggcccgagaagacaccttcaaatgggcttctgtgtaagcttgcttatttgagaagtaggaagccatgcagtagattttgtatccaaaagccgtgtacttgtttttgtctgatatgtaatctagcgcatgtcacacatatgtattcccttcctttgattgaagggctaatggtatgatgtcttttttttttgataaaacatgaggggtgagagcccctactggaaattaaataaaaaaatatgtacaaggagttacacgtttcttaattactcctgttctaaaatatagttttttctaaccctctttttttatgtccacattcaaataaatgagaggt

SEQ ID NO: 219767 - DNA, 576 bp, Zea Mays
atgaccggcacggtgtccaagctggcgggcgccccggcctgcggcgccaccgctccggccggcgtccctccgcgccgccgcaatcgccttcgccccctccccgcgccgggtgggaggcgttggccaagaaaggtgccaagaaacagaggttgttgtgggcatccacccggtgtcaagaacccagcttatcccgacactctttacatcgacagtctcattggacctgacacggtcaacacgatgcccgaccaagctttgcacgcattcatagaccacggcactgtctcgaggacagttgatgcgaatgtgtccgaggcggaaggtgtatacagcgccttggagaagcttggcattgactggggcgaggtcggaaagcagcttgagctggaaggtgtggactccttcaagaagagctttgacagcctactcgtgagcctacaggagaagggcaacagcctcaagacggcaactgtgtaaaactgagaagattgggtaccggcgggcttgcctggccgtcattgtgtgaccaacgttcatggcttgtacaagggatcggacgtaaacggttggaaaaca

SEQ ID NO: 219768 - DNA, 1741 bp, Zea Mays
ggcagcctcctcccccaacccaagtctctctctctctcccaaaccaaaagaaggcttccacttccagctgcagcggagcatcgccagttcagagttcaccaccacgcctttgacctccagcccatagcccaatcccgcaagcatccatccacgcccaccgcacccgctataaaatctccccctctgctcccgattcgccacctaaaggaggcgcctttccccaaatccaccaccaccgagaaacaaccgcaggaaatccgctcggccctcggctccggtcactctgttgcggccacgatgaaagagggcagacccggcgccggcgactacattgccagcctgctaagctcgtcgccgaggctcgacttcggcggggaggaggaggaggactgcctggacaggttctgcggcgacccggggttcgcggctcgcgcggcgcggctgtccagcttcagcgggcagcgcttcgccgtcaccgcgggcctcttcgggctgcccccgccgctgcccgccgcgagcggcggcggcgagttcgccgggtcccgggaggcgtcgtcggtgtcggacccggcgtcggcgatgaaggacgccaatgccaagaagcggaaggcgcccgcggcggcggcggccaagggcaaaggcagggagccatctgcgcaggcacaggcaggggagccgaagggtccggacgccaagaggtgctgcaaggcggagggaggcgagggggaggaggggagccccgtgaagctgcccaagccggagcaggccggcagcgacagctccgtcgaggacggcggcgcgcagaaccagaagccgccgccgccggtgaagggaaagaatgccaagccggtggagcctcccagggactacgtccatgtccgggccaggagagggcaggctaccgacagccacagcctcgcagagagggtgagaagggagaggatcagccagaggatgaaggtccttcaggacctggtgccaggatgcaacaaggtgatcggcaaggcgctgatgctcgacgagatcataaactacgtgcagtcgctgcaacggcaggtcgagttcctctccatgaagctcgcaaccgtcaacccactggacctgagcaacctgcccacgctcctacaaaaagatcaaaggaactactgggaggaggaggaggaggacctgcagagcgtgttccacatcgacgacaacgggcagagccaggagcacggggcctcagcttcagcacaaagcttccatggtcagcttcaaccacaagagggccacatgaagatggagttcttctgatcgggcctcgacacccagccgccgacggccgagggagcgacctgtacatagcgaagactcgaggtacaagtacaaaagcaccagcggcggtggcggcggcggggacggaagctctgaagctatagctaacagcaagtccgtacatgtaggcccttccttgcccttggagaggcgagttcttcgctcgccgtagcgtgaaccagggggtgggcgatcgtgtgatttctttgaacgttttcgatccggcgattaatttgattgattaacacagccaccccgacgatagcgtacgtagcaatcacccgaacagtgaagctgtcacttttgtgtataagataatgcatatggtgcagatattagtatcaccggcgcttctctctctctctctatctctctcaagtagtaatgtgtatgagctggatggccgagtagcaagctggatggagtg

SEQ ID NO: 219769 - DNA, 3963 bp, Zea Mays
aaccgcaccaacaaccgtcgtgcatgtcgtgacctctaactccgtgcctcgctgcgaccgcgccagcatccgccctacgcctgacccgaaacccccagtcatcctcaatcgggagccgcacacaacctcccccagcatgcacggcatgcggtagaagcggcgggaggttgctggcaactgtataacccttctcacctcgatctagatccagccacctgcgcgtgttaccccttcttcgtggtcgtttgggagctgtcataggtgcacccgtgcaactgcggccaggagcacgaggtggaggccgccgtcgttgtccacaaggccttcaaaggctacttgagcctcagttggggatatcgccggcgacacccgacattgtccgcaagctagctcgaccgtccgggacaaccaccgcagttggctattgctgcactgctctgtacaccagcacggctgctggccccggaaaggtggacggcgatggccttgcctcggtgccgttgcatgcccatgaacattctcagtccgccgcactggataatttggtccaagtggactgtgatcccgtgggcactcaggagtccagcaccttgcctgcactggtgggcgagtcctctggcaaggttgcacagcaagagcagcagcacaaggaaggtgttgatagtgccagagatgcaggtgctgcttctcctgcccctacttctactccggagaacatggagcccacacctcggaggagggggaagaagtcgaccaagggggttcaacgtctcaaagtggccaaagataaagtgatgaagctcaaggtgaccacgcctagtacagtaaaaaagaagaaaatgacagaggatgatattcaacatattggtgcccacaggtctaatagtgcaagacgcaagttagatttggatttacattcatcagaaagtaaaacatgtttcagcagagccgagctgatgattaatttgaagtgcattggcaagagttatggtttaatcagtgaactgactacacataagaggagcaagagagggaaaaaaaggaaaatgatggtaggaaacaaggaaagtggtcagctagcacttttgccttacaactggactacaacggttgcggtatcacgccctctaactcatgtaaagaaattgcgggctaaggttttgggccttactgatgaaacaatgcgggtttgtgctgttttggcaaattggaatgggagcgacaatgaaagttttgaaggttttgatattggcaatggacccgaatgggatacaacaagacaaatgtttgaacaatttgtggatatattcattaatgctatgtttgatctaattgggcctagaaaatattctcagtggggaggatccctaattgattctgtggtgggtactttccttacacagaattctgctgataatttatcaagccaagcttttatgaatatagcggcgaagtttcctaagagtgagagacactgtcaagataatgcgactcaattaatagatggtgtcgatagaaaaatgaagtcaaaagaagcatttgataactttgacttggttcattcacattttgatgaatacattaaatctgaggaagaagttgactttgataaaaaggtgaaaagtcaatacggcgaagactacaatagaattataggaaattttgctgcaagtatgaagcagaaaaacatctctacttgggacagtgatcttatgaatttagtgaaagataaatatggaaatccagtgtgcgacgagaacaacttgagaaagatcttagcttcactacgacaaccagtcacagcatctaattggaaagagttacaggaggaagcatataaaaaaggatacaataacaaaagtcaaactgaaacaagtgatgttgtagattgggaatcagttctaaacgctccattttctgaggttgcaaaatgcattgcaatcaggggacagcacaacattttggctgtgcggatactggcttttctcgaccatgtaaagaaagctcaagatggaagctttgacctagattggcttagatttgtatcacgtgaaaaagccaaaaaatttctgcttagtatacatgggattggagtgaaaagtgctgactgcatttgccttttgtcattgaggcatagagcatttccagttgatgtcaatgtagctcgcatagtgacaaggctaggatgggtcaaacttcagcccttaaacggtgctgatttccacctaattgacctttatccgatcttggatgatgtacaaaggtatttatggcctcgattgtgcaccattgataaggaaaagttgtatgaactgcactgtcttatgataacttttggaaaggtagtttgcaggaaaaaaaatccaaactgcggagcttgtcctttcagtgcaagttgtaaatattacaatagttcacttgccaaaaagtcgctacctcttccagagaagcatgaacaaggagaacagcaaacaagcatggttgcttatgggagttgcacaccaagttctcaacaaatgtatcggtatcaaattgcaataagcagcactactactgaaacaccacccatccatagctgcgagccaattgttgagatgccaccaagcccagaatatgaatacaatgaaacacctaatgagcaagaagatttctacgaagattatgcatgtgatattgaagattttgcaccaggagtacaatatgattctgaaataaatatttgttcaaacaagcatacgctgaacaataattcttggacaccgaactgtgggaaggacttggctgtgatcaatccaaagtgtagctttggccaaagtaaaaaactaaaaaataccggtcgtcttaggacagaacacaatgcatacgtcctcccagatggtcatgtaatcctagaagagttcgaagacagagttccgggagatagatgtccttacctactagtggttatttcatgtcctgatgactacaaagttaaaggcacggttctgataccgtgtcggacagcaaatagaggaaagtttccactgaatggtacctacttccaggaaaatgaggtttttgcagattactcatctagccgaaacccaataactgtacctagggaatgtattgggatgctggagagaagcattgtatactttggttcatctatacactcgatcacaaaaggtcaaacaaggcaagatatacaggaatgcttgaaggaaggatatatctgtgtacggtcgttccaccggaagaccagaataccactacgcctatgtagcacactacatgctaccaacaccaaacctgctcgtgagaagcctatgaagcggactaggacatcgccggaggggaagaagaacgggacatcgccggaggggaagaagaacgagagcctcttctgatgcttgacttcgtgtacaagttgtagctgaatgttcctcaaaatataggattaactagttctgtaacactaacaccccggcttggttatgacttagaaactgttaggccatgtttggttcacatctcctaaagtttagtcacttgtttaaaaatgttaaaggaggtaactaaaaaaaacctcttaaataggacattatagggactaatgtttagttcctaaaatttaggagatgactaaaggaaccaaacatagtttactaagccttagtaaacgtgtgaataaatgcctctcttgtgtggcggctatttttatttctgcatattattttcatctgtttaccttgatgttattgcaactggaattgcatcctgaaaattggtaggatcaatccttcaccaaacatttgtaggattaggaataagtgtatttaggccaaccagcattgtgaagaatgtaattctagtcttcttcggcacggttattatcaacatcggaaaggtcaaccctgtaattctagtcttctcgtactaatttactattgacacgaacaactgaatgacgactcgctagac

SEQ ID NO: 219770 - DNA, 3931 bp, Zea Mays
gcaggcgcggggggagggcggcgcgaggagcggatccagtgagaccgtgagagaaggcgcggacggggaggacgttaacgacgcacgaaacggtttcctgtagaaaagtaatcctttataatggcagaagagaaaggacggagcaaaacagaccccttctttactctaaccatatctgccgcaaaccgcaacacacaatccagagcgaggtcgtggcgtggactccaaatccttcctcttcaggactcaacagcggagttcgctccgaccacgggccctgctgccatggcggcggcggcagatcttgagcctcagttggggatatcgccggcgacacccgacattgtccgcaagctagctcgaccgtccgggacaaccaccgcagttggctattgctgcactgctctgtacaccagcacggctgctggccccggaaaggtggacggcgatggccttgcctcggtgccgttgcatgcccatgaacattctcagtccgccgcactggataatttggtccaagtggactgtgatcccgtgggcactcaggagtccagcaccttgcctgcactggtgggcgagtcctctggcaaggttgcacagcaagagcagcagcacaaggaaggtgttgatagtgccagagatgcaggtgctgcttctcctgcccctacttctactccggagaacatggagcccacacctcggaggagggggaagaagtcgaccaagggggttcaacgtctcaaagtggccaaagataaagtgatgaagctcaaggtgaccacgcctagtacagtaaaaaagaagaaaatgacagaggatgatattcaacatattggtgcccacaggtctaatagtgcaagacgcaagttagatttggatttacattcatcagaaagtaaaacatgtttcagcagagccgagctgatgattaatttgaagtgcattggcaagagttatggtttaatcagtgaactgactacacataagaggagcaagagagggaaaaaaaggaaaatgatggtaggaaacaaggaaagtggtcagctagcacttttgccttacaactggactacaacggttgcggtatcacgccctctaactcatgtaaagaaattgcgggctaaggttttgggccttactgatgaaacaatgcgggtttgtgctgttttggcaaattggaatgggagcgacaatgaaagttttgaaggttttgatattggcaatggacccgaatgggatacaacaagacaaatgtttgaacaatttgtggatatattcattaatgctatgtttgatctaattgggcctagaaaatattctcagtggggaggatccctaattgattctgtggtgggtactttccttacacagaattctgctgataatttatcaagccaagcttttatgaatatagcggcgaagtttcctaagagtgagagacactgtcaagataatgcgactcaattaatagatggtgtcgatagaaaaatgaagtcaaaagaagcatttgataactttgacttggttcattcacattttgatgaatacattaaatctgaggaagaagttgactttgataaaaaggtgaaaagtcaatacggcgaagactacaatagaattataggaaattttgctgcaagtatgaagcagaaaaacatctctacttgggacagtgatcttatgaatttagtgaaagataaatatggaaatccagtgtgcgacgagaacaacttgagaaagatcttagcttcactacgacaaccagtcacagcatctaattggaaagagttacaggaggaagcatataaaaaaggatacaataacaaaagtcaaactgaaacaagtgatgttgtagattgggaatcagttctaaacgctccattttctgaggttgcaaaatgcattgcaatcaggggacagcacaacattttggctgtgcggatactggcttttctcgaccatgtaaagaaagctcaagatggaagctttgacctagattggcttagatttgtatcacgtgaaaaagccaaaaaatttctgcttagtatacatgggattggagtgaaaagtgctgactgcatttgccttttgtcattgaggcatagagcatttccagttgatgtcaatgtagctcgcatagtgacaaggctaggatgggtcaaacttcagcccttaaacggtgctgatttccacctaattgacctttatccgatcttggatgatgtacaaaggtatttatggcctcgattgtgcaccattgataaggaaaagttgtatgaactgcactgtcttatgataacttttggaaaggtagtttgcaggaaaaaaaatccaaactgcggagcttgtcctttcagtgcaagttgtaaatattacaatagttcacttgccaaaaagtcgctacctcttccagagaagcatgaacaaggagaacagcaaacaagcatggttgcttatgggagttgcacaccaagttctcaacaaatgtatcggtatcaaattgcaataagcagcactactactgaaacaccacccatccatagctgcgagccaattgttgagatgccaccaagcccagaatatgaatacaatgaaacacctaatgagcaagaagatttctacgaagattatgcatgtgatattgaagattttgcaccaggagtacaatatgattctgaaataaatatttgttcaaacaagcatacgctgaacaataattcttggacaccgaactgtgggaaggacttggctgtgatcaatccaaagtgtagctttggccaaagtaaaaaactaaaaaataccggtcgtcttaggacagaacacaatgcatacgtcctcccagatggtcatgtaatcctagaagagttcgaagacagagttccgggagatagatgtccttacctactagtggttatttcatgtcctgatgactacaaagttaaaggcacggttctgataccgtgtcggacagcaaatagaggaaagtttccactgaatggtacctacttccaggaaaatgaggtttttgcagattactcatctagccgaaacccaataactgtacctagggaatgtattgggatgctggagagaagcattgtatactttggttcatctatacactcgatcacaaaaggtcaaacaaggcaagatatacaggaatgcttgaaggaaggatatatctgtgtacggtcgttccaccggaagaccagaataccactacgcctatgtagcacactacatgctaccaacaccaaacctgctcgtgagaagcctatgaagcggactaggacatcgccggaggggaagaagaacgggacatcgccggaggggaagaagaacgagagcctcttctgatgcttgacttcgtgtacaagttgtagctgaatgttcctcaaaatataggattaactagttctgtaacactaacaccccggcttggttatgacttagaaactgttaggccatgtttggttcacatctcctaaagtttagtcacttgtttaaaaatgttaaaggaggtaactaaaaaaaacctcttaaataggacattatagggactaatgtttagttcctaaaatttaggagatgactaaaggaaccaaacatagtttactaagccttagtaaacgtgtgaataaatgcctctcttgtgtggcggctatttttatttctgcatattattttcatctgtttaccttgatgttattgcaactggaattgcatcctgaaaattggtaggatcaatccttcaccaaacatttgtaggattaggaataagtgtatttaggccaaccagcattgtgaagaatgtaattctagtcttcttcggcacggttattatcaacatcggaaaggtcaaccctgtaattctagtcttctcgtactaatttactattgacacgaacaactgaatgacgactcgctagac

SEQ ID NO: 219771 - DNA, 3811 bp, Zea Mays
cacgaaacggtttcctgtagaaaagtaatcctttataatggcagaagagaaaggacggagcaaaacagaccccttctttactctaaccatatctgccgcaaaccgcaacacacaatccagagcgaggtcgtggcgtggactccaaatccttcctcttcaggactcaacagcggagttcgctccgaccacgggccctgctgccatggcggcggcggcagatcttgagcctcagttggggatatcgccggcgacacccgacattgtccgcaagctagctcgaccgtccgggacaaccaccgcagttggctattgctgcactgctctgtacaccagcacggctgctggccccggaaaggtggacggcgatggccttgcctcggtgccgttgcatgcccatgaacattctcagtccgccgcactggataatttggtccaagtggactgtgatcccgtgggcactcaggagtccagcaccttgcctgcactggtgggcgagtcctctggcaaggttgcacagcaagagcagcagcacaaggaaggtgttgatagtgccagagatgcaggtgctgcttctcctgcccctacttctactccggagaacatggagcccacacctcggaggagggggaagaagtcgaccaagggggttcaacgtctcaaagtggccaaagataaagtgatgaagctcaaggtgaccacgcctagtacagtaaaaaagaagaaaatgacagaggatgatattcaacatattggtgcccacaggtctaatagtgcaagacgcaagttagatttggatttacattcatcagaaagtaaaacatgtttcagcagagccgagctgatgattaatttgaagtgcattggcaagagttatggtttaatcagtgaactgactacacataagaggagcaagagagggaaaaaaaggaaaatgatggtaggaaacaaggaaagtggtcagctagcacttttgccttacaactggactacaacggttgcggtatcacgccctctaactcatgtaaagaaattgcgggctaaggttttgggccttactgatgaaacaatgcgggtttgtgctgttttggcaaattggaatgggagcgacaatgaaagttttgaaggttttgatattggcaatggacccgaatgggatacaacaagacaaatgtttgaacaatttgtggatatattcattaatgctatgtttgatctaattgggcctagaaaatattctcagtggggaggatccctaattgattctgtggtgggtactttccttacacagaattctgctgataatttatcaagccaagcttttatgaatatagcggcgaagtttcctaagagtgagagacactgtcaagataatgcgactcaattaatagatggtgtcgatagaaaaatgaagtcaaaagaagcatttgataactttgacttggttcattcacattttgatgaatacattaaatctgaggaagaagttgactttgataaaaaggtgaaaagtcaatacggcgaagactacaatagaattataggaaattttgctgcaagtatgaagcagaaaaacatctctacttgggacagtgatcttatgaatttagtgaaagataaatatggaaatccagtgtgcgacgagaacaacttgagaaagatcttagcttcactacgacaaccagtcacagcatctaattggaaagagttacaggaggaagcatataaaaaaggatacaataacaaaagtcaaactgaaacaagtgatgttgtagattgggaatcagttctaaacgctccattttctgaggttgcaaaatgcattgcaatcaggggacagcacaacattttggctgtgcggatactggcttttctcgaccatgtaaagaaagctcaagatggaagctttgacctagattggcttagatttgtatcacgtgaaaaagccaaaaaatttctgcttagtatacatgggattggagtgaaaagtgctgactgcatttgccttttgtcattgaggcatagagcatttccagttgatgtcaatgtagctcgcatagtgacaaggctaggatgggtcaaacttcagcccttaaacggtgctgatttccacctaattgacctttatccgatcttggatgatgtacaaaggtatttatggcctcgattgtgcaccattgataaggaaaagttgtatgaactgcactgtcttatgataacttttggaaaggtagtttgcaggaaaaaaaatccaaactgcggagcttgtcctttcagtgcaagttgtaaatattacaatagttcacttgccaaaaagtcgctacctcttccagagaagcatgaacaaggagaacagcaaacaagcatggttgcttatgggagttgcacaccaagttctcaacaaatgtatcggtatcaaattgcaataagcagcactactactgaaacaccacccatccatagctgcgagccaattgttgagatgccaccaagcccagaatatgaatacaatgaaacacctaatgagcaagaagatttctacgaagattatgcatgtgatattgaagattttgcaccaggagtacaatatgattctgaaataaatatttgttcaaacaagcatacgctgaacaataattcttggacaccgaactgtgggaaggacttggctgtgatcaatccaaagtgtagctttggccaaagtaaaaaactaaaaaataccggtcgtcttaggacagaacacaatgcttcgaagacagagttccgggagatagatgtccttacctactagtggttatttcatgtcctgatgactacaaagttaaaggcacggttctgataccgtgtcggacagcaaatagaggaaagtttccactgaatggtacctacttccaggaaaatgaggtttttgcagattactcatctagccgaaacccaataactgtacctagggaatgtattgggatgctggagagaagcattgtatactttggttcatctatacactcgatcacaaaaggtcaaacaaggcaagatatacaggaatgcttgaaggaaggatatatctgtgtacggtcgttccaccggaagaccagaataccactacgcctatgtagcacactacatgctaccaacaccaaacctgctcgtgagaagcctatgaagcggactaggacatcgccggaggggaagaagaacgggacatcgccggaggggaagaagaacgagagcctcttctgatgcttgacttcgtgtacaagttgtagctgaatgttcctcaaaatataggattaactagttctgtaacactaacaccccggcttggttatgacttagaaactgttaggccatgtttggttcacatctcctaaagtttagtcacttgtttaaaaatgttaaaggaggtaactaaaaaaaacctcttaaataggacattatagggactaatgtttagttcctaaaatttaggagatgactaaaggaaccaaacatagtttactaagccttagtaaacgtgtgaataaatgcctctcttgtgtggcggctatttttatttctgcatattattttcatctgtttaccttgatgttattgcaactggaattgcatcctgaaaattggtaggatcaatccttcaccaaacatttgtaggattaggaataagtgtatttaggccaaccagcattgtgaagaatgtaattctagtcttcttcggcacggttattatcaacatcggaaaggtcaaccctgtaattctagtcttctcgtactaatttactattgacacgaacaactgaatgacgactcgctagac

SEQ ID NO: 219772 - DNA, 1420 bp, Zea Mays
ccttttcgaaccctcgagtccccaaacaaatctctcttccctcctcacgctgctcccaaactggactacttatctttttcatgatttcttttaatttataattaatggcgaggagagagagacacaatgtgtgtgcgcgcgcgtgattagagagaggcctatatttcatttccgacccgcggccactcgcacgcttctgcttccgttttccctctctcattcaaaaactcgccacctctctacctctaagtctctaaccgccgtgtgtccccttcccctctcgctcggccaggccaccagctgccaggtccggcggcaatgggcaaggcggcgcgctggttccgcagcttcctgggcaagaaggaccaggcaaccaccaaaggccagaggcggcagcaggaccaggctctgcctcctccggccagcgccaagcgctggagcttcggcaagtcgtcgcgggactcggcggaagcggcggcggcggcgacagccgccgccgcggtcgtctcgcccgacgcaggcaacgcggcgatcgcgcgcgccgcggaggccgcgtggctcaggtccgccgcgtgcgccgagacggaccgggaccgggagcagagcaagcacgccatcgccgtggccgccgccaccgccgccgcggcggacgcggcggtggccgcggctcaggcggccgtcgccgtcgtgcgcctcaccagcaagggacgcccgccgtctcccgtcgtcctcgccgccgtcaggatccagacggtgttccggggattcttggcgaagaaggcgttgcgcgcgctcaaggcgctcgtgaagctgcaggcgctggtgcgtggctacctcgtgcgcaggcaggcggccgccacgctgcagagcatgcaggctctcgtccgcgcgcaggcggccgtgcgcgagaggcgcgccgccctccaccaccagcccgtccggccgcgctactcgctgcaagagcggtacgcggacgacacgcggagcgagcacggggtggcggcgtacagcagccgccggctgtcggcgagcgtcgagtccccgtcgtacggctacgaccggagccccaagatcgtggaggtggaccccggccgccccaagtcgcggtcgtcctcgcgccgcgccagcgccccgctgctggacgcccgcagcagcggcagcggcggcggcgaggagtggtgcgccaacaaccccgcgtcctcgccgctgccgtgctacctgccctccgggccgcggcgcatcgccgtgccgacctcgcgccagttcccggactacgactggtgcgtgctggagaaggcacggccggccacggcgcagagcacgccgcggtacctgcaagcgcacgcgccggccaccccgaccaagtccgtcgcgggctactcgccgtcgctcaacgcctgcccgaactacatgtcgagca

SEQ ID NO: 219773 - DNA, 875 bp, Zea Mays
ggggagctgtgcgggtgatgcttttctattttcgatctgatcggagtacatgaaaggcggagaacagattagcttcctctatccaagcggagtcgaccgcttcaaactgcagttcgctcatcttgaggagcattacagcaaaggagaaagaggttccccactgcaaagaaagcatgcttccttaccaagggaaagagtggttgtatccaaggatggcaatactgaacaacaaattaatgaccaggagagaagcgcagattctgttgcccgcactaccgtgagccctccaaggtcagaggatgctgacatggatgatgtgaaacccacaagcttaagctctcggagctacctgaagagtgcaagcataagcgcttccaagtgcgtcgttgtcagaaataaacacccagagccagaggatgatggaatacctgaggagatggaaggcaccgtcgatggattgtctgaaaaggtctccaggatgcactcctaaggcaggactgtccatggcgacagcaatctcgacacaagatttctgtctggtgcactgtaatgccgacgacacactgtttggatcttgtgtacacccacagctagttcaactaagatgtagcactagttcgtccatggaggaagcagaatggacgatgaagtgtggtcagcctgtcgaccatgaggtgttttcttccaatggagtctagggtatgtttgagttctacaacggcttgtgccgtacgaagtgtcagcagtgtacgaggaggaggatatcgttgtcagtacacattttgcctgtctagaaaattatgagtactttctccgatcacaagtacatgtacatccatgtttgtcttaagataaaaaaagaaaattcacaaata

SEQ ID NO: 219774 - DNA, 1683 bp, Zea Mays
aaaactctcaacataaaagtgcgtcgccctgccctttcttcctcttccaaggagaacaaccaccgcctctctcccccgtctatctcttcttggagcctggagaagaggaaggatcagggaacgggggaagaggttgctgccacagctcaggtttggattcagacaagtagacaaacaccagttggttaagatggcagctggtttccagatcggtgtgatcgggtcacttgcactctctgttgcatcttcagtttccattgtcctctgcaacaaagctctcatcagcacacttggttttccattcgctacaacattaacaagctggcatctgatggtgaccttctgcaccctccatgtggcacagcgcttacgtttcttcgagcccaaggcaattgatggacagacagtcatactctttgggttgctgaatggcacgtcaattggtcttctcaatctgagtttaggattcaactccattggattctaccagatgacaaaattggcgatcatacctttcactgtgctattggagactatcttcttgaagaaaagattcaggtttgagagcagttttctcacaatattgaacctcatttatggtcaaaggaatgatagaaaataacttaagtaaacactaaattcttctggatccattttgttcttttgattcaggagaacaatcaagtttcagatatttccaaataaactcttggatcaactgattgattaaatgtgtgtatgactttctgggcctaaatggtccctgtgatattaactgctatttccactgagctaataccaattcaatgatgtgcagcgagagtatcaagctttctcttctggtcttacttcttggagtaggaattgcttcagttactgatctcaagctaaatctgcttgggtccatcctttctggcctcgccattgccaccacctgtgttggccaaattgtatcctacattaaatttaatagtaatacaattatcaatagtctcaaaactgtcaggtgaaagcaaatcaaacaaatatattttagttctttccaacccacttctcgttgcaatgtacattgataaagtagttcattattaaaaaaacatacaaggacccagtactaaaaatcttctagtttgagccactttatgaatcacttggcatgaatctgccacacgcttcgtataccagtgctacatgctaatccttgaccaaatttttgtttggacgaagctcacaaatacaatacagaagaggttgaaggtctcctcaacgcagcttctgtaccaatctgcgccttaccaggcggcaattctgtttgcatctgggccttttgtagatcaactccttactaaccggagtgtctttgcacacaaatactctgctacagttctgggtttcattgtcctctcttgcttgattgcggtgtctgtgaacttcagtacatttcttgtgattggaacaacatccccagtgacgtaccaggtgcttggtcaccttaagacatgtctggttctatcatttggctacactctattacatgatcctttcactctaaggaacatattgggcattctaattgccatatttgggatggcactatactcctatttctctgtaagagagggcaagaagaagtcagcaaatgatgccctgccagtttcacagatccagcattgtgtacatttc

SEQ ID NO: 219775 - DNA, 1705 bp, Zea Mays
ggagaacaaccaccgcctctctcccccgtctatctcttcttggagcctggagaagaggaaggatcagggaacgggggaagaggttgctgccacagctcaggtctcaagtttggattcagacaagtagacaaacaccagttggttaagatggcagctggtttccagatcggtgtgatcgggtcacttgcactctctgttgcatcttcagtttccattgtcctctgcaacaaagctctcatcagcacacttggttttccattcgctacaacattaacaagctggcatctgatggtgaccttctgcaccctccatgtggcacagcgcttacgtttcttcgagcccaaggcaattgatggacagacagtcatactctttgggttgctgaatggcacgtcaattggtcttctcaatctgagtttaggattcaactccattggattctaccagatgacaaaattggcgatcatacctttcactgtgctattggagactatcttcttgaagaaaagattcaggtttgagagcagttttctcacaatattgaacctcatttatggtcaaaggaatgatagaaaataacttaagtaaacactaaattcttctggatccattttgttcttttgattcaggagaacaatcaagtttcagatatttccaaataaactcttggatcaactgattgattaaatgtgtgtatgactttctgggcctaaatggtccctgtgatattaactgctatttccactgagctaataccaattcaatgatgtgcagcgagagtatcaagctttctcttctggtcttacttcttggagtaggaattgcttcagttactgatctcaagctaaatctgcttgggtccatcctttctggcctcgccattgccaccacctgtgttggccaaattctcacaaatacaatacagaagaggttgaaggtctcctcaacgcagcttctgtaccaatctgcgccttaccaggcggcaattctgtttgcatctgggccttttgtagatcaactccttactaaccggagtgtctttgcacacaaatactctgctacagttctgggtttcattgtcctctcttgcttgattgcggtgtctgtgaacttcagtacatttcttgtgattggaacaacatccccagtgacgtaccaggtgcttggtcaccttaagacatgtctggttctatcatttggctacactctattacatgatcctttcactctaaggaacatattgggcattctaattgccatatttgggatggcactatactcctatttctctgtaagagagggcaagaagaagtcagcaaatgatgccctgccagtttcacagatgccagataaggaggttgaaccgcttttggcaactaaagacagcaatgacaccgagaaagcaaatggtttatctcacgactgctagggcttttcttgtagtttaggtctagtatgaactgcccttagaatttaatggacttggaaagccattcttttcattcttgatttcctttttaggaaaggaagattttaaaatttgtagagaatgtgtattttgacgttaaagttattgtttgattatattctacacacagcagttccagctgaagttttattagtgcagatctcaaactatactttagcagatgtagttctctaccaagctaatctaacaaaaccaaacaataaatcttgaggacat

SEQ ID NO: 219776 - DNA, 1942 bp, Zea Mays
tttttcgacaacgccaaacatctggtttcgctgccccgattcgccacgaagccgcactgtgagagagggacgcggcccgttgtcctcggcttgtacgcaatccttccgtcgctgcgaagctgatccctcgtgttcgccatggcccccagcgtcgccgtggaaaacctcaaccccaaggtcttgaaatgtgagtatgcagtccgtggcgagattgtcatccatgctcagcgcttgcagcaacaactacaaacacaaccagggtctcttccttttgatgagatcctgttctgcaacattgggaatcctcaatcccttggtcagcaacctgtgacgttcttcagggaggttcttgctctttgtgatcatccatgcctcttggaaaaagaggaaaccaaatcattgttcagattcttgcaactattcctggacgggcaacaggtgcatatagtcacagtcagggtatcaaaggattgcgtgatgcaattgctgctgggatcacctcacgtgacggattccctgcaaatgcagatgacattttcattacagacggagcaagtcctggggtccacatgatgatgcaattactgattaggaatgagaaagatggcattctgtgcccaattcctcagtaccccttgtactcggcctccatagctcttcatggtggagctcttgtcccctattaccttgatgaaaaaactgggtggggtttggagatctctgatcttaagaaacaactcgaagatgctcggtcaaaaggcattgatgttagggccttggtggttatcaatccaggaaatccgactgggcaggttcttgctgaagacaaccaatatgatatagtgaaattctgtaaaaatgagggccttgttcttctagctgatgaggtatatcaagagaacatctatgttgacaacaagaaatttaactctttcaagaagattgcaagatccatgggatacggcgaggatgatctccctctagtatcatttcagtctgtctccaaaggatactatggagagtgtggtaaaagaggaggttacatggagattactggcttcagtgctccggtaagagagcagatctacaaggtagcttcagtgaacctgtgctccaatatcactggtcaaatccttgcgagcctcgtcatgaatccaccaaaggttggggacgaatcatatgcttcctacaaggcagagaaagatggaatccttcagtctttagctcgccgtgcaaaggcactggaagatgcattcaacacgcttgagggattttcatgtaacaaggctgaaggagcaatgtaccttttccctcagatccatctgccacataaggcaattgaggctgctaaagctgccaagaaagcacctgatgcattctatgcgctccgtctccttgaatcaactggaattgttgtggttcctggatctggatttggccaagttcctggaacatggcacgtcagatgcacgatcctgccgcaggaagataaaatccccgcggtgatcacccgcttcaaggctttccatgaggcgttcatggctgagtaccgtgactgaactgttacagtggctgagtaccaccgtgtagaccgaaacaaaataaagctcccccctctctctgtgtctgtgcgtgtgtgtgaactgatctctgaatggacgaacaatgtactctgttggcgcctttaatggcaattgaggaaaattttgatcaaatttctgttgtctgctgttgtgaaagatgcgggattgtttcctagtgcagcgcaaaatgttgtttccatgtactgaggatattggcagggttgcaagagctgggaaggcatggaaccactggtgttcatgcaggattgctgaagccgataatactgctaaactttcagtgcctcttttgcgggtataattaattagtagaatgtttgtaatgcgagaggaaatccagg

SEQ ID NO: 219777 - DNA, 544 bp, Zea Mays
gataaccgagtctcggactgtacgtccgctcatggtttcgcctccggctccgggtagtggccctccggcttcggtggcagctcagctttcggtagaggcggcagctcgtggtttggcacctccggaacctctgggtgcggcagctttggcacggtcgggtgaggagggagttcaggctttggcagctctggcgcgacttggtgaggcacctcaggctttggaagctctgggacggccgggtgaggaggcagttcgggcttgggcagctccggcactgggtgcggcacctcaggtttcgggagctccgggacggctgtcggctgcggtggcacctcgggcggcacgacgtcggtagggtgcggcggcagctcaggttctggcagctccggcacggcaggatgtgggtgctcctccttgggcggcgcctcttccagcaaccgcgccgcgctgctcatgccgctgcagctgagcagcagcgccaccaggaggagaagtgaaaacacggtgctcctggaactcgaagccatgattggttggatggttt

SEQ ID NO: 219778 - DNA, 1856 bp, Zea Mays
cacagcgccacagacctccctcccagtggtcgattctttgcttgtagctagctgtaccagcctctctctctccgtctcttgtgttgaaggggagacagagaagggtaggcgacacgccatggaaccgacaaggctgctgcttcttctcctcgttctcggcgtgtcgctgcaaggatgcattgcgcagggcggcggcggcgccggagggctcacgcgggggagcttccccaagggattcgtcttcggcaccgcctcctccgcttaccagtacgagggagcggtgaaggaggacggcagagggaaaaccatctgggacaagttcgcgcacacgtttgggaaggttgcagacctgagtaacgccgatgtcgcggtcgatcagtaccaccggttcgaggaggatatacagctcatggcggacatggggatggacgcgtaccgcttttcgattgcctggtcgaggattctgcccaatggtaccggccaagtcaaccaggccggcgtcgaccactacaacaggtttatcgatgcactgctatcgaaagggattgagccatacgtgaccctgtaccactgggacctcccccaggccctggaagacaggtacaacggatggctggacaggcagatagtgtacgacttcgccgagtacgccgagacatgcttcgaggccttcggagaccgcgtgaggcactgggtcacgctcaacgagccgcacacggtcgccgtccagggctacgacgccgggctccaggcgccgggccgctgctccctgctgctccacctctactgcaggtcgggggactcggccaccgagccctacgtcgtcgcccacaacttcatcctggcacacgccaaggtctccgacgtgtacaggaaaaagtacaaggcggctcagaacggagagcttgggatagcgttcgacgtcatgtggttcgagccgatgaccaacactaccgccgacatcgaggctgccaagagagggcaggagttccagctcggatggttcgcggaccccttcttcttcggcgactacccggcgtcgatgaggtcgcgggtcggcgacaggctgcccaggttcacggcggccgaggccgcgctcgtcaagggggcgctcgacttcgtcggcataaaccactacaccacctactacaccaagcacaacagcaccgacctcgtgggccgactgctgcacaacaccctggcggacaccggaaccatcagcctcccgttcaggaacgggaaagccatcggtgacagggccaactcgatctggctgtacatcgtgcccagcgggatgaggagcctgatgaactacgtcaaggaaaggtacaacagcccgccgatttacgtcaccgaaaacgggatggacgacggcaacagccccttcacctccatcaaggacgccctcaaggacagcaagagggtcaagtaccacaacgactacctcaccaacctggctgcctctataaagcaaggatgacgcctgcgacgtgcgtggctacttcgcctggtcgctgctggacaactgggagtggacggccggctactcctccaggttcgggctctacttcgtcgactacaaggacaaccttaagagataccccaagagctcggtgcagtggttcaagaacctgctggcctctagctgaagcctcgatggatatatatatactgcattgtcatttccttctttaatcttcatggcctgcccaagtggccatctgaaaccatgcatgcatgtacgctgtggcgtccccttctggatgccttctcctttcatctatatagccacgatacaatacaagttgcctggaagaaaactatcgaggcgaaataaagtcaaggcaatacttaaa

SEQ ID NO: 219779 - DNA, 1810 bp, Zea Mays
ggcacagcgccacagacctccctcccagtggtcgattctttgcttgtagctagctgtaccagcctctctctctccgtctcttgtgttgaaggggagacagagaagggtaggcgacacgccatggaaccgacaaggctgctgcttcttctcctcgttctcggcgtgtcgctgcaaggatgcattgcgcagggcggcggcggcgccggagggctcacgcgggggagcttccccaagggattcgtcttcggcaccgcctcctccgcttaccagtacgagggagcggtgaaggaggacggcagagggaaaaccatctgggacaagttcgcgcacacgtttgggaaggttgcagacctgagtaacgccgatgtcgcggtcgatcagtaccaccggttcgaggaggatatacagctcatggcggacatggggatggacgcgtaccgcttttcgattgcctggtcgaggattctgcccaatggtaccggccaagtcaaccaggccggcgtcgaccactacaacaggtttatcgatgcactgctatcgaaaggccctggaagacaggtacaacggatggctggacaggcagatagtgtacgacttcgccgagtacgccgagacatgcttcgaggccttcggagaccgcgtgaggcactgggtcacgctcaacgagccgcacacggtcgccgtccagggctacgacgccgggctccaggcgccgggccgctgctccctgctgctccacctctactgcaggtcgggggactcggccaccgagccctacgtcgtcgcccacaacttcatcctggcacacgccaaggtctccgacgtgtacaggaaaaagtacaaggcggctcagaacggagagcttgggatagcgttcgacgtcatgtggttcgagccgatgaccaacactaccgccgacatcgaggctgccaagagagggcaggagttccagctcggatggttcgcggaccccttcttcttcggcgactacccggcgtcgatgaggtcgcgggtcggcgacaggctgcccaggttcacggcggccgaggccgcgctcgtcaagggggcgctcgacttcgtcggcataaaccactacaccacctactacaccaagcacaacagcaccgacctcgtgggccgactgctgcacaacaccctggcggacaccggaaccatcagcctcccgttcaggaacgggaaagccatcggtgacagggccaactcgatctggctgtacatcgtgcccagcgggatgaggagcctgatgaactacgtcaaggaaaggtacaacagcccgccgatttacgtcaccgaaaacgggatggacgacggcaacagccccttcacctccatcaaggacgccctcaaggacagcaagagggtcaagtaccacaacgactacctcaccaacctggctgcctctataaaggatgacgcctgcgacgtgcgtggctacttcgcctggtcgctgctggacaactgggagtggacggccggctactcctccaggttcgggctctacttcgtcgactacaaggacaaccttaagagataccccaagagctcggtgcagtggttcaagaacctgctggcctctagctgaagcctcgatggatatatatatactgcattgtcatttccttctttaatcttcatggcctgcccaagtggccatctgaaaccatgcatgcatgtacgctgtggcgtccccttctggatgccttctcctttcatctatatagccacgatacaatacaagttgcctggaagaaaactatcgaggcgaaataaagtcaaggcaatacttaaa

SEQ ID NO: 219780 - DNA, 1338 bp, Zea Mays
gcctcgtcgtccggagccacaggcctggagacgtcctggataaggtgaccagccgctgcgataggggcgcgtgtgaaccccgtcgcgccacacggatggtataagagtaaagacaaccttttcgccgaaccccccctcggaaggatggcggcggcggtttccagggccatctgcgtccagaaaccgggctccaaatgcagcagggacagggaagcgacctccttcgcccgccgaacggtcgcggcgccgaggcccccgcgcgccaaagccgccggcgtcatccgctccgactccggcgcgggacggggcccagcagtgctcgccgctgagggcccgtcgttgacgccgcgtcgatacagacgaccaaaaagagcaaatggcgcctcagtctcccgcgcgcaagctacaacggttcagggtccggtgctgcggcggctgagccgtctaccgtgggagacaccttggaacgggaggagggcggcggcacagaggcaggcgcttcggctgatgagtcatccaaccggaagcagccgccccctgttgaccccaagattgagaaggagctcaagaaggtagttcagaagactgcggcaacctttgcaccaagggcgtccacgaaaacaaagaaccctgctgtccctggaagtaccctgtacaccgtctttgaagtccagggctatgtttccatgctgttgggcggagcactttccttcaatctcatattcccatcgaatgagccagacatctggaggttaatgggaatgtggtccatttggatgttcagtaactataccttcgcttcgggctcgtgactgctccaataaagagaaagaagctctcaactacttatttctcctgattcctctgatcaacgttatgattccattcttcgtgaagtcctttgctgttgtttggtcagcagatacagttgctttcttcgtgatgtatgcatggaagcttggatggctgcaaaggttgaaatgaagatttttggtgtgctctcttggtgatgtgtgtatgaaagcttggatatttggtttgaaaaggtggagtcggtagcttttttgctgagagaaacatttgtcctcaaaattttcacatcttttggagggagctgcatgattagtttattccaagatttagttcatatagccttttatatcttgtgtatatgcagggagtacgaaaaaacagccttaagtgataaatatatgtacctgaagtctgaacatttttgttgactacgaactgaacagctctaaatggttcttgatttctcaatactttttgtcccagacaatatctatgttgactgctttttctgaaaatgaaacgggg

SEQ ID NO: 219781 - DNA, 2853 bp, Zea Mays
aggaggagcagcagatgcagcctgcggatatttcacagccaaattctgaggctaatccacctgatggggttttagcggttcctttattgaggcatcagaaaattgccttgtcatggatggtgaaaaaggagactagtatctcgctttgctatggtggaattcttgcagatgatcagggccttggtaaaactgtatcagccatatcactgattcttactgagcgcccaccagttccacagtcatctactaagaacgagccatgtgaagctgtaactctagatgaagacgatgactgtattggacctcattcggaaaagctgatgcggacatgtagctctcaagtgacaagtaacacagtgaagcaagaaaatcctattgtagcggttaaggcaaggccagctgctggtactttggttgtttgcccaacaagtgttttgcgacagtgggcaggagaactgaagaacaaagttacaagtaaagctaatttatcttttctgatatatcatggtagcaatcgcaccaaggatcctaacgaacttaccaaatatgatgttgtgcttactacatattctatagtaagcatggaagtaccaaaacaatcaaatcctgatagtgatggagaagagaaagggaagcctgacccgtatggtgcacctgtgtcctcttcagggagcaaaaagagaaaggcatcctcttctaagaaaacaaaaaataaaagtgttgcagagagttgcttgcctgaaaaacctcttgcgaaagttgcttggtttagggttattcttgatgaagcacaaagcattaagaactaccgaactcaggttgccagggcttgctggggtttgcgagccaaaagaagatggtgtttgtctgggacacctatacagaatgctgttgaggatctctatagctacttcagatttctcagatacaatcccttacgctgtatataagcagttttgcactctgataaagattccaatcagtaggaacccaaataacggttacaagaagcttcaagctgttttaaagccggtaatgctacgccggactaaagcaaccatgcttgatggggaaccgatcatatccttaccacccaagactgtttcacttaagacggtggacttcactagcgaggagcgtggtttttataacactttagaagttgaatcacgagaacagttcaaggaatatgcagctgctggtactgtaaagcaaaattatgtcaacattctattgatgcttttgcggctaagacaggcatgcgatcaccctcacctagttagaggctatgactcctgttctagttggatgtcttcgttggagatggtgaagaaacttcccatggaacggcagcacaaattacttatttgcttgcaatcttgttctgcgttttgtgctctatgcaatgatgcgccagaagatcctgttgtcactctatgtggtcatgttttttgcaaccagtgcatactggagcaactcactggtgacgacagtgtatgcccagtgtctaattgcagagtccgactaaacacatcctcactcttctccagaggcactcttgaatgctctctgagtaaattagcctctgatttcaagtctgatgatacatgtatggaaatgatacatgctgaaaagcgccctgggatggattcatcctacgcatcttcaaaattgagagctgcattagatattcttctctcattgcctaaaatagatcccactattgatagcaaatgttcaatcgggattgaatctgagaagtttgatggaaagggtatttcagaacaaactgacaccaagttgacagagaaggccattgttttctctcaatggactagaatgctagacttgcttgaagtccatttgaaagcttctcatgtgacatatcgaaggcttgatggaacaatgtctgttgctgcacgggataaagctgtgaacgacttcaatatggttccagaggttactgttatgatcatgtcactcaaagctgcaagtcttggcttgaatatggttgctgcctgccacgtacttatgctagatctttggtggaacccaaccaccgaggaccaagctgtggatagggcacaccgtattggtcaaaaacggcctgtcacggtatcaagattaactataaaagacaccgtggaagatcgtattcttgctctccaggagaaaaagcgggagatggttgcttctgcgtttggagaagacaaatctggttcccgacagactcgattgaccgttgaagacctgaattatctgtttatggtgtagaatcgctcctgagagtgaacagttttgctcattggattggtgttagacgtggtagataaaaatgttctctgaaaaaataacaaaatgctttcatttagggattattagttcttgtagcttgtacagttgcagagatttaggggttgctagcgacgtgtcttccaattctttttgcacgggaagcagtaagatgctgaactaggtgaattcttcagatagctgctatagtgcctgttaacttggggggtgttttctatgtactaatttctagttcctccattttattttcttttacttcctaaattgtcaaacacagatactaaaatagagataatctctcttttagtctatgtgtttagcaatttaggggctaaaagggactaaaatagagagactaaagacaccccttaatgtaatgaagataacgacaatgaagctcagatgatatatatgtacatattcttctcgtatccgataaaccatcgagaatattgggccatattacggagggcttgttctcaaccatctgaatcactctggcagatatgacttctgctttggtgggttgtgtgttccata

SEQ ID NO: 219782 - DNA, 4280 bp, Zea Mays
cccaccactgagcactcatgcagtaacggaccgtttggttcagagcttcccaggcagcttcgttgccaggcaaggatgtcatccccaggtgcccaaaatcggatgcctggcgacgcccacagtgcctgtcaaagctgcctgggagcaaagaaaacaggtcaatcaaggttgtttagagatgcctgccaacactgattgttctgaagatttattccaaagccatgaagaaatgcttgagaacgcagaattttggtcaaagtcaaactactcccctgtggagcatctggagtgccatatggaagttaacatggagctgaacgaaggagaacaaatgattgatcacacagaagctagccgatatgaattgtttagcaacgatctgcagagccaatcaagaacttccaacttggacaatgaacattttccaagggatgcatcaaaccacgctaatgttgaagcaactggacctccatatgatctctcaaatggtggtatatccacagagcactcagattggagtgaaattaaatgggggagtacagatgagatgcttggtaatactggtcaggatgatgaccatttcactccgatgggcatgttttgtcttaccaataacacagatattcttgatctttcttgcattgagtccaacatgggtgagagaacggaaagcattcgcaatggcaacagtagttgccttactatgcaggaagaacatttacaggcagaatgtggaggatatcctcatccagattatatatctgttgatatgattgatgaaagatcactgcatgatttgccacatgggttatcacaaaacaatgagcagtatgagatggagcagctcccacagaatatatgtgaaagtggttctatgcagatggcctctccggaccaatattgttcctctccggaccaatattgtgatgatacatctttatcagatttttacatggatgtatcctccccagagtcaatatcctgtgagcagaaccagcctgaagatatttttttcaagagcgagtctagcactgactcttctccagtaccctctagcagaaattccaccacagaggatgctgataaatacttaggtcaaccatcaaaacagttgctggactccaaaatcgttcctttcagcaaccaacacacgtttaagaacatggaatatcaaaaacctctggtattggataaacaatatgcatatagaagcaacaactcttctattcacaattcaacaaaaggttgcttcagtagagatggggacatggtttctgatttatgtgtgctagagggtaataggaatcctgctcctgctcacctatggccttatcaggggaagttccatcataattttcagcaacctgtgtatggtaattccatcattcctgcatttggtggtacgagatacaaaccacacgatgaaagaaccactctgcgccttgcattgcaggatatttcacagccaaattctgaggctaatccacctgatggggttttagcggttcctttattgaggcatcagaaaattgccttgtcatggatggtgaaaaaggagactagtatctcgctttgctatggtggaattcttgcagatgatcagggccttggtaaaactgtatcagccatatcactgattcttactgagcgcccaccagttccacagtcatctactaagaacgagccatgtgaagctgtaactctagatgaagacgatgactgtattggacctcattcggaaaagctgatgcggacatgtagctctcaagtgacaagtaacacagtgaagcaagaaaatcctattgtagcggttaaggcaaggccagctgctggtactttggttgtttgcccaacaagtgttttgcgacagtgggcaggagaactgaagaacaaagttacaagtaaagctaatttatcttttctgatatatcatggtagcaatcgcaccaaggatcctaacgaacttaccaaatatgatgttgtgcttactacatattctatagtaagcatggaagtaccaaaacaatcaaatcctgatagtgatggagaagagaaagggaagcctgacccgtatggtgcacctgtgtcctcttcagggagcaaaaagagaaaggcatcctcttctaagaaaacaaaaaataaaagtgttgcagagagttgcttgcctgaaaaacctcttgcgaaagttgcttggtttagggttattcttgatgaagcacaaagcattaagaactaccgaactcaggttgccagggcttgctggggtttgcgagccaaaagaagatggtgtttgtctgggacacctatacagaatgctgttgaggatctctatagctacttcagatttctcagatacaatcccttacgctgtatataagcagttttgcactctgataaagattccaatcagtaggaacccaaataacggttacaagaagcttcaagctgttttaaagccggtaatgctacgccggactaaagcaaccatgcttgatggggaaccgatcatatccttaccacccaagactgtttcacttaagacggtggacttcactagcgaggagcgtggtttttataacactttagaagttgaatcacgagaacagttcaaggaatatgcagctgctggtactgtaaagcaaaattatgtcaacattctattgatgcttttgcggctaagacaggcatgcgatcaccctcacctagttagaggctatgactcctgttctagttggatgtcttcgttggagatggtgaagaaacttcccatggaacggcagcacaaattacttatttgcttgcaatcttgttctgcgttttgtgctctatgcaatgatgcgccagaagatcctgttgtcactctatgtggtcatgttttttgcaaccagtgcatactggagcaactcactggtgacgacagtgtatgcccagtgtctaattgcagagtccgactaaacacatcctcactcttctccagaggcactcttgaatgctctctgagtaaattagcctctgatttcaagtctgatgatacatgtatggaaatgatacatgctgaaaagcgccctgggatggattcatcctacgcatcttcaaaattgagagctgcattagatattcttctctcattgcctaaaatagatcccactattgatagcaaatgttcaatcgggattgaatctgagaagtttgatggaaagggtatttcagaacaaactgacaccaagttgacagagaaggccattgttttctctcaatggactagaatgctagacttgcttgaagtccatttgaaagcttctcatgtgacatatcgaaggcttgatggaacaatgtctgttgctgcacgggataaagctgtgaacgacttcaatatggttccagaggttactgttatgatcatgtcactcaaagctgcaagtcttggcttgaatatggttgctgcctgccacgtacttatgctagatctttggtggaacccaaccaccgaggaccaagctgtggatagggcacaccgtattggtcaaaaacggcctgtcacggtatcaagattaactataaaagacaccgtggaagatcgtattcttgctctccaggagaaaaagcgggagatggttgcttctgcgtttggagaagacaaatctggttcccgacagactcgattgaccgttgaagacctgaattatctgtttatggtgtagaatcgctcctgagagtgaacagttttgctcattggattggtgttagacgtggtagataaaaatgttctctgaaaaaataacaaaatgctttcatttagggattattagttcttgtagcttgtacagttgcagagatttaggggttgctagcgacgtgtcttccaattctttttgcacgggaagcagtaagatgctgaactaggtgaattcttcagatagctgctatagtgcctgttaacttggggggtgttttctatgtactaatttctagttcctccattttattttcttttacttcctaaattgtcaaacacagatactaaaatagagataatctctcttttagtctatgtgtttagcaatttaggggctaaaagggactaaaatagagagactaaagacaccccttaatgtaatgaagataacgacaatgaagctcagatgatatatatgtacatattcttctcgtatccgataaaccatcgagaatattgggccatattacggagggcttgttctcaaccatctgaatcactctggcagatatgacttctgctttggtgggttgtgtgttccata

SEQ ID NO: 219783 - DNA, 3734 bp, Zea Mays
gtacagatgagatgcttggtaatactggtcaggatgatgaccatttcactccgatgggcatgttttgtcttaccaataacacagatattcttgatctttcttgcattgagtccaacatgggtgagagaacggaaagcattcgcaatggcaacagtagttgccttactatgcaggaagaacatttacaggcagaatgtggaggatatcctcatccagattatatatctgttgatatgattgatgaaagatcactgcatgatttgccacatgggttatcacaaaacaatgagcagtatgagatggagcagctcccacagaatatatgtgaaagtggttctatgcagatggcctctccggaccaatattgttcctctccggaccaatattgtgatgatacatctttatcagatttttacatggatgtatcctccccagagtcaatatcctgtgagcagaaccagcctgaagatatttttttcaagagcgagtctagcactgactcttctccagtaccctctagcagaaattccaccacagaggatgctgataaatacttaggtcaaccatcaaaacagttgctggactccaaaatcgttcctttcagcaaccaacacacgtttaagaacatggaatatcaaaaacctctggtattggataaacaatatgcatatagaagcaacaactcttctattcacaattcaacaaaaggttgcttcagtagagatggggacatggtttctgatttatgtgtgctagagggtaataggaatcctgctcctgctcacctatggccttatcaggggaagttccatcataattttcagcaacctgtgtatggtaattccatcattcctgcatttggtggtacgagatacaaaccacacgatgaaagaaccactctgcgccttgcattgcaggatatttcacagccaaattctgaggctaatccacctgatggggttttagcggttcctttattgaggcatcagaaaattgccttgtcatggatggtgaaaaaggagactagtatctcgctttgctatggtggaattcttgcagatgatcagggccttggtaaaactgtatcagccatatcactgattcttactgagcgcccaccagttccacagtcatctactaagaacgagccatgtgaagctgtaactctagatgaagacgatgactgtattggacctcattcggaaaagctgatgcggacatgtagctctcaagtgacaagtaacacagtgaagcaagaaaatcctattgtagcggttaaggcaaggccagctgctggtactttggttgtttgcccaacaagtgttttgcgacagtgggcaggagaactgaagaacaaagttacaagtaaagctaatttatcttttctgatatatcatggtagcaatcgcaccaaggatcctaacgaacttaccaaatatgatgttgtgcttactacatattctatagtaagcatggaagtaccaaaacaatcaaatcctgatagtgatggagaagagaaagggaagcctgacccgtatggtgcacctgtgtcctcttcagggagcaaaaagagaaaggcatcctcttctaagaaaacaaaaaataaaagtgttgcagagagttgcttgcctgaaaaacctcttgcgaaagttgcttggtttagggttattcttgatgaagcacaaagcattaagaactaccgaactcaggttgccagggcttgctggggtttgcgagccaaaagaagatggtgtttgtctgggacacctatacagaatgctgttgaggatctctatagctacttcagatttctcagatacaatcccttacgctgtatataagcagttttgcactctgataaagattccaatcagtaggaacccaaataacggttacaagaagcttcaagctgttttaaagccggtaatgctacgccggactaaagcaaccatgcttgatggggaaccgatcatatccttaccacccaagactgtttcacttaagacggtggacttcactagcgaggagcgtggtttttataacactttagaagttgaatcacgagaacagttcaaggaatatgcagctgctggtactgtaaagcaaaattatgtcaacattctattgatgcttttgcggctaagacaggcatgcgatcaccctcacctagttagaggctatgactcctgttctagttggatgtcttcgttggagatggtgaagaaacttcccatggaacggcagcacaaattacttatttgcttgcaatcttgttctgcgttttgtgctctatgcaataagatcctgttgtcactctatgtggtcatgttttttgcaaccagtgcatactggagcaactcactggtgacgacagtgtatgcccagtgtctaattgcagagtccgactaaacacatcctcactcttctccagaggcactcttgaatgctctctgagtaaattagcctctgatttcaagtctgatgatacatgtatggaaatgatacatgctgaaaagcgccctgggatggattcatcctacgcatcttcaaaattgagagctgcattagatattcttctctcattgcctaaaatagatcccactattgatagcaaatgttcaatcgggattgaatctgagaagtttgatggaaagggtatttcagaacaaactgacaccaagttgacagagaaggccattgttttctctcaatggactagaatgctagacttgcttgaagtccatttgaaagcttctcatgtgacatatcgaaggcttgatggaacaatgtctgttgctgcacgggataaagctgtgaacgacttcaatatggttccagaggttactgttatgatcatgtcactcaaagctgcaagtcttggcttgaatatggttgctgcctgccacgtacttatgctagatctttggtggaacccaaccaccgaggaccaagctgtggatagggcacaccgtattggtcaaaaacggcctgtcacggtatcaagattaactataaaagacaccgtggaagatcgtattcttgctctccaggagaaaaagcgggagatggttgcttctgcgtttggagaagacaaatctggttcccgacagactcgattgaccgttgaagacctgaattatctgtttatggtgtagaatcgctcctgagagtgaacagttttgctcattggattggtgttagacgtggtagataaaaatgttctctgaaaaaataacaaaatgctttcatttagggattattagttcttgtagcttgtacagttgcagagatttaggggttgctagcgacgtgtcttccaattctttttgcacgggaagcagtaagatgctgaactaggtgaattcttcagatagctgctatagtgcctgttaacttggggggtgttttctatgtactaatttctagttcctccattttattttcttttacttcctaaattgtcaaacacagatactaaaatagagataatctctcttttagtctatgtgtttagcaatttaggggctaaaagggactaaaatagagagactaaagacaccccttaatgtaatgaagataacgacaatgaagctcagatgatatatatgtacatattcttctcgtatccgataaaccatcgagaatattgggccatattacggagggcttgttctcaaccatctgaatcactctggcagatatgacttctgctttggtgggttgtgtgttccata

SEQ ID NO: 219784 - DNA, 3745 bp, Zea Mays
agatgagatgcttggtaatactggtcaggatgatgaccatttcactccgatgggcatgttttgtcttaccaataacacagatattcttgatctttcttgcattgagtccaacatgggtgagagaacggaaagcattcgcaatggcaacagtagttgccttactatgcaggaagaacatttacaggcagaatgtggaggatatcctcatccagattatatatctgttgatatgattgatgaaagatcactgcatgatttgccacatgggttatcacaaaacaatgagcagtatgagatggagcagctcccacagaatatatgtgaaagtggttctatgcagatggcctctccggaccaatattgttcctctccggaccaatattgtgatgatacatctttatcagatttttacatggatgtatcctccccagagtcaatatcctgtgagcagaaccagcctgaagatatttttttcaagagcgagtctagcactgactcttctccagtaccctctagcagaaattccaccacagaggatgctgataaatacttaggtcaaccatcaaaacagttgctggactccaaaatcgttcctttcagcaaccaacacacgtttaagaacatggaatatcaaaaacctctggtattggataaacaatatgcatatagaagcaacaactcttctattcacaattcaacaaaaggttgcttcagtagagatggggacatggtttctgatttatgtgtgctagagggtaataggaatcctgctcctgctcacctatggccttatcaggggaagttccatcataattttcagcaacctgtgtatggtaattccatcattcctgcatttggtggtacgagatacaaaccacacgatgaaagaaccactctgcgccttgcattgcaggatatttcacagccaaattctgaggctaatccacctgatggggttttagcggttcctttattgaggcatcagaaaattgccttgtcatggatggtgaaaaaggagactagtatctcgctttgctatggtggaattcttgcagatgatcagggccttggtaaaactgtatcagccatatcactgattcttactgagcgcccaccagttccacagtcatctactaagaacgagccatgtgaagctgtaactctagatgaagacgatgactgtattggacctcattcggaaaagctgatgcggacatgtagctctcaagtgacaagtaacacagtgaagcaagaaaatcctattgtagcggttaaggcaaggccagctgctggtactttggttgtttgcccaacaagtgttttgcgacagtgggcaggagaactgaagaacaaagttacaagtaaagctaatttatcttttctgatatatcatggtagcaatcgcaccaaggatcctaacgaacttaccaaatatgatgttgtgcttactacatattctatagtaagcatggaagtaccaaaacaatcaaatcctgatagtgatggagaagagaaagggaagcctgacccgtatggtgcacctgtgtcctcttcagggagcaaaaagagaaaggcatcctcttctaagaaaacaaaaaataaaagtgttgcagagagttgcttgcctgaaaaacctcttgcgaaagttgcttggtttagggttattcttgatgaagcacaaagcattaagaactaccgaactcaggttgccagggcttgctggggtttgcgagccaaaagaagatggtgtttgtctgggacacctatacagaatgctgttgaggatctctatagctacttcagatttctcagatacaatcccttacgctgtatataagcagttttgcactctgataaagattccaatcagtaggaacccaaataacggttacaagaagcttcaagctgttttaaagccggtaatgctacgccggactaaagcaaccatgcttgatggggaaccgatcatatccttaccacccaagactgtttcacttaagacggtggacttcactagcgaggagcgtggtttttataacactttagaagttgaatcacgagaacagttcaaggaatatgcagctgctggtactgtaaagcaaaattatgtcaacattctattgatgcttttgcggctaagacaggcatgcgatcaccctcacctagttagaggctatgactcctgttctagttggatgtcttcgttggagatggtgaagaaacttcccatggaacggcagcacaaattacttatttgcttgcaatcttgttctgcgttttgtgctctatgcaattgcaggatgcgccagaagatcctgttgtcactctatgtggtcatgttttttgcaaccagtgcatactggagcaactcactggtgacgacagtgtatgcccagtgtctaattgcagagtccgactaaacacatcctcactcttctccagaggcactcttgaatgctctctgagtaaattagcctctgatttcaagtctgatgatacatgtatggaaatgatacatgctgaaaagcgccctgggatggattcatcctacgcatcttcaaaattgagagctgcattagatattcttctctcattgcctaaaatagatcccactattgatagcaaatgttcaatcgggattgaatctgagaagtttgatggaaagggtatttcagaacaaactgacaccaagttgacagagaaggccattgttttctctcaatggactagaatgctagacttgcttgaagtccatttgaaagcttctcatgtgacatatcgaaggcttgatggaacaatgtctgttgctgcacgggataaagctgtgaacgacttcaatatggttccagaggttactgttatgatcatgtcactcaaagctgcaagtcttggcttgaatatggttgctgcctgccacgtacttatgctagatctttggtggaacccaaccaccgaggaccaagctgtggatagggcacaccgtattggtcaaaaacggcctgtcacggtatcaagattaactataaaagacaccgtggaagatcgtattcttgctctccaggagaaaaagcgggagatggttgcttctgcgtttggagaagacaaatctggttcccgacagactcgattgaccgttgaagacctgaattatctgtttatggtgtagaatcgctcctgagagtgaacagttttgctcattggattggtgttagacgtggtagataaaaatgttctctgaaaaaataacaaaatgctttcatttagggattattagttcttgtagcttgtacagttgcagagatttaggggttgctagcgacgtgtcttccaattctttttgcacgggaagcagtaagatgctgaactaggtgaattcttcagatagctgctatagtgcctgttaacttggggggtgttttctatgtactaatttctagttcctccattttattttcttttacttcctaaattgtcaaacacagatactaaaatagagataatctctcttttagtctatgtgtttagcaatttaggggctaaaagggactaaaatagagagactaaagacaccccttaatgtaatgaagataacgacaatgaagctcagatgatatatatgtacatattcttctcgtatccgataaaccatcgagaatattgggccatattacggagggcttgttctcaaccatctgaatcactctggcagatatgacttctgctttggtgggttgtgtgttccata

SEQ ID NO: 219785 - DNA, 3666 bp, Zea Mays
cagatattcttgatctttcttgcattgagtccaacatgggtgagagaacggaaagcattcgcaatggcaacagtagttgccttactatgcaggaagaacatttacaggcagaatgtggaggatatcctcatccagattatatatctgttgatatgattgatgaaagatcactgcatgatttgccacatgggttatcacaaaacaatgagcagtatgagatggagcagctcccacagaatatatgtgaaagtggttctatgcagatggcctctccggaccaatattgttcctctccggaccaatattgtgatgatacatctttatcagatttttacatggatgtatcctccccagagtcaatatcctgtgagcagaaccagcctgaagatatttttttcaagagcgagtctagcactgactcttctccagtaccctctagcagaaattccaccacagaggatgctgataaatacttaggtcaaccatcaaaacagttgctggactccaaaatcgttcctttcagcaaccaacacacgtttaagaacatggaatatcaaaaacctctggtattggataaacaatatgcatatagaagcaacaactcttctattcacaattcaacaaaaggttgcttcagtagagatggggacatggtttctgatttatgtgtgctagagggtaataggaatcctgctcctgctcacctatggccttatcaggggaagttccatcataattttcagcaacctgtgtatggtaattccatcattcctgcatttggtggtacgagatacaaaccacacgatgaaagaaccactctgcgccttgcattgcaggatatttcacagccaaattctgaggctaatccacctgatggggttttagcggttcctttattgaggcatcagcagaaaattgccttgtcatggatggtgaaaaaggagactagtatctcgctttgctatggtggaattcttgcagatgatcagggccttggtaaaactgtatcagccatatcactgattcttactgagcgcccaccagttccacagtcatctactaagaacgagccatgtgaagctgtaactctagatgaagacgatgactgtattggacctcattcggaaaagctgatgcggacatgtagctctcaagtgacaagtaacacagtgaagcaagaaaatcctattgtagcggttaaggcaaggccagctgctggtactttggttgtttgcccaacaagtgttttgcgacagtgggcaggagaactgaagaacaaagttacaagtaaagctaatttatcttttctgatatatcatggtagcaatcgcaccaaggatcctaacgaacttaccaaatatgatgttgtgcttactacatattctatagtaagcatggaagtaccaaaacaatcaaatcctgatagtgatggagaagagaaagggaagcctgacccgtatggtgcacctgtgtcctcttcagggagcaaaaagagaaaggcatcctcttctaagaaaacaaaaaataaaagtgttgcagagagttgcttgcctgaaaaacctcttgcgaaagttgcttggtttagggttattcttgatgaagcacaaagcattaagaactaccgaactcaggttgccagggcttgctggggtttgcgagccaaaagaagatggtgtttgtctgggacacctatacagaatgctgttgaggatctctatagctacttcagatttctcagatacaatcccttacgctgtatataagcagttttgcactctgataaagattccaatcagtaggaacccaaataacggttacaagaagcttcaagctgttttaaagccggtaatgctacgccggactaaagcaaccatgcttgatggggaaccgatcatatccttaccacccaagactgtttcacttaagacggtggacttcactagcgaggagcgtggtttttataacactttagaagttgaatcacgagaacagttcaaggaatatgcagctgctggtactgtaaagcaaaattatgtcaacattctattgatgcttttgcggctaagacaggcatgcgatcaccctcacctagttagaggctatgactcctgttctagttggatgtcttcgttggagatggtgaagaaacttcccatggaacggcagcacaaattacttatttgcttgcaatcttgttctgcgttttgtgctctatgcaatgatgcgccagaagatcctgttgtcactctatgtggtcatgttttttgcaaccagtgcatactggagcaactcactggtgacgacagtgtatgcccagtgtctaattgcagagtccgactaaacacatcctcactcttctccagaggcactcttgaatgctctctgagtaaattagcctctgatttcaagtctgatgatacatgtatggaaatgatacatgctgaaaagcgccctgggatggattcatcctacgcatcttcaaaattgagagctgcattagatattcttctctcattgcctaaaatagatcccactattgatagcaaatgttcaatcgggattgaatctgagaagtttgatggaaagggtatttcagaacaaactgacaccaagttgacagagaaggccattgttttctctcaatggactagaatgctagacttgcttgaagtccatttgaaagcttctcatgtgacatatcgaaggcttgatggaacaatgtctgttgctgcacgggataaagctgtgaacgacttcaatatggttccagaggttactgttatgatcatgtcactcaaagctgcaagtcttggcttgaatatggttgctgcctgccacgtacttatgctagatctttggtggaacccaaccaccgaggaccaagctgtggatagggcacaccgtattggtcaaaaacggcctgtcacggtatcaagattaactataaaagacaccgtggaagatcgtattcttgctctccaggagaaaaagcgggagatggttgcttctgcgtttggagaagacaaatctggttcccgacagactcgattgaccgttgaagacctgaattatctgtttatggtgtagaatcgctcctgagagtgaacagttttgctcattggattggtgttagacgtggtagataaaaatgttctctgaaaaaataacaaaatgctttcatttagggattattagttcttgtagcttgtacagttgcagagatttaggggttgctagcgacgtgtcttccaattctttttgcacgggaagcagtaagatgctgaactaggtgaattcttcagatagctgctatagtgcctgttaacttggggggtgttttctatgtactaatttctagttcctccattttattttcttttacttcctaaattgtcaaacacagatactaaaatagagataatctctcttttagtctatgtgtttagcaatttaggggctaaaagggactaaaatagagagactaaagacaccccttaatgtaatgaagataacgacaatgaagctcagatgatatatatgtacatattcttctcgtatccgataaaccatcgagaatattgggccatattacggagggcttgttctcaaccatctgaatcactctggcagatatgacttctgctttggtgggttgtgtgttccata

SEQ ID NO: 219786 - DNA, 2467 bp, Zea Mays
tccgctccacccactcccgctctgctcccgtcgatctgccatcctctgcctgccccgcttgctccgcgcgtctgctctagtgatttgagacggagatccgccagagatcgaggagccggagagcggcgtcgacgagggatggacgtccacggcggcggaacgggagccggcaagctgacgcggacgccgtcctcgctgctgcgctcgccaacggtgcgcaactgctcctcgttccaggccgtggttgtcgaggacccggagcccgacgacaagaaggcacaggcgcaccccaagcctccgccccaccacttccaccccggcggcggctccaaccacccgctgctcgtcctcgtgctcccgctcgccttcctgcccctgctcctcctcctccgcggcggcgacggccgccacctcgccctcctcgcggcgtccgcggccgccgcgctcgccgccgccgcgggggccgcgcgcctgctccggggacgcctgcgccgctcgccgggctccggctccgtccagtggttcatcggggacgacgacgacaagccgcagaagcgggcggacaaggccgccgcggcgccgcacggccgcgtcgtgcgcgagggcgtcgagttctacagcaatggggactgctacgagggcgagttccacaagggaaactgcaacggcagcggcgtgtacaacttcttcggcaagggcaagtacgagggcgactgggtcgacggcaagtacgacggctacggcgtcgagagctgggcgcggggcagccggtaccgcggccagtaccgccaggggctccgccacggccacggcgtctaccgcttctacagcggcgactgctacgcgggcgagtgggccggcggccagagccacggcatcggcgcgcagacctgctccgacggcagctcctacgtcggggagttcaagtgcggcgtcaagcacggcctcgggagctaccatttcagaaacggtgaccgttacgcgggcgagtacttcggggacaagatccacggcttcggcgtctacagcttcgccaacggccactgctacgaaggctcgtggcacgaaggcaagaagcagggattcgggatgtacacgttccggaacggcgacaagcgatcgggggactgggattctgggacgctcaagacccccttgcccccggccgatccttctgtccagcgagccgtacaggctgcacagcgagctgcagagaacgcgtttcgcttgcctagagttgatgagcaggtccacagggcggtaatggccgcgaacagggcggccacggccgctcgagtggcggcgatcaaggcagtccagaacaggatggatgggaagttttgtgagacctatgtgtgaattgctgtgtgcgagaccatgtttcgctctctctctctctttctaactgtacattagggtagtgaaggacaataactaatcagtgaggtgagacgacgaccggggcagcacaaccgcgcgcttccgagtcagggttcagcaacgagacgacgggagcctgtctgacgaagagcggagctggcagaaaccatttgcgagaaacggccatatcgccatggctgtcggaggggttccctcgcacctttccttgcaacaagctgtaactgtacatagatccaggcggtgtatcaatggtggagagcgagttttttcttcttctttccagtgcccttctcagttttcatttactcctcaattatgtctcagtaggggggatgtgtgcagggcactggggccactgcttacagtcacaggagtctgttagctttgcatctgcgtctccatttctccaacctaaatcttgaccgcttctcccatgtgcagtgattctccgtttgcaaatgtacttggaggtgcacatgggggaaggactgtaaatctccccgcttgtcctgccctgcaatgcaacccaagcgtctctggtctggcacagatggcatgaataatttccagtggcctgttgtgttgtcgatccactccctgctccctacctccctgagcccactgttttctgaaacctagagagagagagagagcaattcacagctttcggtcccctcacagatctttgcaccgggggcgtgaatgctggagaaaaagggttccggatcgcggaaatgtgaggctggcacaacgcattgttggttgccctggatccccctgttgcttcaaatttctcgcattattataggacagctatgtatgcccatctctcatacagttatccttccgctgcaccatgtgagataacgtcactcattccatcgtgtcagaagtggtgataattctgaaccttttgtccccgtatacatgatgttcttatggatcattcattcattcattgtactgcttcgggaacagtgcggtgatgaaatgggtcggttgacctgtaaaatactaaaatgtcgagctcaggagcgtgaacatcggaacatgcacagatggcccc

SEQ ID NO: 219787 - DNA, 2394 bp, Zea Mays
tgcgtgcactgcatccggcgcggcccggtccaccgcggcgggaggagtagagtaggcctctgccgacgagggtgcgctgcttgctgggagcctgggagtgtgcaggagatggccttcgccgtcacgctcacgccgcttcgggcaactgctgtccttgccggatggaggcggcgcccaggggtgactcctccgcggttcgccgtagtcctggcgacgtctaccggagtcggcggcgaacggaccccgccgacgttcaggcgcctaagggaggagctcctccagctccacgccgaagccgacctcacccaatccaaagcaaatagcgagagggtaagacttgtgcggttgactgaggcggctgagaatcttaagaagcgagctgcaaccagtgtccgaatgggcaaagagagcgaggctgtggatttacttgtgcagaagaagaaattgaccaaagccctagagaacattaaagagcgcattgaggtgcttgacatgctttcggcaaagattagtgaggtgaatggcatggttttttatcttgtaaaatgtgactaatttatttttctagaatgttgtgtattcgttagcttcattccagttactaaattactgaacaagccattgtttgcatttgtgtaagataatttgttgctcccttttgaacttttgctgcagcacagaattggtattttggtcagctcttgctgtccatctatagtactgtagaggtatgtgaataggccatccttctagtggcatacatcagccatgtagtagtagttgggtgctgagctaagtcatgtagtagtgtaccatagaggcgctagatttgtatatatactagccgattactaggcgatgcaatagagcaaggcagttcatttgctgcacattcagacttgtgctatgtgtgtgctctgttctcaagtgttcttcttctacctctaaccgtgagttgtgagagtgagtttgtgagctgattgctcacctctgcaggtgcctgggttgccaacaatttgtatgttacactcactgttcatgcagtgattcttctgatcacaatctgaaattgacaagtatttgcttcaactatggataagtgcagtactcgggaacttattgttgtgaatttctgttcttaaatcttatggtatatgcaaccctgaatgaccaattttgttggattcaggtaatttcgatgaagcaaaacatgttaattgagtatgccttgcgtccagagacatctaatggtgaagactctgatgacaagataagggttttctccagtacagtcaatgttggaaccaatggagctgggagtagcgattcacacccaaaatcagttgaaaaggaatcttttgagttgagaaatgaggcacatgcaattgcaagcatggctgacgacgctgagcaaagtgcacttcagatgtctgatagcttctcatttttgaacaatagtgacccagcaaactacataaagaatcattcagcatacgatgaccttatagagcatattaatttgcagatgaaatcattggaatatgaaattgaacagttcatcaattcccaatcagttgaagaggtgggcagtgagaagcagagaagtgacaagtggcaaaggttatctgacatacagatgcttataaaggaaactagagaaaagattgcgaggattttgggtatgatagtagaagagactgaatctgggacttaagatgatagcaaactacaaaacagtgaattagtgtcatccatccaccatctttttcgtgggtacccaagttgacaatggcttaccagtagttggatcttgcaagttggtcccagtgccatattccgcaggactactccgcctaacaactagagggaatgcggggtaaccttcttctctggatggaagcatttcgatttgttgctgtgctgagatcgcattgtcggctatggatatacagtacaggtcgcacttactgaaagcttctgaagccgaaaaatcttgaccggatgagcttggttgccgaccatatccaggtcatccctctgcgtgcatttgcatagagaaggctgcaggcctgcagcctagatatttcacgagcacttcataattttcaatgccatccaatgcttcaagctttctgacatgagtgtgcagatgatgaaaaactccaagatgggtctctgtacctactatacaacaagaagaatccatgtactaaatgagaatgcgagattgttaatttgttattatatgctccttgataatttttttctggttctattttgtttcctgaaccttgcataccgcatgtattatgttactagaaatagaacgtctatcagcacagcagacagcagctccctttcactggatttgatgtcgcctaagactgtctacag

SEQ ID NO: 219788 - DNA, 2630 bp, Zea Mays
cgtcgcatctcacggcctgtcccgattcattcggatttccttccgccttccgacagcggctgtctcggcgacccaaccccagcctgaccccacctcccgccgccgccgccgccgccgccgccgcgccttcgtcgtcaggagcagggtcccggtggctgcgtctctctcccctgcccccctgctccacactcggttcacgcgtcggctcgctaccgcaggccctcgactcgtacgcccgtccccggcggcgatccggccggcaccgtaaccctaggactccgacggagcaggaatgatgagtcatgaacagcaaattgtccctcctagtaagggttctgtgaatggattcccccatagaaaactggataaggagggcagtggaacgcaaagtagaataaatttggtgaggtcatcctctggtggttttactaattcaggcgtcgtcttaaaaatggctcaggtcataaaggatggttctgccagaggacaaagatatcctgctgttcttgtaaagaaacctgagactatgataataccggcaagggagcttgtacaagtttttgccaaggacatagaacttggcggcgagctgccaaaagttcctggcaatgacaaaaggaaggacttgctgattgattctgctattacccgctatcattatctcgaagagagggaacttgagcgctgggcaccagatggaggagattcagagtgtattgaactggagaagtatgaccggaagggaaataggagctgggaccagtttgaaaccaatgcagcattatttggggtaaagagtactttcaatgaagaaatttataccacaaagcttgagagaggtcctcacatgagagagcttgaaaagcatgcttcgagaatagctagagaaatagagggagaagataccagagatattcaccttgcagaggagagaggcttattcctgggtgatgacctggaccatgatgaagagataaaatattcagcagtgcgtagagacaccgataacagcaagtacaagccaccatttactaaggtcccaagcagtacatgccatgttgattcgtttaacaggacagtcaatattgatccgaatgattcactggcatgttcatcaacaatggacaaagaatcatcatcccacatatttgatgacactgatgcatctgccactatccatacaaatagcgttagccagccaacatctgattatctgtcagatagacccttgtccaatgatgaaaacaggttggacagaaagctgaacaaagagagtaatgaaaacatggataacagaaagttgcaacatgaggataatttacctgatggtgccagacctcttatttcggaagcgttggatgggcgatcctcaagttcacatgcatatgaaccgtctttttctggtcaaggattcaaatctccagaaacacccgattcgacagtgcctgtcaagcatccttctgcgatggaacctgtgacttcctctcaaagacctggcagctcaacatcgtcaacatcagagcgcattggtgcaaactcagccgcgggtgctcctggcttgtcaccaagctcttcaataggatctcttaccgctgaaaaatcgactttgaaccctaatgctaaggaattcaagctaaatcctaatgccaagagtttcactccgtcagcatctctgaggccaccacaccctacatcatctgatgcatcatattactatcctaataacatgccggcgatgccacttggacccggtttgcctgtgggcatggggttcccaccggcatatggcgcccagcctgtcatgtacaatactcaacctggagcatcaccgcacggttacatgcatcctgctggtccacagtatgggcaacaaatgacgattggggggcagactcgtccagtttattattatgcgcctgagatgcaacaatacagaggaagaaacttttagatataccattctgaactgctcttagatggaagtcgctgcaatccccacaagtgggattttgaccagcaaaaaccgctattacaatggaaaaaactggtcctgttgtgttgctcggattggttggacaaaaaagcgcaccgactttgtgttgctcggattgcctggtcaaaatgctcttcattgtcctgtatcagtgttgctcggaagcaggttcactggaatttcatattatttttgtcagactattgatgttgtaaattgaattgcgggtcatctgttcgacccggaaatgacattcataaatgtgtgaggttgccccatgtaacatttatgtgttccttaacgttgttctgatgtaagatttggacgaaatggatcaaattgctgacctatctgctcgtttatacccagctggagtagcaagcatggaggggacgtagagtcttactagcgtttgggatggagacctaaaaattgttagggcttacgtttataatttgcgaaccagggtggttataagattgttgccattatcgtgtagtcactggattgaaaggtgttggtgggcattgacatctgatgtggttcatgtgttggtaatggacggcggtattatagggaagtaggtagtgtttggtttaccatgggtaatggtatcgcaatggaagttaaaaagcgg

SEQ ID NO: 219789 - DNA, 2778 bp, Zea Mays
taacacctcacgccgtcgcatctcacggcctgtcccgattcattcggatttccttccgccttccgacagcggctgtctcggcgacccaaccccagcctgaccccacctcccgccgccgccgccgccgccgccgccgcgccttcgtcgtcaggagcagggtcccggtggctgcgtctctctcccctgcccccctgctccacactcggttcacgcgtcggctcgctaccgcaggccctcgactcgtacgcccgtccccggcggcgatccggccggcaccgtaaccctaggactccgacggagcaggaatgatgagtcatgaacagcaaattgtccctcctagtaagggttctgtgaatggattcccccatagaaaactggataaggagggcagtggaacgcaaagtagaataaatttggtgaggtcatcctctggtggttttactaattcagggcatggaagccattccagggaccggctaatctatgttctaacacaacttattgggcatcatgtggacgtgcatgtgaataacggctctataatctctggaattttccatgcaacaaaccctgacaaagactttggcgtcgtcttaaaaatggctcaggtcataaaggatggttctgccagaggacaaagatatcctgctgttcttgtaaagaaacctgagactatgataataccggcaagggagcttgtacaagtttttgccaaggacatagaacttggcggcgagctgccaaaagttcctggcaatgacaaaaggaaggacttgctgattgattctgctattacccgctatcattatctcgaagagagggaacttgagcgctgggcaccagatggaggagattcagagtgtattgaactggagaagtatgaccggaagggaaataggagctgggaccagtttgaaaccaatgcagcattatttggggtaaagagtactttcaatgaagaaatttataccacaaagcttgagagaggtcctcacatgagagagcttgaaaagcatgcttcgagaatagctagagaaatagagggagaagataccagagatattcaccttgcagaggagagaggcttattcctgggtgatgacctggaccatgatgaagagataaaatattcagcagtgcgtagagacaccgataacagcaagtacaagccaccatttactaaggtcccaagcagtacatgccatgttgattcgtttaacaggacagtcaatattgatccgaatgattcactggcatgttcatcaacaatggacaaagaatcatcatcccacatatttgatgacactgatgcatctgccactatccatacaaatagcgttagccagccaacatctgattatctgtcagatagacccttgtccaatgatgaaaacaggttggacagaaagctgaacaaagagagtaatgaaaacatggataacagaaagttgcaacatgaggataatttacctgatggtgccagacctcttatttcggaagcgttggatgggcgatcctcaagttcacatgcatatgaaccgtctttttctggtcaaggattcaaatctccagaaacacccgattcgacagtgcctgtcaagcatccttctgcgatggaacctgtgacttcctctcaaagacctggcagctcaacatcgtcaacatcagagcgcattggtgcaaactcagccgcgggtgctcctggcttgtcaccaagctcttcaataggatctcttaccgctgaaaaatcgactttgaaccctaatgctaaggaattcaagctaaatcctaatgccaagagtttcactccgtcagcatctctgaggccaccacaccctacatcatctgatgcatcatattactatcctaataacatgccggcgatgccacttggacccggtttgcctgtgggcatggggttcccaccggcatatggcgcccagcctgtcatgtacaatactcaacctggagcatcaccgcacggttacatgcatcctgctggtccacagtatgggcaacaaatgacgattggggggcagactcgtccagtttattattatgcgcctgagatgcaacaatacagaggaagaaacttttagatataccattctgaactgctcttagatggaagtcgctgcaatccccacaagtgggattttgaccagcaaaaaccgctattacaatggaaaaaactggtcctgttgtgttgctcggattggttggacaaaaaagcgcaccgactttgtgttgctcggattgcctggtcaaaatgctcttcattgtcctgtatcagtgttgctcggaagcaggttcactggaatttcatattatttttgtcagactattgatgttgtaaattgaattgcgggtcatctgttcgacccggaaatgacattcataaatgtgtgaggttgccccatgtaacatttatgtgttccttaacgttgttctgatgtaagatttggacgaaatggatcaaattgctgacctatctgctcgtttatacccagctggagtagcaagcatggaggggacgtagagtcttactagcgtttgggatggagacctaaaaattgttagggcttacgtttataatttgcgaaccagggtggttataagattgttgccattatcgtgtagtcactggattgaaaggtgttggtgggcattgacatctgatgtggttcatgtgttggtaatggacggcggtattatagggaagtaggtagtgtttggtttaccatgggtaatggtatcgcaatggaagttaaaaagcgg

SEQ ID NO: 219790 - DNA, 1563 bp, Zea Mays
ctcaactgatgatgcccccctgttcctcctgtcatcttctcctcctcagaaacccaccaaccccgtccagccgccggctgtctcggccgccgccgccgccgccgccgccctatcccggtccttcaggcgaaccaggttggtcatggccttcaacaagatcaaggtctccaaccccgtcgtcgagatggacggcgatgagatgaccagggtgttctggaaatctatcaaggacaagcttatattccctttcgtagacctcgacatcaaatattttgacctcgggcttccacaccgtgatgctaccgacgacaaagtcacagtggaggctgcggaggccacactcaagtacaatgtggctatcaagtgtgccaccattacaccagatgaagcaagggtaaatgagtttggcttgaaggctatgtggaagagcccaaatggcacaattaggaatattctgaatggcactgtgttcagagaaccaatcatctgcaaaaacatcccacggcttgttccagggtggacaaaacccatttgcatcgggaggcatgcattcggtgatcagtaccgggcaactgatgcagttatcaaggggccagggaagcttaaattagtttttgagggaaaagaagagcaagttgagctggaggtgttcaacttcactggtgcaggaggagttgccttatcaatgtacaacactgacgagtccatccatgcctttgctgacgcttctatggccactgcttatgaaaagaaatggccattgtatcttagcaccaaaaacactattttgaagaaatatgatggcaggttcaaggacattttccaggaggtgtatgaagctggttggaaaaccaaatttgaagctgccggcatatggtatgagcaccgccttatcgatgacatggtagcatacgcacttaagagtgaaggagggtatgtctgggcttgcaagaattatgatggagatgtgcagagcgatttcttagctcaaggttttggctcattgggtttgatgacttcggtactggtgtgccctgatggaaagacgatcgaagctgaagctgcccatggtactgttacccgtcattaccgtgttcaccagaaaggaggtgaaactagtacgaacagtattgcctcaatctttgcgtggacaagaggacttgcacacagggcaaagcttgatgacaatgctagactacttgacttcacccagaagcttgaggctgcctgcgttggagccgtcgagtctgggaagatgaccaaggaccttgcccttctcgttcacggatcttcaaatatcacgaggagccattacctgaacacggaggagttcattgacgctgttgctgatgagctcagatcaaggctggcagccaactcgaacctttgaaatccttgccgaagttgtggctgcagcagtatgccaaatcattatcattaccgttaccattaccaattggagattgccgtagatttccgcgattatgggaactcatttacctgattatctgatacgtttgaaataaaaggtcgcccattagaatgatttctggttgtctcttc

SEQ ID NO: 219791 - DNA, 1550 bp, Zea Mays
gcccccctgttcctcctgtcatcttctcctcctcagaaacccaccaaccccgtccagccgccggctgtctcggccgccgccgccgccgccgccgccctatcccggtccttcaggcgaaccaggttggtcatggccttcaacaagatcaaggtctccaaccccgtcgtcgagatggacggcgatgagatgaccagggtgttctggaaatctatcaaggacaaggtacaatgtggctatcaagtgtgccaccattacaccagatgaagcaagggtaaatgagtttggcttgaaggctatgtggaagagcccaaatggcacaattaggaatattctgaatggcactgtgttcagagaaccaatcatctgcaaaaacatcccacggcttgttccagggtggacaaaacccatttgcatcgggaggcatgcattcggtgatcagtaccgggcaactgatgcagttatcaaggggccagggaagcttaaattagtttttgagggaaaagaagagcaagttgagctggaggtgttcaacttcactggtgcaggaggagttgccttatcaatgtacaacactgacgagtccatccatgcctttgctgacgcttctatggccactgcttatgaaaagaaatggccattgtatcttagcaccaaaaacactattttgaagaaatatgatggcaggttcaaggacattttccaggaggtgtatgaagctggttggaaaaccaaatttgaagctgccggcatatggtatgagcaccgccttatcgatgacatggtagcatacgcacttaagagtgaaggagggtatgtctgggcttgcaagaattatgatggagatgtgcagagcgatttcttagctcaaggttttggctcattgggtttgatgacttcggtactggtgtgccctgatggaaagacgatcgaagctgaagctgcccatggtactgttacccgtcattaccgtgttcaccagaaaggaggtgaaactagtacgaacagtattgcctcaatctttgcgtggacaagaggacttgcacacagggcaaagcttgatgacaatgctagactacttgacttcacccagaagcttgaggctgcctgcgttggagccgtcgagtctgggaagatgaccaaggaccttgcccttctcgttcacggatcttcaaatatcacgaggagccattacctgaacacggaggagttcattgacgctgttgctgatgagctcagatcaaggctggcagccaactcgaacctttgaaatccttgccgaagttgtggtgctttcctgcgcgacgctttcgaaccgtttttattatgtcgccattttctttccctgtgccaccaccctgatgaatgaagaaggcctgagctaggcgaacatctgcaggctgcagcagtatgccaaatcattatcattaccgttaccattaccaattggagattgccgtagatttccgcgattatgggaactcatttacctgattatctgatacgtttgaaataaaaggtcgcccattagaatgatttctggttgtctcttc

SEQ ID NO: 219792 - DNA, 1278 bp, Zea Mays
ctctctcctccatcccaacgtctccagtctcgcgctctctccccccaaaaacctcgtcttcctccgctcgtctgcgttctcggccatcggtactctccaccggcgctccagagttcatcggtactctctagcggcgctccagagttccagcatgccatagcgtacgccgagggcgataaataatatggtgcaaaatccagcattaatgtttgggagcccaagattcagcaggctaacaaatttggcttgtcctagctctggatctttgggggttcatttaaggaggatgtcaacagtatagaggctggttgatagaaatagaataatgcgtaccaggccacagggtgctagatgttgtgctctggttttattcagataaacaccaagatggctatcgcgactagcattctcaacatctcaaactacgcaggctcccaatgtgatatcagcatcttgatctagaagggcagcggatttctcgagggactacgacgggatgcctctagatgtacaaccccgactcccacttcttcctcttcctcatgtactggaccgattgcagcctagctggcgcgcttgggctactcaagatcctaatctacaaggtttatgtagatgggagtaccaccgtgacttgggagctaacttggataatgatctcttagttctcaagatcagttccaataacatgtggcactactccagtgatatgaccctccttattataactgccaacatataagttacctttcttacaatatattttagtccgctacagcgcccgatagggtgctattttttctagtttaattaaggctcccttggaacaatggatataaaagtactgtgtccatcctatgatataaggcactgtaaccaatttttagttttgttccatgatataagggcatgtacaagctagatgttataatggtgtttgggatagctccaggttctagctccagtgtggagtatttttaatctaaataataaataaaatgacttatctaaatgtattttaaaggtttacagttctagctccacgattttctcaagcatctagttacatgctctactaactccaccaatttttctggagctaaagttttccaaagagggcttatgttttggttctcaagacaatagatagtagatacatctaagaatctctatacaaccaatgtaattaagggcttatttgggaacacggtatttttgtagttccaagacaatattgtggtatttgtgcataccatggtattttagactaaatgtttg

SEQ ID NO: 219793 - DNA, 889 bp, Zea Mays
ggatgacttgcttcgagcagctccattaagcgcatgccatagcgtacgccgagggcgataaataatatggtgcaaaatccagcattaatgtttgggagcccaagattcagcaggctaacaaatttggcttgtcctagctctggatctttgggggttcatttaaggaggatgtcaacagtatagaggctggttgatagaaatagaataatgcgtaccaggccacagggtgctagatgttgtgctctggttttattcagataaacaccaagatggctatcgcgactagcattctcaacatctcaaactacgcaggctcccaatgtgatatcagcatcttgatctagaagggcagcggatttctcgagggactacgacgggatgcctctagatgtacaaccccgactcccacttcttcctcttcctcatgtactggaccgattgcagcctagctggcgcgcttgggctactcaagatcctaatctacaaggtttatgtagatgggagtaccaccgtgacttgggagctaacttggataatgatctcttagttctcaagactgtaaattaccttttcctgcaccaagttgtgaagttgtttcctctgagatgaagcaaaaccaataagtatcttttcaaatttcagaaatcgcactgaagccatgagtgcttcatggaattcagtcatctgttggggtacaaatatgaactatagtttgcccccaaattttctctctttattttttcagtgcattaacattgatagtattggttttttcctaggaaattatgtctaaatagaagttcataactaattctgtaactttgatattaagatgggtgttcgcctgatgatttttaaatggaaaaggagaatacgatgagttttaaaa

SEQ ID NO: 219794 - DNA, 1053 bp, Zea Mays
attatagtcatctttcatgtttccagcctccttacttaccaggctttgccgtttagcatttagaaccccaccctgttagaatggaacctggccaagcattcagttcttttgtgtcaataagactacagcagaaatgcagaatgtcttggagagtatagttgaaaatcggggaatgagttaatgttcttgctgcttgacatatctagtttatcatgggtcctatctgtggtgtgccagacttcaagatgaggggaaagaagagtgatgagctcgaacctgtcgatgctggcgatgaagatgatgatggtggtgacgatggggacgaggatggtgactttggggaggagggtgaagaggacgtctcagaaggggagggatatgacaacccaaagggcaatgagaccaagaagcaaagaggtgatcctgaggaaaatggtgaggaagatgaggaagaaccagaagatcaggagggtggcggcgacgacgatgatgacgacgatgacgatgatgagaacggggatgacgaggacgacgacaatggggatgacgatgaggagggtgtagatgaagaagacgatgaccaggacgaggatgaggaggaagatgatgatgaagactcgctccagcccccaaagaagaggaagaagtgaagatcttctgccgctttagttaccgtgcgctgagttctgcctggcttttcgtcatatcctcgcatttcaactttcccatagagagttaagaaggatccacacgttcagcagcacgtgtgggcttgtaggagctttatgatttgaggcaattagggacaactcttatgtcattgttgcttgcttctgtggagtcgaacagatgtttcgctaacataattcgacttgagtgatgaaagcctccagattgaatatgccttctcttttatctcgtatggaatcattgatgcagccctggttgatagcgttccttcaataaatgaattatattggcatcatgacagcttcatgtgaattgcacgtttatactgtgcgttcaaatctcaactaatgtatgactgatcgg

SEQ ID NO: 219795 - DNA, 944 bp, Zea Mays
aaaggtctttctttcttaaacgccaagcctgtccgccgtcctttgccgcttgcatttcactgcgagttgcgaccgccaagttggtccacagttacttaacagtgcgggtcctatctgtggtgtgccagacttcaagatgaggggaaagaagagtgatgagctcgaacctgtcgatgctggcgatgaagatgatgatggtggtgacgatggggacgaggatggtgactttggggaggagggtgaagaggacgtctcagaaggggagggatatgacaacccaaagggcaatgagaccaagaagcaaagaggtgatcctgaggaaaatggtgaggaagatgaggaagaaccagaagatcaggagggtggcggcgacgacgatgatgacgacgatgacgatgatgagaacggggatgacgaggacgacgacaatggggatgacgatgaggagggtgtagatgaagaagacgatgaccaggacgaggatgaggaggaagatgatgatgaagactcgctccagcccccaaagaagaggaagaagtgaagatcttctgccgctttagttaccgtgcgctgagttctgcctggcttttcgtcatatcctcgcatttcaactttcccatagagagttaagaaggatccacacgttcagcagcacgtgtgggcttgtaggagctttatgatttgaggcaattagggacaactcttatgtcattgttgcttgcttctgtggagtcgaacagatgtttcgctaacataattcgacttgagtgatgaaagcctccagattgaatatgccttctcttttatctcgtatggaatcattgatgcagccctggttgatagcgttccttcaataaatgaattatattggcatcatgacagcttcatgtgaattgcacgtttatactgtgcgttcaaatctcaactaatgtatgactgatcgg

SEQ ID NO: 219796 - DNA, 1021 bp, Zea Mays
tccgcgcccccgaatattcgcttctcatgacaccgaaagattcctactcgatctccagatattttcccccgcctcgtcaacagcccgtggggtttttctttttcttttcccttccatctagaaaaaccggcgagaagctgctgtcccgtttcagtggcttaacttctaagcaacatgtttcagggtcctatctgtggtgtgccagacttcaagatgaggggaaagaagagtgatgagctcgaacctgtcgatgctggcgatgaagatgatgatggtggtgacgatggggacgaggatggtgactttggggaggagggtgaagaggacgtctcagaaggggagggatatgacaacccaaagggcaatgagaccaagaagcaaagaggtgatcctgaggaaaatggtgaggaagatgaggaagaaccagaagatcaggagggtggcggcgacgacgatgatgacgacgatgacgatgatgagaacggggatgacgaggacgacgacaatggggatgacgatgaggagggtgtagatgaagaagacgatgaccaggacgaggatgaggaggaagatgatgatgaagactcgctccagcccccaaagaagaggaagaagtgaagatcttctgccgctttagttaccgtgcgctgagttctgcctggcttttcgtcatatcctcgcatttcaactttcccatagagagttaagaaggatccacacgttcagcagcacgtgtgggcttgtaggagctttatgatttgaggcaattagggacaactcttatgtcattgttgcttgcttctgtggagtcgaacagatgtttcgctaacataattcgacttgagtgatgaaagcctccagattgaatatgccttctcttttatctcgtatggaatcattgatgcagccctggttgatagcgttccttcaataaatgaattatattggcatcatgacagcttcatgtgaattgcacgtttatactgtgcgttcaaatctcaactaatgtatgactgatcgg

SEQ ID NO: 219797 - DNA, 2602 bp, Zea Mays
atttattctacctctttccaatgtcccattttccttgtgaatcactagtgtcgcaaatcccaatctcccagcttgcgcctaaaccctagcttgcctatcgatggcgccgaagaagcgcaaggccgatcccgccgagtcccccgccgccgtggaggcagccaccaccaaccaccgccacgagccggcgtcctcggagcccaagccacgcggctccatctacttccccatcactgacgacccgcccgaacccaacgccgccgaagaggacgaggacgagggcgccggcgacgacgaggacgacgcggaggacattgtcaagctacttgagccgctgtcgcgggagcagctcgttgcgctgctccgcacggcggcggaggcgagccccgccacgatggcggccgtccgccgcgccgttgaggccgaccctgccagcaggaagctcttcgtccacggtctcggatggggtgccggcgccgaggacctccgctccgccttctcacgcttcggcgagctcgaggactgccgcgtcatctctgacaagcaatctggtagatccaagggctacgggttcgtcctcttccgctcccgccgctctgcgctccgcgccctcaaccgccctcagctccaaatcggtggtcgtcttgctttctgtcacctcgccgcctcaggccccgcacccccagctcagtctcagaaccctatctccaacgccaaccccaatgctaactctaactccacgagcaacgcttctggatcctcatcatcacaaactgacaatatacaacgcaagatatttgttggtaatgtgcatgctgatgtggacgtggaccgcctatatgagtattttgcacaatttggtgagattgaagagggcccgttgggctttgacaagaacactggcagaccaaagggatttgcattatttgtttacaagtctgtggagagtgctcgccgtgctttggaggagccaataaagaattttgatggaaagacactcaatgtgcagaaagccatagatgggaggaccaagggctcatctggaatgaatacaaatactaactccaatcccactactgcatctgtggtcgccgcccagatgactgctccttccagtgttgccatcagcccatatgatgcatcagcatatagtgctactgtggttcctgacatgagttttgcacagcaagctgctatgctgggattaggtgcacagcaacaggcattcactcaacccaatgcaatgcttgccatgatagcagcaatgcagaacccagctgcgctagggatgagtccagccatgcttgctgctatgaacccagccttcgccgctgctgcattgggtgcaggggggcagcaggcacacacagttggtcttacaggttttggagctcagggttttgggacaccgtcgtttggagcaggtgccgctttcccaaatgcagcaggtgttcaagcagcagcagctgcatatcaaggaagtggagctcctcctggctttcaagggccacctgggtttcaggttggccaggcaactacccagacaagcactgcagcggcagcggctgccgcagctgccactgctgctggttatcaggctggggcatctgggcagggccaggtgcctggttctcaggtcggaggcactggttttcagggtggatattgacagaactagccgtccagatggacaccgccgcgcccctgcaactgaaagcctgcgccggcgacgccgcggagaagctgctgctcgccgtcgcagccgagggtcctatctgtggtgtgccagacttcaagatgaggggaaagaagagtgatgagctcgaacctgtcgatgctggcgatgaagatgatgatggtggtgacgatggggacgaggatggtgactttggggaggagggtgaagaggacgtctcagaaggggagggatatgacaacccaaagggcaatgagaccaagaagcaaagaggtgatcctgaggaaaatggtgaggaagatgaggaagaaccagaagatcaggagggtggcggcgacgacgatgatgacgacgatgacgatgatgagaacggggatgacgaggacgacgacaatggggatgacgatgaggagggtgtagatgaagaagacgatgaccaggacgaggatgaggaggaagatgatgatgaagactcgctccagcccccaaagaagaggaagaagtgaagatcttctgccgctttagttaccgtgcgctgagttctgcctggcttttcgtcatatcctcgcatttcaactttcccatagagagttaagaaggatccacacgttcagcagcacgtgtgggcttgtaggagctttatgatttgaggcaattagggacaactcttatgtcattgttgcttgcttctgtggagtcgaacagatgtttcgctaacataattcgacttgagtgatgaaagcctccagattgaatatgccttctcttttatctcgtatggaatcattgatgcagccctggttgatagcgttccttcaataaatgaattatattggcatcatgacagcttcatgtgaattgcacgtttatactgtgcgttcaaatctcaactaatgtatgactgatcgg

SEQ ID NO: 219798 - DNA, 705 bp, Zea Mays
ctcaacaatgccgcatgtaaactaagacttaatgattacaaggaagcaaaggaactgtgtaccgaggtcctggaatctgacaacacaaacgtgaaggccttgtacagaagggcacaggcacacatgcatcttgttgatcttgatttggcagaggcagatatcaagaaagctctagaaatagatcctgacaacagggatgtgaagatggggtacaagaggctaaaggagaaggtcaaggagtacaaaagaagggatgccaaattatatggcaacatgatttccaagttgagcaagcttgaagacacggaagataatggccaaatgagtcagacagtaaacaagaagtgtgggctcttatggccactgtcggaaatggttaggagattcttcactgccgatggtagcaagggtttcacgctgtggcctgcgctgaggctattgatcccggatgaatggagaactggcttgaaagctcttcgagctgacagtattagtaaactgaagaaagcatttccagaactggtccaggaggtttcaaggccatccaatttccaggatttctacatatatgcatttcgttattgcctcacagtattaggcttgcagttccaccctcaggttgacaagcttaataattaccttatgtaccaaaatgactacaaggcgataacaatggaccagtggatgggatttattcgtttgtaa

SEQ ID NO: 219799 - DNA, 2742 bp, Zea Mays
aattctccttgtctctctcactctctctgtctgtgggaggaagttgagaaggcgaggagccagacaagcgacgcggctccactcccttctcaggcggccccctgctgctcaccgcccagctccaggtacgcgcgaggtgatatgcacgaggtcaaaagtgggcgcgggaaataggtgctatgcgctcctgcgagaggattggggaagactttacctcactcaaatttacgggaacagtcaccctcgatgcgtgacgcgaaaaaatgggagaactttgcatgagctgttggagttattagagaaataagggtcggcttggttgcccgaggcctacccagcgcctgcgatggaggagaaggctatggcaaatggagcagcgactgctgatgttgctgctcctgataataaggataacaccaaggaagaggctagcgagagcaaggaaccagcagccaatcaggatgccgatgaccagaacaaaggcttggaaaatggcgccgagggccagtcaggtggagatgtcaatatggcagatgctgaggtcacagaggaaggcgatggtgatcctggtgttgcaaagcaggtggattctgaagatatcaaaacggatgccgatacaaaggaagatggcaatgcaaaggcagaagaagttgaggatgtcaagatgactgaggctgacacgggaagtacagaggtcaaagataaagaagagaagggagatgaagttgtggacacaactgtggataagcaggatgaatcgaaggagcaagaggaaggtgtttcggctgagcaagatgagaagcaaggagaggaagcagaagaaaaaggaaaagaaatggatgccgatgagaagcaagaagaggaagcagaagaaaaaggttctgctgatgagaaagatgaagatgaaggtgaccagaagatggaagagaataaggaggagactccgaagaataagaaagcaaggagtgccagggatagaagccagggaaatgataataaacatgatggatcaaaatctagggaagccaaaagtttgctgaacaccccaagcccatatggtaccgatcgtcctcaacgtgagaggaaaatagtggagaggttggttgaggtgattgagaaagagccaaacaggaatttcgtggttgagaagggacgagggactcctctgaaggatataccaagtgtggcacacagaatatcaaggaagaaaccttctgatcttaaatttcttcacagtattctttttgggaggaaaggcaaggctgtcgattttaaaggacatatactccagttctctggatttgtttggcatgaaagtgatgaaaagcacagagtcaaggcaaaagaaaagcttgacaagtgtgtaaaagaaacgctgttggacctttgttggacccttggcattccaactccaaaagcaaacattagaaaggaagatattgtgtcaaagctgttggactttattgctgaacctcactctgcagctgattctgggctctctgatgaccagggttcaaattctaaaaaacgcaagagaggaggtgaaagtgcacgtaagactcctgatagcacacctagtaggtcaaggaagaaatttatcaatgacagcacttctagtaaaaggcagaaaaaagcgctcgagtatgatactgatgaggatgaatccatgaagtcagacagtgaggaaaacagagatgaagattcagatgaagctggtgacaaacaggaaggtgactatgtatctgggaaagaaaaggcagggaagttctcagaggtaaaagaatcttcaggcaaaaagaaggcaaacacagggagtggccaccaatcaggtcctccaaagaaaattatcagaagtccggtaaaaaaagtatcatccaagattcatgaggaaaaagaaagccccaataatagtgcaaaggttttttctaggaagaagaaacccacagcagaaaaggagatcaaagaaaaaaagtcatcaggcaaaaaggtgacaaagggtaaaggagaatccgttgaagcagttcttcccagcaaggatgatctgaggaagaccattactgaaatcctcaagaaagttgacttcaacacggcaactttcagtgacatccttaagaagcttgacaatcactataaaatggatctggccccaaagaaagaagccatcaaagttatgatccaagacgagttaaccaagttatcagaggaggacgaaggagagggagccggagacaccgagaagaaacagcagcagcctcaggcgaaggagatcgaggcatgaggattcgtggaaccccatagctgtagtagccgctgttaattatcctgtacttaatgtgtttgtttgcgtcgcctgtacaggcatctcgttgattatcgccgcaccaactcgagaacctcacccctgatcgtgtatgttatggggcatgatgtgtaggcagcctccacacctttttagctgactgatcggagagttactcctaggcaactcttgtttctagatttgcaaatggtgtctgaaactctgcgtttgctgcggcagaacgtgtacttaattgttcgtgataggtctgaataacacatggatggtatcagtctgtagcttattttttttacttgatccgtttcttctgtgggttgtgatttgtgaatgaccaaaagatggatgctgtattccagtttctgttctctcagagtaggcatgcaagaataacagctgaaccaaaccgagaaacagaacagtgg

SEQ ID NO: 219800 - DNA, 2731 bp, Zea Mays
aattctccttgtctctctcactctctctgtctgtgggaggaagttgagaaggcgaggagccagacaagcgacgcggctccactcccttctcaggcggccccctgctgctcaccgcccagctccaggtgatatgcacgaggtcaaaagtgggcgcgggaaataggtgctatgcgctcctgcgagaggattggggaagactttacctcactcaaatttacgggaacagtcaccctcgatgcgtgacgcgaaaaaatgggagaactttgcatgagctgttggagttattagagaaataagggtcggcttggttgcccgaggcctacccagcgcctgcgatggaggagaaggctatggcaaatggagcagcgactgctgatgttgctgctcctgataataaggataacaccaaggaagaggctagcgagagcaaggaaccagcagccaatcaggatgccgatgaccagaacaaaggcttggaaaatggcgccgagggccagtcaggtggagatgtcaatatggcagatgctgaggtcacagaggaaggcgatggtgatcctggtgttgcaaagcaggtggattctgaagatatcaaaacggatgccgatacaaaggaagatggcaatgcaaaggcagaagaagttgaggatgtcaagatgactgaggctgacacgggaagtacagaggtcaaagataaagaagagaagggagatgaagttgtggacacaactgtggataagcaggatgaatcgaaggagcaagaggaaggtgtttcggctgagcaagatgagaagcaaggagaggaagcagaagaaaaaggaaaagaaatggatgccgatgagaagcaagaagaggaagcagaagaaaaaggttctgctgatgagaaagatgaagatgaaggtgaccagaagatggaagagaataaggaggagactccgaagaataagaaagcaaggagtgccagggatagaagccagggaaatgataataaacatgatggatcaaaatctagggaagccaaaagtttgctgaacaccccaagcccatatggtaccgatcgtcctcaacgtgagaggaaaatagtggagaggttggttgaggtgattgagaaagagccaaacaggaatttcgtggttgagaagggacgagggactcctctgaaggatataccaagtgtggcacacagaatatcaaggaagaaaccttctgatcttaaatttcttcacagtattctttttgggaggaaaggcaaggctgtcgattttaaaggacatatactccagttctctggatttgtttggcatgaaagtgatgaaaagcacagagtcaaggcaaaagaaaagcttgacaagtgtgtaaaagaaacgctgttggacctttgttggacccttggcattccaactccaaaagcaaacattagaaaggaagatattgtgtcaaagctgttggactttattgctgaacctcactctgcagctgattctgggctctctgatgaccagggttcaaattctaaaaaacgcaagagaggaggtgaaagtgcacgtaagactcctgatagcacacctagtaggtcaaggaagaaatttatcaatgacagcacttctagtaaaaggcagaaaaaagcgctcgagtatgatactgatgaggatgaatccatgaagtcagacagtgaggaaaacagagatgaagattcagatgaagctggtgacaaacaggaaggtgactatgtatctgggaaagaaaaggcagggaagttctcagaggtaaaagaatcttcaggcaaaaagaaggcaaacacagggagtggccaccaatcaggtcctccaaagaaaattatcagaagtccggtaaaaaaagtatcatccaagattcatgaggaaaaagaaagccccaataatagtgcaaaggttttttctaggaagaagaaacccacagcagaaaaggagatcaaagaaaaaaagtcatcaggcaaaaaggtgacaaagggtaaaggagaatccgttgaagcagttcttcccagcaaggatgatctgaggaagaccattactgaaatcctcaagaaagttgacttcaacacggcaactttcagtgacatccttaagaagcttgacaatcactataaaatggatctggccccaaagaaagaagccatcaaagttatgatccaagacgagttaaccaagttatcagaggaggacgaaggagagggagccggagacaccgagaagaaacagcagcagcctcaggcgaaggagatcgaggcatgaggattcgtggaaccccatagctgtagtagccgctgttaattatcctgtacttaatgtgtttgtttgcgtcgcctgtacaggcatctcgttgattatcgccgcaccaactcgagaacctcacccctgatcgtgtatgttatggggcatgatgtgtaggcagcctccacacctttttagctgactgatcggagagttactcctaggcaactcttgtttctagatttgcaaatggtgtctgaaactctgcgtttgctgcggcagaacgtgtacttaattgttcgtgataggtctgaataacacatggatggtatcagtctgtagcttattttttttacttgatccgtttcttctgtgggttgtgatttgtgaatgaccaaaagatggatgctgtattccagtttctgttctctcagagtaggcatgcaagaataacagctgaaccaaaccgagaaacagaacagtgg

SEQ ID NO: 219801 - DNA, 2586 bp, Zea Mays
aattctccttgtctctctcactctctctgtctgtgggaggaagttgagaaggcgaggagccagacaagcgacgcggctccactcccttctcaggcggccccctgctgctcaccgcccagctccaggtacgcgcgagttattagagaaataagggtcggcttggttgcccgaggcctacccagcgcctgcgatggaggagaaggctatggcaaatggagcagcgactgctgatgttgctgctcctgataataaggataacaccaaggaagaggctagcgagagcaaggaaccagcagccaatcaggatgccgatgaccagaacaaaggcttggaaaatggcgccgagggccagtcaggtggagatgtcaatatggcagatgctgaggtcacagaggaaggcgatggtgatcctggtgttgcaaagcaggtggattctgaagatatcaaaacggatgccgatacaaaggaagatggcaatgcaaaggcagaagaagttgaggatgtcaagatgactgaggctgacacgggaagtacagaggtcaaagataaagaagagaagggagatgaagttgtggacacaactgtggataagcaggatgaatcgaaggagcaagaggaaggtgtttcggctgagcaagatgagaagcaaggagaggaagcagaagaaaaaggaaaagaaatggatgccgatgagaagcaagaagaggaagcagaagaaaaaggttctgctgatgagaaagatgaagatgaaggtgaccagaagatggaagagaataaggaggagactccgaagaataagaaagcaaggagtgccagggatagaagccagggaaatgataataaacatgatggatcaaaatctagggaagccaaaagtttgctgaacaccccaagcccatatggtaccgatcgtcctcaacgtgagaggaaaatagtggagaggttggttgaggtgattgagaaagagccaaacaggaatttcgtggttgagaagggacgagggactcctctgaaggatataccaagtgtggcacacagaatatcaaggaagaaaccttctgatcttaaatttcttcacagtattctttttgggaggaaaggcaaggctgtcgattttaaaggacatatactccagttctctggatttgtttggcatgaaagtgatgaaaagcacagagtcaaggcaaaagaaaagcttgacaagtgtgtaaaagaaacgctgttggacctttgttggacccttggcattccaactccaaaagcaaacattagaaaggaagatattgtgtcaaagctgttggactttattgctgaacctcactctgcagctgattctgggctctctgatgaccagggttcaaattctaaaaaacgcaagagaggaggtgaaagtgcacgtaagactcctgatagcacacctagtaggtcaaggaagaaatttatcaatgacagcacttctagtaaaaggcagaaaaaagcgctcgagtatgatactgatgaggatgaatccatgaagtcagacagtgaggaaaacagagatgaagattcagatgaagctggtgacaaacaggaaggtgactatgtatctgggaaagaaaaggcagggaagttctcagaggtaaaagaatcttcaggcaaaaagaaggcaaacacagggagtggccaccaatcaggtcctccaaagaaaattatcagaagtccggtaaaaaaagtatcatccaagattcatgaggaaaaagaaagccccaataatagtgcaaaggttttttctaggaagaagaaacccacagcagaaaaggagatcaaagaaaaaaagtcatcaggcaaaaaggtgacaaagggtaaaggagaatccgttgaagcagttcttcccagcaaggatgatctgaggaagaccattactgaaatcctcaagaaagttgacttcaacacggcaactttcagtgacatccttaagaagcttgacaatcactataaaatggatctggccccaaagaaagaagccatcaaagttatgatccaagacgagttaaccaagttatcagaggaggacgaaggagagggagccggagacaccgagaagaaacagcagcagcctcaggcgaaggagatcgaggcatgaggattcgtggaaccccatagctgtagtagccgctgttaattatcctgtacttaatgtgtttgtttgcgtcgcctgtacaggcatctcgttgattatcgccgcaccaactcgagaacctcacccctgatcgtgtatgttatggggcatgatgtgtaggcagcctccacacctttttagctgactgatcggagagttactcctaggcaactcttgtttctagatttgcaaatggtgtctgaaactctgcgtttgctgcggcagaacgtgtacttaattgttcgtgataggtctgaataacacatggatggtatcagtctgtagcttattttttttacttgatccgtttcttctgtgggttgtgatttgtgaatgaccaaaagatggatgctgtattccagtttctgttctctcagagtaggcatgcaagaataacagctgaaccaaaccgagaaacagaacagtgg

SEQ ID NO: 219802 - DNA, 2494 bp, Zea Mays
aattctccttgtctctctcactctctctgtctgtgggaggaagttgagaaggcgaggagccagacaagcgacgcggctccactcccttctcaggcggccccctgctgctcaccgcccagctccagttattagagaaataagggtcggcttggttgcccgaggcctacccagcgcctgcgatggaggagaaggctatggcaaatggagcagcgactgctgatgttgctgctcctgataataaggataacaccaaggaagaggctagcgagagcaaggaaccagcagccaatcaggatgccgatgaccagaacaaaggcttggaaaatggcgccgagggccagtcaggtggagatgtcaatatggcagatgctgaggtcacagaggaaggcgatggtgatcctggtgttgcaaagcaggtggattctgaagatatcaaaacggatgccgatacaaaggaagatggcaatgcaaaggcagaagaagttgaggatgtcaagatgactgaggctgacacgggaagtacagaggtcaaagataaagaagagaagggagatgaagttgtggacacaactgtggataagcaggatgaatcgaaggagcaagaggaaggtgtttcggctgagcaagatgagaagcaaggagaggaagcagaagaaaaaggaaaagaaatggatgccgatgagaagcaagaagaggaagcagaagaaaaaggttctgctgatgagaaagatgaagatgaaggtgaccagaagatggaagagaataaggaggagactccgaagaataagaaagcaaggagtgccagggatagaagccagggaaatgataataaacatgatggatcaaaatctagggaagccaaaagtttgctgaacaccccaagcccatatggtaccgatcgtcctcaacgtgagaggaaaatagtggagaggttggttgaggtgattgagaaagagccaaacaggaatttcgtggttgagaagggacgagggactcctctgaaggatataccaagtgtggcacacagaatatcaaggaagaaaccttctgatcttaaatttcttcacagtattctttttgggaggaaaggcaaggctgtcgattttaaaggacatatactccagttctctggatttgtttggcatgaaagtgatgaaaagcacagagtcaaggcaaaagaaaagcttgacaagtgtgtaaaagaaacgctgttggacctttgttggacccttggcattccaactccaaaagcaaacattagaaaggaagatattgtgtcaaagctgttggactttattgctgaacctcactctgcagctgattctgggctctctgatgaccagaaatttatcaatgacagcacttctagtaaaaggcagaaaaaagcgctcgagtatgatactgatgaggatgaatccatgaagtcagacagtgaggaaaacagagatgaagattcagatgaagctggtgacaaacaggaaggtgactatgtatctgggaaagaaaaggcagggaagttctcagaggtaaaagaatcttcaggcaaaaagaaggcaaacacagggagtggccaccaatcaggtcctccaaagaaaattatcagaagtccggtaaaaaaagtatcatccaagattcatgaggaaaaagaaagccccaataatagtgcaaaggttttttctaggaagaagaaacccacagcagaaaaggagatcaaagaaaaaaagtcatcaggcaaaaaggtgacaaagggtaaaggagaatccgttgaagcagttcttcccagcaaggatgatctgaggaagaccattactgaaatcctcaagaaagttgacttcaacacggcaactttcagtgacatccttaagaagcttgacaatcactataaaatggatctggccccaaagaaagaagccatcaaagttatgatccaagacgagttaaccaagttatcagaggaggacgaaggagagggagccggagacaccgagaagaaacagcagcagcctcaggcgaaggagatcgaggcatgaggattcgtggaaccccatagctgtagtagccgctgttaattatcctgtacttaatgtgtttgtttgcgtcgcctgtacaggcatctcgttgattatcgccgcaccaactcgagaacctcacccctgatcgtgtatgttatggggcatgatgtgtaggcagcctccacacctttttagctgactgatcggagagttactcctaggcaactcttgtttctagatttgcaaatggtgtctgaaactctgcgtttgctgcggcagaacgtgtacttaattgttcgtgataggtctgaataacacatggatggtatcagtctgtagcttattttttttacttgatccgtttcttctgtgggttgtgatttgtgaatgaccaaaagatggatgctgtattccagtttctgttctctcagagtaggcatgcaagaataacagctgaaccaaaccgagaaacagaacagtgg

SEQ ID NO: 219803 - DNA, 2575 bp, Zea Mays
aattctccttgtctctctcactctctctgtctgtgggaggaagttgagaaggcgaggagccagacaagcgacgcggctccactcccttctcaggcggccccctgctgctcaccgcccagctccaggtacgcgcgagttattagagaaataagggtcggcttggttgcccgaggcctacccagcgcctgcgatggaggagaaggctatggcaaatggagcagcgactgctgatgttgctgctcctgataataaggataacaccaaggaagaggctagcgagagcaaggaaccagcagccaatcaggatgccgatgaccagaacaaaggcttggaaaatggcgccgagggccagtcaggtggagatgtcaatatggcagatgctgaggtcacagaggaaggcgatggtgatcctggtgttgcaaagcaggtggattctgaagatatcaaaacggatgccgatacaaaggaagatggcaatgcaaaggcagaagaagttgaggatgtcaagatgactgaggctgacacgggaagtacagaggtcaaagataaagaagagaagggagatgaagttgtggacacaactgtggataagcaggatgaatcgaaggagcaagaggaaggtgtttcggctgagcaagatgagaagcaaggagaggaagcagaagaaaaaggaaaagaaatggatgccgatgagaagcaagaagaggaagcagaagaaaaaggttctgctgatgagaaagatgaagatgaaggtgaccagaagatggaagagaataaggaggagactccgaagaataagaaagcaaggagtgccagggatagaagccagggaaatgataataaacatgatggatcaaaatctagggaagccaaaagtttgctgaacaccccaagcccatatggtaccgatcgtcctcaacgtgagaggaaaatagtggagaggttggttgaggtgattgagaaagagccaaacaggaatttcgtggttgagaagggacgagggactcctctgaaggatataccaagtgtggcacacagaatatcaaggaagaaaccttctgatcttaaatttcttcacagtattctttttgggaggaaaggcaaggctgtcgattttaaaggacatatactccagttctctggatttgtttggcatgaaagtgatagtcaaggcaaaagaaaagcttgacaagtgtgtaaaagaaacgctgttggacctttgttggacccttggcattccaactccaaaagcaaacattagaaaggaagatattgtgtcaaagctgttggactttattgctgaacctcactctgcagctgattctgggctctctgatgaccagggttcaaattctaaaaaacgcaagagaggaggtgaaagtgcacgtaagactcctgatagcacacctagtaggtcaaggaagaaatttatcaatgacagcacttctagtaaaaggcagaaaaaagcgctcgagtatgatactgatgaggatgaatccatgaagtcagacagtgaggaaaacagagatgaagattcagatgaagctggtgacaaacaggaaggtgactatgtatctgggaaagaaaaggcagggaagttctcagaggtaaaagaatcttcaggcaaaaagaaggcaaacacagggagtggccaccaatcaggtcctccaaagaaaattatcagaagtccggtaaaaaaagtatcatccaagattcatgaggaaaaagaaagccccaataatagtgcaaaggttttttctaggaagaagaaacccacagcagaaaaggagatcaaagaaaaaaagtcatcaggcaaaaaggtgacaaagggtaaaggagaatccgttgaagcagttcttcccagcaaggatgatctgaggaagaccattactgaaatcctcaagaaagttgacttcaacacggcaactttcagtgacatccttaagaagcttgacaatcactataaaatggatctggccccaaagaaagaagccatcaaagttatgatccaagacgagttaaccaagttatcagaggaggacgaaggagagggagccggagacaccgagaagaaacagcagcagcctcaggcgaaggagatcgaggcatgaggattcgtggaaccccatagctgtagtagccgctgttaattatcctgtacttaatgtgtttgtttgcgtcgcctgtacaggcatctcgttgattatcgccgcaccaactcgagaacctcacccctgatcgtgtatgttatggggcatgatgtgtaggcagcctccacacctttttagctgactgatcggagagttactcctaggcaactcttgtttctagatttgcaaatggtgtctgaaactctgcgtttgctgcggcagaacgtgtacttaattgttcgtgataggtctgaataacacatggatggtatcagtctgtagcttattttttttacttgatccgtttcttctgtgggttgtgatttgtgaatgaccaaaagatggatgctgtattccagtttctgttctctcagagtaggcatgcaagaataacagctgaaccaaaccgagaaacagaacagtgg

SEQ ID NO: 219804 - DNA, 2580 bp, Zea Mays
aattctccttgtctctctcactctctctgtctgtgggaggaagttgagaaggcgaggagccagacaagcgacgcggctccactcccttctcaggcggccccctgctgctcaccgcccagctccaggtacgcgcgagttattagagaaataagggtcggcttggttgcccgaggcctacccagcgcctgcgatggaggagaaggctatggcaaatggagcagcgactgctgatgttgctgctcctgataataaggataacaccaaggaagaggctagcgagagcaaggaaccagcagccaatcaggatgccgatgaccagaacaaaggcttggaaaatggcgccgagggccagtcaggtggagatgtcaatatggcagatgctgaggtcacagaggaaggcgatggtgatcctggtgttgcaaagcaggtggattctgaagatatcaaaacggatgccgatacaaaggaagatggcaatgcaaaggcagaagaagttgaggatgtcaagatgactgaggctgacacgggaagtacagaggtcaaagataaagaagagaagggagatgaagttgtggacacaactgtggataagcaggatgaatcgaaggagcaagaggaaggtgtttcggctgagcaagatgagaagcaaggagaggaagcagaagaaaaaggaaaagaaatggatgccgatgagaagcaagaagaggaagcagaagaaaaaggttctgctgatgagaaagatgaagatgaaggtgaccagaagatggaagagaataaggaggagactccgaagaataagaaagcaaggagtgccagggatagaagccagggaaatgataataaacatgatggatcaaaatctagggaagccaaaagtttgctgaacaccccaagcccatatggtaccgatcgtcctcaacgtgagaggaaaatagtggagaggttggttgaggtgattgagaaagagccaaacaggaatttcgtggttgagaagggacgagggactcctctgaaggatataccaagtgtggcacacagaatatcaaggaagaaaccttctgatcttaaatttcttcacagtattctttttgggaggaaaggcaaggctgtcgattttaaaggacatatactccagttctctggatttgtttggcatgaaagtgatcacagagtcaaggcaaaagaaaagcttgacaagtgtgtaaaagaaacgctgttggacctttgttggacccttggcattccaactccaaaagcaaacattagaaaggaagatattgtgtcaaagctgttggactttattgctgaacctcactctgcagctgattctgggctctctgatgaccagggttcaaattctaaaaaacgcaagagaggaggtgaaagtgcacgtaagactcctgatagcacacctagtaggtcaaggaagaaatttatcaatgacagcacttctagtaaaaggcagaaaaaagcgctcgagtatgatactgatgaggatgaatccatgaagtcagacagtgaggaaaacagagatgaagattcagatgaagctggtgacaaacaggaaggtgactatgtatctgggaaagaaaaggcagggaagttctcagaggtaaaagaatcttcaggcaaaaagaaggcaaacacagggagtggccaccaatcaggtcctccaaagaaaattatcagaagtccggtaaaaaaagtatcatccaagattcatgaggaaaaagaaagccccaataatagtgcaaaggttttttctaggaagaagaaacccacagcagaaaaggagatcaaagaaaaaaagtcatcaggcaaaaaggtgacaaagggtaaaggagaatccgttgaagcagttcttcccagcaaggatgatctgaggaagaccattactgaaatcctcaagaaagttgacttcaacacggcaactttcagtgacatccttaagaagcttgacaatcactataaaatggatctggccccaaagaaagaagccatcaaagttatgatccaagacgagttaaccaagttatcagaggaggacgaaggagagggagccggagacaccgagaagaaacagcagcagcctcaggcgaaggagatcgaggcatgaggattcgtggaaccccatagctgtagtagccgctgttaattatcctgtacttaatgtgtttgtttgcgtcgcctgtacaggcatctcgttgattatcgccgcaccaactcgagaacctcacccctgatcgtgtatgttatggggcatgatgtgtaggcagcctccacacctttttagctgactgatcggagagttactcctaggcaactcttgtttctagatttgcaaatggtgtctgaaactctgcgtttgctgcggcagaacgtgtacttaattgttcgtgataggtctgaataacacatggatggtatcagtctgtagcttattttttttacttgatccgtttcttctgtgggttgtgatttgtgaatgaccaaaagatggatgctgtattccagtttctgttctctcagagtaggcatgcaagaataacagctgaaccaaaccgagaaacagaacagtgg

SEQ ID NO: 219805 - DNA, 2646 bp, Zea Mays
ggatatttggatcccgacccagcgagtcagcagagctaaattaaccccggaagaaaaaaaaaacacccgaaaattctccttgtctctctcactctctctgtctgtgggaggaagttgagaaggcgaggagccagacaagcgacgcggctccactcccttctcaggcggccccctgctgctcaccgcccagctccagttattagagaaataagggtcggcttggttgcccgaggcctacccagcgcctgcgatggaggagaaggctatggcaaatggagcagcgactgctgatgttgctgctcctgataataaggataacaccaaggaagaggctagcgagagcaaggaaccagcagccaatcaggatgccgatgaccagaacaaaggcttggaaaatggcgccgagggccagtcaggtggagatgtcaatatggcagatgctgaggtcacagaggaaggcgatggtgatcctggtgttgcaaagcaggtggattctgaagatatcaaaacggatgccgatacaaaggaagatggcaatgcaaaggcagaagaagttgaggatgtcaagatgactgaggctgacacgggaagtacagaggtcaaagataaagaagagaagggagatgaagttgtggacacaactgtggataagcaggatgaatcgaaggagcaagaggaaggtgtttcggctgagcaagatgagaagcaaggagaggaagcagaagaaaaaggaaaagaaatggatgccgatgagaagcaagaagaggaagcagaagaaaaaggttctgctgatgagaaagatgaagatgaaggtgaccagaagatggaagagaataaggaggagactccgaagaataagaaagcaaggagtgccagggatagaagccagggaaatgataataaacatgatggatcaaaatctagggaagccaaaagtttgctgaacaccccaagcccatatggtaccgatcgtcctcaacgtgagaggaaaatagtggagaggttggttgaggtgattgagaaagagccaaacaggaatttcgtggttgagaagggacgagggactcctctgaaggatataccaagtgtggcacacagaatatcaaggaagaaaccttctgatcttaaatttcttcacagtattctttttgggaggaaaggcaaggctgtcgattttaaaggacatatactccagttctctggatttgtttggcatgaaagtgatgaaaagcacagagtcaaggcaaaagaaaagcttgacaagtgtgtaaaagaaacgctgttggacctttgttggacccttggcattccaactccaaaagcaaacattagaaaggaagatattgtgtcaaagctgttggactttattgctgaacctcactctgcagctgattctgggctctctgatgaccagggttcaaattctaaaaaacgcaagagaggaggtgaaagtgcacgtaagactcctgatagcacacctagtaggtcaaggaagaaatttatcaatgacagcacttctagtaaaaggcagaaaaaagcgctcgagtatgatactgatgaggatgaatccatgaagtcagacagtgaggaaaacagagatgaagattcagatgaagctggtgacaaacaggaaggtgactatgtatctgggaaagaaaaggcagggaagttctcagaggtaaaagaatcttcaggcaaaaagaaggcaaacacagggagtggccaccaatcaggtcctccaaagaaaattatcagaagtccggtaaaaaaagtatcatccaagattcatgaggaaaaagaaagccccaataatagtgcaaaggttttttctaggaagaagaaacccacagcagaaaaggagatcaaagaaaaaaagtcatcaggcaaaaaggtgacaaagggtaaaggagaatccgttgaagcagttcttcccagcaaggatgatctgaggaagaccattactgaaatcctcaagaaagttgacttcaacacggcaactttcagtgacatccttaagaagcttgacaatcactataaaatggatctggccccaaagaaagaagccatcaaagttatgatccaagacgagttaaccaagttatcagaggaggacgaaggagagggagccggagacaccgagaagaaacagcagcagcctcaggcgaaggagatcgaggcatgaggattcgtggaaccccatagctgtagtagccgctgttaattatcctgtacttaatgtgtttgtttgcgtcgcctgtacaggcatctcgttgattatcgccgcaccaactcgagaacctcacccctgatcgtgtatgttatggggcatgatgtgtaggcagcctccacacctttttagctgactgatcggagagttactcctaggcaactcttgtttctagatttgcaaatggtgtctgaaactctgcgtttgctgcggcagaacgtgtacttaattgttcgtgataggtctgaataacacatggatggtatcagtctgtagcttattttttttacttgatccgtttcttctgtgggttgtgatttgtgaatgaccaaaagatggatgctgtattccagtttctgttctctcagagtaggcatgcaagaataacagctgaaccaaaccgagaaacagaacagtgg

SEQ ID NO: 219806 - DNA, 2459 bp, Zea Mays
gcagtttccttcttcctcatccttttgtttaggagtatttttcattttgcgaaacgagcacattttaaccttccacaaccccactgcaaattttcaagacgataatcgatttatcgttggttagtcgctctggagtctggtgtgttcaaaggcgagacgggcgacgaatcttggttcccgaatcccaatggcgctctgtgctcaataaaagtgtgatggtcacatcgatcctctcgccagctcttgctcccctcctcctcctctgcttcttattccttcttctaaagctgcaacgattccaacctttacctcttttgctttcgcgatgtttctctttcccttttgatcggtttgatgtgacagtcttgtcaccataggcatcactccttcttgaccgcatccgcatcagtgaccgaccggtgacactgagcactgacggcactcgcattgctctctgctccttcctggttggtggtgttggtgagcaggacgagcaggaggaggaagcaagaagaatcctgggagctcgcgatgccgaggtggggggacgcggaggaaggagcagctgctgacgaggctatcgcggcggcagcggcagtgaggctggccaacaagatccggaagcgccgcgcggtgtcgtcgtcggggggctcggacccggcggccgggaggcggctacggtccaggaggcccgcggtgctgctgccgcggcgccggaccagcgcgggcggggacatgtcggagtcgtcccgtggccggcattgccgcggaggcggtacccgcctcgccgacgggacatggccgtccgcgtcggcgaggaggctcgtcgacgcgttctggcaggatatggacagcgacctgcttgaaggggatgcggcggcggcggcggcgcgccggagcttggttcagtggagcggcgcctccacggagagatcgagaagcaagagcaagatcttggaggctgatggcaagggaagtcggcgcaacggccatgcccggtggctttcggcagatatgacgagcaacggccatgcccggtggctttcggcagatatgacgagcaacggcagcggaatggaggttggtaaattctcccaagacgatgtttcaagatgtcctgagaaaacagtgaacctacaggatcttcagaacagcttgattgcatctaaggagcttgtaaaagtacttgcccacatatggggacctggagaactgaatccgtctagtgtatcactcatctctgctctacgttcagagcttgatgttgcccgttctcatgttagaaagctaataaaagaaaagaagtctaatccctatgaaattgaggacttaaagaagcaacttgcagaagaaatggaatcgtggaaggtcaaacaaaaggagaaggttgcaaatgctctccaatttatagtttcagagctagacactgagaagaagtcaaggaaaagagcagagaagacaaataagaagttgagtgttgccttagccaacactgaagcctcactgcaggcagtgacgaaagaacttgaaagggagaggaaatctaaaggaagagttgagaagatctgcaacgagctcatcaaaggcattgacgaggacaaagctgaggtggaggcactgaagagagaaaccgagaaggcacaagaagagctccagaaagagcgtgaaatgcttcaacttgcagacgagtggcgtgaacaaagggttcagatgaagctgctagaagcacggcttcagtttgaggagaaaaatgcagctgttaatcagctgcgcgatgaactccaagcttatctggatactaggaaagagcaggaaccaatgaacgatccaatgcaactgtcccatgcgtctgaaaatggcgccaccgcagctgatgatgtagtccctgacagaaatggtggaaacttcagcgaagacgacgcatcggaaggcagtgacatacactcgattgagctgaacgtcgatggcgtcaacaggacctacacctggagctacactccttcctcgaaaggcaggcagaggagcgcatcgaggcatgaatcgttttcggatagagggatggacggcgtgaactcgtggcgtttagagcaaagctttcggggcatggatgaggagctggagggagactgggcagaagggtgtagcaacggaatactgaccatggatcacgacgaggagaggtatctggcaatcaagaatctcagagagcagatgctggccgggtcagggttcatcctatcacaaggtagagaaaatgctgaaagagagtgttgtggcttgtaagataaactgcatatgaagagaattttaaagtaatgtgtcatatgggtcgctgtttgatgctaagatccagctgttcgagaattttaaagttatgttccatgattctgaggttttgtatgtgtgttgttgtccatttaagtggccggaaatagtttataaaaaaagcgaccggaaat

SEQ ID NO: 219807 - DNA, 2474 bp, Zea Mays
gcgaaagcagtttccttcttcctcatccttttgtttaggagtatttttcattttgcgaaacgagcacattttaaccttccacaaccccactgcaaattttcaagacgataatcgatttatcgttggttagtcgctctggagtctggtgtgttcaaaggcgagacgggcgacgaatcttggttcccgaatcccaatggcgctctgtgctcaataaaagtgtgatggtcacatcgatcctctcgccagctcttgctcccctcctcctcctctgcttcttattccttcttctaaagctgcaacgattccaacctttacctcttttgctttcgcgatgtttctctttcccttttgatcggtttgatgtgacagtcttgtcaccataggcatcactccttcttgaccgcatccgcatcagtgaccgaccggtgacactgagcactgacggcactcgcattgctctctgctccttcctggttggtggtgttggtgagcaggacgagcaggaggaggaagcaagaagaatcctgggagctcgcgatgccgaggtggggggacgcggaggaaggagcagctgctgacgaggctatcgcggcggcagcggcagtgaggctggccaacaagatccggaagcgccgcgcggtgtcgtcgtcggggggctcggacccggcggccgggaggcggctacggtccaggaggcccgcggtgctgctgccgcggcgccggaccagcgcgggcggggacatgtcggagtcgtcccgtggccggcattgccgcggaggcggtacccgcctcgccgacgggacatggccgtccgcgtcggcgaggaggctcgtcgacgcgttctggcaggatatggacagcgacctgcttgaaggggatgcggcggcggcggcggcgcgccggagcttggttcagtggagcggcgcctccacggagttgtcccagagatcgagaagcaagagcaagatcttggaggctgatggcaagggaagtcggcgcaacggccatgcccggtggctttcggcagatatgacgagcaacggccatgcccggtggctttcggcagatatgacgagcaacggcagcggaatggaggttggtaaattctcccaagacgatgtttcaagatgtcctgagaaaacagtgaacctacaggatcttcagaacagcttgattgcatctaaggagcttgtaaaagtacttgcccacatatggggacctggagaactgaatccgtctagtgtatcactcatctctgctctacgttcagagcttgatgttgcccgttctcatgttagaaagctaataaaagaaaagaagtctaatccctatgaaattgaggacttaaagaagcaacttgcagaagaaatggaatcgtggaaggtcaaacaaaaggagaaggttgcaaatgctctccaatttatagtttcagagctagacactgagaagaagtcaaggaaaagagcagagaagacaaataagaagttgagtgttgccttagccaacactgaagcctcactgcaggcagtgacgaaagaacttgaaagggagaggaaatctaaaggaagagttgagaagatctgcaacgagctcatcaaaggcattgacgaggacaaagctgaggtggaggcactgaagagagaaaccgagaaggcacaagaagagctccagaaagagcgtgaaatgcttcaacttgcagacgagtggcgtgaacaaagggttcagatgaagctgctagaagcacggcttcagtttgaggagaaaaatgcagctgttaatcagctgcgcgatgaactccaagcttatctggatactaggaaagagcaggaaccaatgaacgatccaatgcaactgtcccatgcgtctgaaaatggcgccaccgcagctgatgatgtagtccctgacagaaatggtggaaacttcagcgaagacgacgcatcggaaggcagtgacatacactcgattgagctgaacgtcgatggcgtcaacaggacctacacctggagctacactccttcctcgaaaggcaggcagaggagcgcatcgaggcatgaatcgttttcggatagagggatggacggcgtgaactcgtggcgtttagagcaaagctttcggggcatggatgaggagctggagggagactgggcagaagggtgtagcaacggaatactgaccatggatcacgacgaggagaggtatctggcaatcaagaatctcagagagcagatgctggccgggtcagggttcatcctatcacaaggtagagaaaatgctgaaagagagtgttgtggcttgtaagataaactgcatatgaagagaattttaaagtaatgtgtcatatgggtcgctgtttgatgctaagatccagctgttcgagaattttaaagttatgttccatgattctgaggttttgtatgtgtgttgttgtccatttaagtggccggaaatagtttataaaaaaagcgaccggaaat

SEQ ID NO: 219808 - DNA, 912 bp, Zea Mays
gctcaactcacctgtacttctgaatgctggtctcaactactggaaactcttccccttcctaatataaaatggatatgccccactgcaccttcaagacccgtgtcagtgtttggcgggttcccctccacagcatggtttgatgttgctgatctttctgaggatgctcctgatgacattgagggaatcgatgcctcagcagcacatgttgcgaatttgttgtcaactgaacctgctgacatcaaacttggtgttggcggctttagtatgggtgctgctactgctctgtactctgcaacttgctttgcccatggaaaatatgggaatggcaaaccattccctgtgaacctaagtcttgccgttggtcttagtggctggcttccatgtgccaggaccttgaagaacagaattgaagcctcaccagagtgtgcacaaaaggcttcatcaatacctcttttgctctgtcatggaaaagctgatgatgtagttgcctacaagcacggggagagatctgctggtgccttgaaggcaaatggcttttccaatgtgctcttcaaggcatacaatagtcttgggcactacactgttccagaggagatggatgaagtttgcaaatggatcacagcaaatttggggcttggcactaagtcatcttgattggaatttgatgcgagaaagactcgcagggacggtgtccaaataataccggtatcttttccaggaggtatatggtttaatagcaaatttgggcttgggtatacggccatgttctagcttttcttaacgcagacgtgtctgcgaatgatgtatgcttataatatctatattttggtctacgtcgatttggttgtggcacggataatgtttgtttcaaatattctgctctgcgaattggaattgtgatgttttgctttc

SEQ ID NO: 219809 - DNA, 2675 bp, Zea Mays
atcgccgccttcctccgcctctctctcccctctcctcttctctcatctcccagcgggaaccgcggccggccccacgcgcgggcatgggcatgggcatgcatgccgtgcccgcacgcaagcactcacccacccactgcgggcgctcgtcgatcgccactttcggccccggctaaatcaggatatagaccagtgagggagcgacaagaggcggaggaagaggaggtggtgccggtggtcgtgctgctgctgctgctcgtggtggtggctgtgcaggtgcggagatcgtcgatcgatcgctgcggttcgtcggcggcggtgtcgagatgtcgatggacttcggtgccccggcggatgaccccaaggctttccgcaacatctgccgcgaccggatactgaaggacctgcttaagcctgacaaggataaggagaccaaaagctcatggaaggttcttataatggacaaattcacggtgaagatcatggcttatgcttgtaagatggcggaaattaccgatgcagggatttcgcttgtagaagatctgttcaagagaagggagccaatgccttcaatggatgcaatctactttcttcagccactgaaagaaaatgtcataatgcttctatctgacatgtctgggagatgcccactttacaggaaggcatacatcttcttcagctcaccgattcctaaagacttggttacttacataaagaatgacagtagtgtaataccacgcatcggtgcactaagagagatgaatttggaattcttcactattgacatgcagggctttgtaactgaccatgatactgccctgattgatttatacggtccaagtgaacaaaattccaaaaagttcaacgatactataagcacaatggctactcgcattgcgactacatttgcatcattgaaggaatttccatgtgtgcggtatcgggcgccaaaaggagatgcttccacaacaactaaattcgatatggttccaaagtggcttgctactgctgtttgggaaattgtgtcaaaatataaatcaactattcctgaatttccccagaaggagacatgtgaactgctaattgtcgacaggcccatagatcagatagcacctgttattcatgaatggacctatgatgcaatgtgccatgatctactcgaaatggatggcaacaaatacatttatgaggtatcaaagatgggttcggaacctgaaaagaaggaatctttattagaggatcatgatcctctttggcttgaacttcgccatgctcacatagctgatgctagtgagaggttgtacgaaaagatgaacaattttgttgccaagaataaagcagcacaactttcaagagatggtggtgaagtctcaacacgggatctgcagaaaatcgttcaagcattaccccaatacagtgatcaagttgagaaattgacgctacatatagagattgctggaaaaatgaacaggtgtatcagggagtatgggctccgtgatattgggcaattggagcaggatttggtttttggagatgcgggagcgaaggaagtcatcagtatcctcaggtcaaagcaggatatgagcccagaaaacaaaatgaggttgctgattatatatgcaattgtatatccagagaagtttgaaggtgacaaaggggaaaagttgatgcagttagcgaagcttccacatgatgatatggatataataaattgtttaggatacttggatggttcaaatacaaaaaaatcatcaaggacgggtactttctctctcaaatttgatgcccaaaagaagaaaaatgctgccagaacagacaaacaagatggtgaggaaacatgggctttatcacgttttttcccacttattgaggagctgattgagaaactgagcaagggtgaattacctctaaaagagtacccatctatgagtgaaccaagttctgcttctgcttctcaagatgccacacaaactgcatcatcaactgcacgaccagcacaaaatccacaaccgatgtctatgagatcaaggaggacaccaacatgggcaaaatctcgtaattcggatgattcttcaagcagtgattcttcagtcctgagacacgcatcaggtgacttcaagaggctaggcaaccggatttttgtcttcatgattggtggagccactagatctgaactgcgcacggtgcacaagcttacaatgaaaatgaagcgcgaaatcgtcttgggctcttctagcatcgatgatcctccgcagtttatttcgaagctgaagtcgataggtagtgctaccaagacctagcttgtatgccgagcgataaaatgaattctcaccttatagtactcagtataagctctacattttactaggatgttgtcggctgtcaccagcgacccattgattatcgtcgaactgatcacagttattattctcttaatttttttttaattgaggaagtgagctggcttgtctggatgtaaaataagaaatacgtacacaacgttttgtttgttatttgatgttcttgttgacaaacagataaagagagaagtcattaggaggttttgtaaaaaaggcctaaaattgatggttatatgatatagaaactgtattgcacggatctataacagaatatggataaaattgattatggagggacacaacttcctttgcttgctc

SEQ ID NO: 219810 - DNA, 2708 bp, Zea Mays
atcgccgccttcctccgcctctctctcccctctcctcttctctcatctcccagcgggaaccgcggccggccccacgcgcgggcatgggcatgggcatgcatgccgtgcccgcacgcaagcactcacccacccactgcgggcgctcgtcgatcgccactttcggccccggctaaatcaggatatagaccagtgagggagcgacaagaggcggaggaagaggaggtggtgccggtggtcgtgctgctgctgctgctcgtggtggtggctgtgcaggtgcggagatcgtcgatcgatcgctgcggttcgtcggcggcggtgtcgagatgtcgatggacttcggtgccccggcggatgaccccaaggctttccgcaacatctgccgcgaccggatactgaaggacctgcttaagcctgacaaggataaggagaccaaaagctcatggaaggttcttataatggacaaattcacggtgaagatcatggcttatgcttgtaagatggcggaaattaccgatgcagggatttcgcttgtagaagatctgttcaagagaagggagccaatgccttcaatggatgcaatctactttcttcagccactgaaagaaaatgtcataatgcttctatctgacatgtctgggagatgcccactttacaggaaggcatacatcttcttcagctcaccgattcctaaagacttggttacttacataaagaatgacagtagtgtaataccacgcatcggtgcactaagagagatgaatttggaattcttcactattgacatgcagggctttgtaactgaccatgatactgccctgattgatttatacggtccaagtgaacaaaattccaaaaagttcaacgatactataagcacaatggctactcgcattgcgactacatttgcatcattgaaggaatttccatgtgtgcggtatcgggcgccaaaaggagatgcttccacaacaactaaattcgatatggttccaaagtggcttgctactgctgtttgggaaattgtgtcaaaatataaatcaactattcctgaatttccccagaaggagacatgtgaactgctaattgtcgacaggcccatagatcagatagcacctgttattcatgaatggacctatgatgcaatgtgccatgatctactcgaaatggatggcaacaaatacatttatgaggtatcaaagatgggttcggaacctgaaaagaaggaatctttattagaggatcatgatcctctttggcttgaacttcgccatgctcacatagctgatgctagtgagaggttgtacgaaaagatgaacaattttgttgccaagaataaagcagcacaactttcaagagatggtggtgaagtctcaacacgggatctgcagaaaatcgttcaagcattaccccaatacagtgatcaagttgagaaattgacgctacatatagagattgctggaaaaatgaacaggtgtatcagggagtatgggctccgtgatattgggcaattggagcaggatttggtttttggagatgcgggagcgaaggaagtcatcagtatcctcaggtcaaagcaggatatgagcccagaaaacaaaatgaggttgctgattatatatgcaattgtatatccagagaagtttgaaggtgacaaaggggaaaagttgatgcagttagcgaagcttccacatgatgatatggatataataaattgtttaggatacttggatggttcaaatacaaaaaaatcatcaaggacgggtactttctctctcaaatttgatgcccaaaagaagaaaaatgctgccagaacagacaaacaagatggtgaggaaacatgggctttatcacgttttttcccacttattgaggagctgattgagaaactgagcaagggtgaattacctctaaaagagtacccatctatgagtgaaccaagttctgcttctgcttctcaagatgccacacaaactgcatcatcaactgcacgaccagcacaaaatccacaaccgatgtctatgagatcaaggaggacaccaacatgggcaaaatctcgtaattcggatgattcttcaagcagtgattcttcagtcctgagacacgcatcaggtgacttcaagaggctaggcaaccggatttttgtcttcatgattggtggagccactagatctgaactgcgcacggtgcacaagcttacaatgaaaatgaagcgcgaaatcgtcttgggctcttctagcatcgatgatcctccgcagtttatttcgaagctgaagtcgataggtagtgctaccaagacctagcttgtatgccgagcgataaaatgaattctcaccttatagtactcagtataagcttacacattatacatacttcaccaatgaacagctctacattttactaggatgttgtcggctgtcaccagcgacccattgattatcgtcgaactgatcacagttattattctcttaatttttttttaattgaggaagtgagctggcttgtctggatgtaaaataagaaatacgtacacaacgttttgtttgttatttgatgttcttgttgacaaacagataaagagagaagtcattaggaggttttgtaaaaaaggcctaaaattgatggttatatgatatagaaactgtattgcacggatctataacagaatatggataaaattgattatggagggacacaacttcctttgcttgctc

SEQ ID NO: 219811 - DNA, 2689 bp, Zea Mays
cgcctctctctcccctctcctcttctctcatctcccagcgggaaccgcggccggccccacgcgcgggcatgggcatgggcatgcatgccgtgcccgcacgcaagcactcacccacccactgcgggcgctcgtcgatcgccactttcggccccggctaaatcaggatatagaccagtgagggagcgacaagaggcggaggaagaggaggtggtgccggtggtcgtgctgctgctgctgctcgtggtggtggctgtgcaggtgcggagatcgtcgatcgatcgctgcggttcgtcggcggcggtgtcgagatgtcgatggacttcggtgccccggcggatgaccccaaggctttccgcaacatctgccgcgaccggatactgaaggacctgcttaagcctgacaaggataaggagaccaaaagctcatggaaggttcttataatggacaaattcacggtgaagatcatggcttatgcttgtaagatggcggaaattaccgatgcagggatttcgcttgtagaagatctgttcaagagaagggagccaatgccttcaatggatgcaatctactttcttcagccactgaaagaaaatgtcataatgcttctatctgacatgtctgggagatgcccactttacaggaaggcatacatcttcttcagctcaccgattcctaaagacttggttacttacataaagaatgacagtagtgtaataccacgcatcggtgcactaagagagatgaatttggaattcttcactattgacatgcagggctttgtaactgaccatgatactgccctgattgatttatacggtccaagtgaacaaaattccaaaaagttcaacgatactataagcacaatggctactcgcattgcgactacatttgcatcattgaaggaatttccatgtgtgcggtatcgggcgccaaaaggagatgcttccacaacaactaaattcgatatggttccaaagtggcttgctactgctgtttgggaaattgtgtcaaaatataaatcaactattcctgaatttccccagaaggagacatgtgaactgctaattgtcgacaggcccatagatcagcacctgttattcatgaatggacctatgatgcaatgtgccatgatctactcgaaatggatggcaacaaatacatttatgaggtatcaaagatgggttcggaacctgaaaagaaggaatctttattagaggatcatgatcctctttggcttgaacttcgccatgctcacatagctgatgctagtgagaggttgtacgaaaagatgaacaattttgttgccaagaataaagcagcacaactttcaagagatggtggtgaagtctcaacacgggatctgcagaaaatcgttcaagcattaccccaatacagtgatcaagttgagaaattgacgctacatatagagattgctggaaaaatgaacaggtgtatcagggagtatgggctccgtgatattgggcaattggagcaggatttggtttttggagatgcgggagcgaaggaagtcatcagtatcctcaggtcaaagcaggatatgagcccagaaaacaaaatgaggttgctgattatatatgcaattgtatatccagagaagtttgaaggtgacaaaggggaaaagttgatgcagttagcgaagcttccacatgatgatatggatataataaattgtttaggatacttggatggttcaaatacaaaaaaatcatcaaggacgggtactttctctctcaaatttgatgcccaaaagaagaaaaatgctgccagaacagacaaacaagatggtgaggaaacatgggctttatcacgttttttcccacttattgaggagctgattgagaaactgagcaagggtgaattacctctaaaagagtacccatctatgagtgaaccaagttctgcttctgcttctcaagatgccacacaaactgcatcatcaactgcacgaccagcacaaaatccacaaccgatgtctatgagatcaaggaggacaccaacatgggcaaaatctcgtaattcggatgattcttcaagcagtgattcttcagtcctgagacacgcatcaggtgacttcaagaggctaggcaaccggatttttgtcttcatgattggtggagccactagatctgaactgcgcacggtgcacaagcttacaatgaaaatgaagcgcgaaatcgtcttgggctcttctagcatcgatgatcctccgcagtttatttcgaagctgaagtcgataggtagtgctaccaagacctagcttgtatgccgagcgataaaatgaattctcaccttatagtactcagtataagcttacacattatacatacttcaccaatgaacagctctacattttactaggatgttgtcggctgtcaccagcgacccattgattatcgtcgaactgatcacagttattattctcttaatttttttttaattgaggaagtgagctggcttgtctggatgtaaaataagaaatacgtacacaacgttttgtttgttatttgatgttcttgttgacaaacagataaagagagaagtcattaggaggttttgtaaaaaaggcctaaaattgatggttatatgatatagaaactgtattgcacggatctataacagaatatggataaaattgattatggagggacacaacttcctttgcttgctc

SEQ ID NO: 219812 - DNA, 2681 bp, Zea Mays
ctcccctctcctcttctctcatctcccagcgggaaccgcggccggccccacgcgcgggcatgggcatgggcatgcatgccgtgcccgcacgcaagcactcacccacccactgcgggcgctcgtcgatcgccactttcggccccggctaaatcaggatatagaccagtgagggagcgacaagaggcggaggaagaggaggtggtgccggtggtcgtgctgctgctgctgctcgtggtggtggctgtgcaggtgcggagatcgtcgatcgatcgctgcggttcgtcggcggcggtgtcgagatgtcgatggacttcggtgccccggcggatgaccccaaggctttccgcaacatctgccgcgaccggatactgaaggacctgcttaagcctgacaaggataaggagaccaaaagctcatggaaggttcttataatggacaaattcacggtgaagatcatggcttatgcttgtaagatggcggaaattaccgatgcagggatttcgcttgtagaagatctgttcaagagaagggagccaatgccttcaatggatgcaatctactttcttcagccactgaaagaaaatgtcataatgcttctatctgacatgtctgggagatgcccactttacaggaaggcatacatcttcttcagctcaccgattcctaaagacttggttacttacataaagaatgacagtagtgtaataccacgcatcggtgcactaagagagatgaatttggaattcttcactattgacatgcagggctttgtaactgaccatgatactgccctgattgatttatacggtccaagtgaacaaaattccaaaaagttcaacgatactataagcacaatggctactcgcattgcgactacatttgcatcattgaaggaatttccatgtgtgcggtatcgggcgccaaaaggagatgcttccacaacaactaaattcgatatggttccaaagtggcttgctactgctgtttgggaaattgtgtcaaaatataaatcaactattcctgaatttccccagaaggagacatgtgaactgctaattgtcgacaggcccatagatcagatagcacctgttattcatgaatggacctatgatgcaatgtgccatgatctactcgaaatggatggcaacaaatacatttatgaggtatcaaagatgggttcggaacctgaaaagaaggaatctttattagaggatcatgatcctctttggcttgaacttcgccatgctcacatagctgatgctagtgagaggttgtacgaaaagatgaacaattttgttgccaagaataaagcagcacaactttcaagagatggtggtgaagtctcaacacgggatctgcagaaaatcgttcaagcattaccccaatacagtgatcaagttgagaaattgacgctacatatagagattgctggaaaaatgaacaggtgtatcagggagtatgggctccgtgatattgggcaattggagcaggatttggtttttggagatgcgggagcgaaggaagtcatcagtatcctcaggtcaaagcaggatatgagcccagaaaacaaaatgaggttgctgattatatatgcaattgtatatccagagaagtttgaaggtgacaaaggggaaaagttgatgcagttagcgaagcttccacatgatgatatggatataataaattgtttaggatacttggatggttcaaatacaaaaaaatcatcaaggacgggtactttctctctcaaatttgatgcccaaaagaagaaaaatgctgccagaacagacaaacaagatggtgaggaaacatgggctttatcacgttttttcccacttattgaggagctgattgagaaactgagcaagggtgaattacctctaaaagagtacccatctatgagtgaaccaagttctgcttctgcttctcaagatgccacacaaactgcatcatcaactgcacgaccagcacaaaatccacaaccgatgtctatgagatcaaggaggacaccaacatgggcaaaatctcgtaattcggatgattcttcaagtgattcttcagtcctgagacacgcatcaggtgacttcaagaggctaggcaaccggatttttgtcttcatgattggtggagccactagatctgaactgcgcacggtgcacaagcttacaatgaaaatgaagcgcgaaatcgtcttgggctcttctagcatcgatgatcctccgcagtttatttcgaagctgaagtcgataggtagtgctaccaagacctagcttgtatgccgagcgataaaatgaattctcaccttatagtactcagtataagcttacacattatacatacttcaccaatgaacagctctacattttactaggatgttgtcggctgtcaccagcgacccattgattatcgtcgaactgatcacagttattattctcttaatttttttttaattgaggaagtgagctggcttgtctggatgtaaaataagaaatacgtacacaacgttttgtttgttatttgatgttcttgttgacaaacagataaagagagaagtcattaggaggttttgtaaaaaaggcctaaaattgatggttatatgatatagaaactgtattgcacggatctataacagaatatggataaaattgattatggagggacacaacttcctttgcttgctc

SEQ ID NO: 219813 - DNA, 2671 bp, Zea Mays
ccctctcctcttctctcatctcccagcgggaaccgcggccggccccacgcgcgggcatgggcatgggcatgcatgccgtgcccgcacgcaagcactcacccacccactgcgggcgctcgtcgatcgccactttcggccccggctaaatcaggatatagaccagtgagggagcgacaagaggcggaggaagaggaggtggtgccggtggtcgtgctgctgctgctgctcgtggtggtggctgtgcaggtgcggagatcgtcgatcgatcgctgcggttcgtcggcggcggtgtcgagatgtcgatggacttcggtgccccggcggatgaccccaaggctttccgcaacatctgccgcgaccggatactgaaggacctgcttaagcctgacaaggataaggagaccaaaagctcatggaaggttcttataatggacaaattcacggtgaagatcatggcttatgcttgtaagatggcggaaattaccgatgcagggatttcgcttgtagaagatctgttcaagagaagggagccaatgccttcaatggatgcaatctactttcttcagccactgaaagaaaatgtcataatgcttctatctgacatgtctgggagatgcccactttacaggaaggcatacatcttcttcagctcaccgattcctaaagacttggttacttacataaagaatgacagtagtgtaataccacgcatcggtgcactaagagagatgaatttggaattcttcactattgacatgcagggctttgtaactgaccatgatactgccctgattgatttatacggtccaagtgaacaaaattccaaaaagttcaacgatactataagcacaatggctactcgcattgcgactacatttgcatcattgaaggaatttccatgtgtgcggtatcgggcgccaaaaggagatgcttccacaacaactaaattcgatatggttccaaagtggcttgctactgctgtttgggaaattgtgtcaaaatataaatcaactattcctgaatttccccagaaggagacatgtgaactgctaattgtcgacaggcccatagatcagatagcacctgttattcatgaatggacctatgatgcaatgtgccatgatctactcgaaatggatggcaacaaatacatttatgaggtatcaaagatgggttcggaacctgaaaagaaggaatctttattagaggatcatgatcctctttggcttgaacttcgccatgctcacatagctgatgctagtgagaggttgtacgaaaagatgaacaattttgttgccaagaataaagcagcacaactttcaagagatggtggtgaagtctcaacacgggatctgcagaaaatcgttcaagcattaccccaatacagtgatcaagttgagaaattgacgctacatatagagattgctggaaaaatgaacaggtgtatcagggagtatgggctccgtgatattgggcaattggagcaggatttggtttttggagatgcgggagcgaaggaagtcatcagtatcctcaggtcaaagcaggatatgagcccagaaaacaaaatgaggttgctgattatatatgcaattgtatatccagagaagtttgaaggtgacaaaggggaaaagttgatgcagttagcgaagcttccacatgatgatatggatataataaattgtttaggatacttggatggttcaaatacaaaaaaatcatcaaggacgggtactttctctctcaaatttgatgcccaaaaggagctgattgagaaactgagcaagggtgaattacctctaaaagagtacccatctatgagtgaaccaagttctgcttctgcttctcaagatgccacacaaactgcatcatcaactgcacgaccagcacaaaatccacaaccgatgtctatgagatcaaggaggacaccaacatgggcaaaatctcgtaattcggatgattcttcaagcagtgattcttcagtcctgagacacgcatcaggtgacttcaagaggctaggcaaccggatttttgtcttcatgattggtggagccactagatctgaactgcgcacggtgcacaagcttacaatgaaaatgaagcgcgaaatcgtcttgggctcttctagcatcgatgatcctccgcagtttatttcggtaaaaactcaattcctgttttttaggttctactactatatgttcatgcaacaactctgcaagtgcagaagctgaagtcgataggtagtgctaccaagacctagcttgtatgccgagcgataaaatgaattctcaccttatagtactcagtataagcttacacattatacatacttcaccaatgaacagctctacattttactaggatgttgtcggctgtcaccagcgacccattgattatcgtcgaactgatcacagttattattctcttaatttttttttaattgaggaagtgagctggcttgtctggatgtaaaataagaaatacgtacacaacgttttgtttgttatttgatgttcttgttgacaaacagataaagagagaagtcattaggaggttttgtaaaaaaggcctaaaattgatggttatatgatatagaaactgtattgcacggatctataacagaatatggataaaattgattatggagggacacaacttcctttgcttgctc

SEQ ID NO: 219814 - DNA, 2490 bp, Zea Mays
ccactgcgggcgctcgtcgatcgccactttcggccccggctaaatcaggatatagaccagtgagggagcgacaagaggcggaggaagaggaggtggtgccggtggtcgtgctgctgctgctgctcgtggtggtggctgtgcaggtgcggagatcgtcgatcgatcgctgcggttcgtcggcggcggtgtcgagatgtcgatggacttcggtgccccggcggatgaccccaaggctttccgcaacatctgccgcgaccggatactgaaggacctgcttaagcctgacaaggataaggagaccaaaagctcatggaaggttcttataatggacaaattcacggtgaagatcatggcttatgcttgtaagatggcggaaattaccgatgcagggatttcgcttgtagaagatctgttcaagagaagggagccaatgccttcaatggatgcaatctactttcttcagccactgaaagaaaatgtcataatgcttctatctgacatgtctgggagatgcccactttacaggaaggcatacatcttcttcagctcaccgattcctaaagacttggttacttacataaagaatgacagtagtgtaataccacgcatcggtgcactaagagagatgaatttggaattcttcactattgacatgcagggctttgtaactgaccatgatactgccctgattgatttatacggtccaagtgaacaaaattccaaaaagttcaacgatactataagcacaatggctactcgcattgcgactacatttgcatcattgaaggaatttccatgtgtgcggtatcgggcgccaaaaggagatgcttccacaacaactaaattcgatatggttccaaagtggcttgctactgctgtttgggaaattgtgtcaaaatataaatcaactattcctgaatttccccagaaggagacatgtgaactgctaattgtcgacaggcccatagatcagatagcacctgttattcatgaatggacctatgatgcaatgtgccatgatctactcgaaatggatggcaacaaatacatttatgaggtatcaaagatgggttcggaacctgaaaagaaggaatctttattagaggatcatgatcctctttggcttgaacttcgccatgctcacatagctgatgctagtgagaggttgtacgaaaagatgaacaattttgttgccaagaataaagcagcacaactttcaagagatggtggtgaagtctcaacacgggatctgcagaaaatcgttcaagcattaccccaatacagtgatcaagttgagaaattgacgctacatatagagattgctggaaaaatgaacaggtgtatcagggagtatgggctccgtgatattgggcaattggagcaggatttggtttttggagatgcgggagcgaaggaagtcatcagtatcctcaggtcaaagcaggatatgagcccagaaaacaaaatgaggttgctgattatatatgcaattgtatatccagagaagtttgaaggtgacaaaggggaaaagttgatgcagttagcgaagcttccacatgatgatatggatataataaattgtttaggatacttggatggttcaaatacaaaaaaatcatcaaggacgggtactttctctctcaaatttgatgcccaaaagaagaaaaatgctgccagaacagacaaacaagatggtgaggaaacatgggctttatcacgttttttcccacttattgaggagctgattgagaaactgagcaagggtgaattacctctaaaagagtacccatctatgagtgaaccaagttctgcttctgcttctcaagatgccacacaaactgcatcatcaactgcacgaccagcacaaaatccacaaccgatgtctatgagatcaaggaggacaccaacatgggcaaaatctcgtaattcggatgattcttcaagcagtgattcttcagtcctgagacacgcatcaggtgacttcaagaggctaggcaaccggatttttgtcttcatgattggtggagccactagatctgaactgcgcacggtgcacaagcttacaatgaaaatgaagcgcgaaatcgtcttgggctcttctagcatcgatgatcctccgcagtttatttcgcttacacattatacatacttcaccaatgaacagctctacattttactaggatgttgtcggctgtcaccagcgacccattgattatcgtcgaactgatcacagttattattctcttaatttttttttaattgaggaagtgagctggcttgtctggatgtaaaataagaaatacgtacacaacgttttgtttgttatttgatgttcttgttgacaaacagataaagagagaagtcattaggaggttttgtaaaaaaggcctaaaattgatggttatatgatatagaaactgtattgcacggatctataacagaatatggataaaattgattatggagggacacaacttcctttgcttgctc

SEQ ID NO: 219815 - DNA, 2539 bp, Zea Mays
cggagatcgtcgatcgatcgctgcggttcgtcggcggcggtgtcgagatgtcgatggacttcggtgccccggcggatgaccccaaggctttccgcaacatctgccgcgaccggatactgaaggacctgcttaagcctgacaaggataaggagaccaaaagctcatggaaggttcttataatggacaaattcacggtgaagatcatggcttatgcttgtaagatggcggaaattaccgatgcagggatttcgcttgtagaagatctgttcaagagaagggagccaatgccttcaatggatgcaatctactttcttcagccactgaaagaaaatgtcataatgcttctatctgacatgtctgggagatgcccactttacaggaaggcatacatcttcttcagctcaccgattcctaaagacttggttacttacataaagaatgacagtagtgtaataccacgcatcggtgcactaagagagatgaatttggaattcttcactattgacatgcagggctttgtaactgaccatgatactgccctgattgatttatacggtccaagtgaacaaaattccaaaaagttcaacgatactataagcacaatggctactcgcattgcgactacatttgcatcattgaagttaatcattagtagaaaattccatgtgttttgttacgctaaggaatttccatgtgtgcggtatcgggcgccaaaaggagatgcttccacaacaactaaattcgatatggttccaaagtggcttgctactgctgtttgggaaattgtgtcaaaatataaatcaactattcctgaatttccccagaaggagacatgtgaactgctaattgtcgacaggcccatagatcagatagcacctgttattcatgaatggacctatgatgcaatgtgccatgatctactcgaaatggatggcaacaaatacatttatgaggtatcaaagatgggttcggaacctgaaaagaaggaatctttattagaggatcatgatcctctttggcttgaacttcgccatgctcacatagctgatgctagtgagaggttgtacgaaaagatgaacaattttgttgccaagaataaagcagcacaactttcaagagatggtggtgaagtctcaacacgggatctgcagaaaatcgttcaagcattaccccaatacagtgatcaagttgagaaattgacgctacatatagagattgctggaaaaatgaacaggtgtatcagggagtatgggctccgtgatattgggcaattggagcaggatttggtttttggagatgcgggagcgaaggaagtcatcagtatcctcaggtcaaagcaggatatgagcccagaaaacaaaatgaggttgctgattatatatgcaattgtatatccagagaagtttgaaggtgacaaaggggaaaagttgatgcagttagcgaagcttccacatgatgatatggatataataaattgtttaggatacttggatggttcaaatacaaaaaaatcatcaaggacgggtactttctctctcaaatttgatgcccaaaagaagaaaaatgctgccagaacagacaaacaagatggtgaggaaacatgggctttatcacgttttttcccacttattgaggagctgattgagaaactgagcaagggtgaattacctctaaaagagtacccatctatgagtgaaccaagttctgcttctgcttctcaagatgccacacaaactgcatcatcaactgcacgaccagcacaaaatccacaaccgatgtctatgagatcaaggaggacaccaacatgggcaaaatctcgtaattcggatgattcttcaagtgattcttcagtcctgagacacgcatcaggtgacttcaagaggctaggcaaccggatttttgtcttcatgattggtggagccactagatctgaactgcgcacggtgcacaagcttacaatgaaaatgaagcgcgaaatcgtcttgggctcttctagcatcgatgatcctccgcagtttatttcggtaaaaactcaattcctgttttttaggttctactactatatgttcatgcaacaactctgcaagtgcagaagctgaagtcgataggtagtgctaccaagacctagcttgtatgccgagcgataaaatgaattctcaccttatagtactcagtataagcttacacattatacatacttcaccaatgaacagctctacattttactaggatgttgtcggctgtcaccagcgacccattgattatcgtcgaactgatcacagttattattctcttaatttttttttaattgaggaagtgagctggcttgtctggatgtaaaataagaaatacgtacacaacgttttgtttgttatttgatgttcttgttgacaaacagataaagagagaagtcattaggaggttttgtaaaaaaggcctaaaattgatggttatatgatatagaaactgtattgcacggatctataacagaatatggataaaattgattatggagggacacaacttcctttgcttgctc

SEQ ID NO: 219816 - DNA, 2541 bp, Zea Mays
ggagatcgtcgatcgatcgctgcggttcgtcggcggcggtgtcgagatgtcgatggacttcggtgccccggcggatgaccccaaggctttccgcaacatctgccgcgaccggatactgaaggacctgcttaagcctgacaaggataaggagaccaaaagctcatggaaggttcttataatggacaaattcacggtgaagatcatggcttatgcttgtaagatggcggaaattaccgatgcagggatttcgcttgtagaagatctgttcaagagaagggagccaatgccttcaatggatgcaatctactttcttcagccactgaaagaaaatgtcataatgcttctatctgacatgtctgggagatgcccactttacaggaaggcatacatcttcttcagctcaccgattcctaaagacttggttacttacataaagaatgacagtagtgtaataccacgcatcggtgcactaagagagatgaatttggaattcttcactattgacatgcagggctttgtaactgaccatgatactgccctgattgatttatacggtccaagtgaacaaaattccaaaaagttcaacgatactataagcacaatggctactcgcattgcgactacatttgcatcattgaagttaatcattagtagaaaattccatgtgttttgttacgctaaggaatttccatgtgtgcggtatcgggcgccaaaaggagatgcttccacaacaactaaattcgatatggttccaaagtggcttgctactgctgtttgggaaattgtgtcaaaatataaatcaactattcctgaatttccccagaaggagacatgtgaactgctaattgtcgacaggcccatagatcagatagcacctgttattcatgaatggacctatgatgcaatgtgccatgatctactcgaaatggatggcaacaaatacatttatgaggtatcaaagatgggttcggaacctgaaaagaaggaatctttattagaggatcatgatcctctttggcttgaacttcgccatgctcacatagctgatgctagtgagaggttgtacgaaaagatgaacaattttgttgccaagaataaagcagcacaactttcaagagatggtggtgaagtctcaacacgggatctgcagaaaatcgttcaagcattaccccaatacagtgatcaagttgagaaattgacgctacatatagagattgctggaaaaatgaacaggtgtatcagggagtatgggctccgtgatattgggcaattggagcaggatttggtttttggagatgcgggagcgaaggaagtcatcagtatcctcaggtcaaagcaggatatgagcccagaaaacaaaatgaggttgctgattatatatgcaattgtatatccagagaagtttgaaggtgacaaaggggaaaagttgatgcagttagcgaagcttccacatgatgatatggatataataaattgtttaggatacttggatggttcaaatacaaaaaaatcatcaaggacgggtactttctctctcaaatttgatgcccaaaagaagaaaaatgctgccagaacagacaaacaagatggtgaggaaacatgggctttatcacgttttttcccacttattgaggagctgattgagaaactgagcaagggtgaattacctctaaaagagtacccatctatgagtgaaccaagttctgcttctgcttctcaagatgccacacaaactgcatcatcaactgcacgaccagcacaaaatccacaaccgatgtctatgagatcaaggaggacaccaacatgggcaaaatctcgtaattcggatgattcttcaagcagtgattcttcagtcctgagacacgcatcaggtgacttcaagaggctaggcaaccggatttttgtcttcatgattggtggagccactagatctgaactgcgcacggtgcacaagcttacaatgaaaatgaagcgcgaaatcgtcttgggctcttctagcatcgatgatcctccgcagtttatttcggtaaaaactcaattcctgttttttaggttctactactatatgttcatgcaacaactctgcaagtgcagaagctgaagtcgataggtagtgctaccaagacctagcttgtatgccgagcgataaaatgaattctcaccttatagtactcagtataagcttacacattatacatacttcaccaatgaacagctctacattttactaggatgttgtcggctgtcaccagcgacccattgattatcgtcgaactgatcacagttattattctcttaatttttttttaattgaggaagtgagctggcttgtctggatgtaaaataagaaatacgtacacaacgttttgtttgttatttgatgttcttgttgacaaacagataaagagagaagtcattaggaggttttgtaaaaaaggcctaaaattgatggttatatgatatagaaactgtattgcacggatctataacagaatatggataaaattgattatggagggacacaacttcctttgcttgctc

SEQ ID NO: 219817 - DNA, 2502 bp, Zea Mays
gtcgatcgatcgctgcggttcgtcggcggcggtgtcgagatgtcgatggacttcggtgccccggcggatgaccccaaggctttccgcaacatctgccgcgaccggatactgaaggacctgcttaagcctgacaaggataaggagaccaaaagctcatggaaggttcttataatggacaaattcacggtgaagatcatggcttatgcttgtaagatggcggaaattaccgatgcagggatttcgcttgtagaagatctgttcaagagaagggagccaatgccttcaatggatgcaatctactttcttcagccactgaaagaaaatgtcataatgcttctatctgacatgtctgggagatgcccactttacaggaaggcatacatcttcttcagctcaccgattcctaaagacttggttacttacataaagaatgacagtagtatgaatttggaattcttcactattgacatgcagggctttgtaactgaccatgatactgccctgattgatttatacggtccaagtgaacaaaattccaaaaagttcaacgatactataagcacaatggctactcgcattgcgactacatttgcatcattgaagttaatcattagtagaaaattccatgtgttttgttacgctaaggaatttccatgtgtgcggtatcgggcgccaaaaggagatgcttccacaacaactaaattcgatatggttccaaagtggcttgctactgctgtttgggaaattgtgtcaaaatataaatcaactattcctgaatttccccagaaggagacatgtgaactgctaattgtcgacaggcccatagatcagatagcacctgttattcatgaatggacctatgatgcaatgtgccatgatctactcgaaatggatggcaacaaatacatttatgaggtatcaaagatgggttcggaacctgaaaagaaggaatctttattagaggatcatgatcctctttggcttgaacttcgccatgctcacatagctgatgctagtgagaggttgtacgaaaagatgaacaattttgttgccaagaataaagcagcacaactttcaagaattctagaatgttggaatgacttatcatttggcatggagttcataaaaatgattgatgtttccattttcaactagagatggtggtgaagtctcaacacgggatctgcagaaaatcgttcaagcattaccccaatacagtgatcaagttgagaaattgacgctacatatagagattgctggaaaaatgaacaggtgtatcagggagtatgggctccgtgatattgggcaattggagcaggatttggtttttggagatgcgggagcgaaggaagtcatcagtatcctcaggtcaaagcaggatatgagcccagaaaacaaaatgaggttgctgattatatatgcaattgtatatccagagaagtttgaaggtgacaaaggggaaaagttgatgcagttagcgaagcttccacatgatgatatggatataataaattgtttaggatacttggatggttcaaatacaaaaaaatcatcaaggacgggtactttctctctcaaatttgatgcccaaaaggagctgattgagaaactgagcaagggtgaattacctctaaaagagtacccatctatgagtgaaccaagttctgcttctgcttctcaagatgccacacaaactgcatcatcaactgcacgaccagcacaaaatccacaaccgatgtctatgagatcaaggaggacaccaacatgggcaaaatctcgtaattcggatgattcttcaagcagtgattcttcagtcctgagacacgcatcaggtgacttcaagaggctaggcaaccggatttttgtcttcatgattggtggagccactagatctgaactgcgcacggtgcacaagcttacaatgaaaatgaagcgcgaaatcgtcttgggctcttctagcatcgatgatcctccgcagtttatttcggtaaaaactcaattcctgttttttaggttctactactatatgttcatgcaacaactctgcaagtgcagaagctgaagtcgataggtagtgctaccaagacctagcttgtatgccgagcgataaaatgaattctcaccttatagtactcagtataagcttacacattatacatacttcaccaatgaacagctctacattttactaggatgttgtcggctgtcaccagcgacccattgattatcgtcgaactgatcacagttattattctcttaatttttttttaattgaggaagtgagctggcttgtctggatgtaaaataagaaatacgtacacaacgttttgtttgttatttgatgttcttgttgacaaacagataaagagagaagtcattaggaggttttgtaaaaaaggcctaaaattgatggttatatgatatagaaactgtattgcacggatctataacagaatatggataaaattgattatggagggacacaacttcctttgcttgctc

SEQ ID NO: 219818 - DNA, 3283 bp, Zea Mays
cacaccgtcattaagtaggaaagaaagatgtgccacagaaaatcaatgtgtgcgtctggcgaaggcaacaggggccgaagtgtcaacgtgtggctgcaatccacctccgcattcactccacgcgcacgccgctatacgcgacgctgccgagcgcatcgccgccggtccctccctcacttcctgtgcctgttctcagcccgccgcttctcagtccacttctgccgcagcccctcttctctcggtctagagatccgtccgggcgcggcagcctcgctttcgtttcgcttgtttaccaaaatttagggggtcacgtgaagcctgtccctgcttcaggaggggcgaatgttccttcttccaaattcccagttcgcgatgttttttccccttatggatggtcaatggtgcagtagctggcgtcaaatacttttagaatagagccttttctatctgatgtaccaatgctagaataaaactcatttgttcataactggatccctcaagcaatagtagttcttaatcttctacctttgttgaattgtgaaatatgacactgtgcttgcgctagtttgaagtccaacccaggagtgattagtggtgttcagctcagtaccgtagttctgctttgagcatgtttggtgtccggtgtccattttcgtctgcctcaatctgaatctttatgtttaccttttttccccactttcagcataatccaaattctatttgacatgttacctttttcatccatacctgtgatttggatttatgacttatcttgctgtaatttcctttgacctgattgtttagtcgtgttgaagaatgtagtatctgtggtagcatggccatgagaagccagtgattttgagttttctttgtcgttatttttctaagttagttccgcttaatatatcatgatcaaggccagttatttaattcttagaagcggtctgtgcttctgttaagtttctatttgcagaaatctagcttttactaccatgcccaattatgtctaataggcacggagaacaatcactttagaagacttgtactccttggcgtgtcatactctttgtaacaatcttaccattcttgagaagaggtacatctgtccgtcagcaatgtccatagaagagaggaagataagtgtgataagcaagagcattgcgctaaatccaaatgcagaggaatttgttccttcatcccttagatctgtcaatgattcctccaagagatcatatgcaactacggttgtctcagggatatctaaagaatccagcactgacaagccagagtcaattttacgaagtaactctgatgaagaagcacatcagtactggcagcaacagctccctgacgacattacccctgatttcaaagtcatgggacaagatgaaagtcctggacctgacagtctatcactcacagacctgtccataaatgatggcattggcacatcaatattttctccgaaccagacactgagcatgcagcaccgtgcttcgccttttatcagggacaaactaaatacacacccaaagattaacttgtctatcccaacttatatggatgaacggtcccaagccacaattttgagtccaactgcaggttccatgagtccaaatgctgctccatgggtgaagactctaaggaatgggggacattataacacaagcataagggatgccagtcagtacaatggagattctagcattggagcttcattgcacaaccttactgatgcatatcatggaagcaggcgcagcttaagctcgactatggatatcatgaatcagctggagagtaaagtcgatggacgacgcagtcagaacctcaggtcactatcatttggaaattcaagtcctacatcaccagcatcatatgcccaaaatggtcttggaaactatgctggacgtgaacacgtatccctcgatgttcctagaggaaggtacaagacgactagtttgcctgttcctggtcttggttcaagcagaggttatcagttgttgggtggctcatataatggaaaccatgatatgatctcaaccaataccccacaaaacatggctggaattcagacaggaccagcttggcttgaaagtgacgctgaggcaagcacatatttggaatcaaaggatgaagttcatgattttgcaagcctgcgacatgcagttcttgaacaggagctatacagtatacaaagcctgttggctcaggagaaggctagagaaacaacatatcgacaaagattacaaacaccacaattgcaaggcctcatccaggagcaaaatcccccaatcgatctctgtggtcttcacatcagcgaggcaatacacgtcctgaactacgagctcaacaaccgaagaaagatcgtgagatcaaccggtcgccgactccaggtgcaaccaggcctgctccgcatcctgctctagtaatggaactggtcgtcctagctgttgttcacaactggatcagatgaaaaagaagggaaaaagaaaagaaaagaaaagataagttgacctgtacttttgtatatggcagagattgctagcaggatagtagcgttaagaacttaagatagctcatgtaacattcatgtcaggctttttgtcagcaaatgtatacgtcttaaaatttgggagttagggaatattctcgttgtctttggtgccggtggatgcacacggcatagcgtcttcacagaatcacaatcatattctcgatcacaatcttcggtgctggtggatgcttaagttctgttcctgctggtgaattcaaattgtgagtaatgcctggtcgatgcattagttcttcacaatagtcgattcaaattgtgcgttgttagattattgttttgtattttgtctaagtgtaatgggcattggttagtctatatctctttactgatatatacaacattcagtctctataggatagggttttcaacattgtatccagtctagttctctcttccttagccgttgccaccacctggccgttgtcatcacagctcctggatggtgtgtctcttataaatatgttctagagataataacatagatgagcatattttttttagcaatgcaaaaccaaactgtgccaaattcaatcaacgagcttgttttcagtgttagacatgaaatggtacactcagttcatttgatgtcaaactaaatggcagtgctgaagcacaatggcacggcgcagtgtggagggatcaaatgtccaacatatggcagctcagtcccgttcactaattgccgtcaggtgctggtcaatctcctctgtt

SEQ ID NO: 219819 - DNA, 2675 bp, Zea Mays
ctggcgaaggcaacaggggccgaagtgtcaacgtgtggctgcaatccacctccgcattcactccacgcgcacgccgctatacgcgacgctgccgagcgcatcgccgccggtccctccctcacttcctgtgcctgttctcagcccgccgcttctcagtccacttctgccgcagcccctcttctctcggtctagagatccgtccgggcgcggcagcctcgctttcgtttcggcacggagaacaatcactttagaagacttgtactccttggcgtgtcatactctttgtaacaatcttaccattcttgagaagaggtacatctgtccgtcagcaatgtccatagaagagaggaagataagtgtgataagcaagagcattgcgctaaatccaaatgcagaggaatttgttccttcatcccttagatctgtcaatgattcctccaagagatcatatgcaactacggttgtctcagggatatctaaagaatccagcactgacaagccagagtcaattttacgaagtaactctgatgaagaagcacatcagtactggcagcaacagctccctgacgacattacccctgatttcaaagtcatgggacaagatgaaagtcctggacctgacagtctatcactcacagacctgtccataaatgatggcattggcacatcaatattttctccgaaccagacactgagcatgcagcaccgtgcttcgccttttatcagggacaaactaaatacacacccaaagattaacttgtctatcccaacttatatggatgaacggtcccaagccacaattttgagtccaactgcaggttccatgagtccaaatgctgctccatgggtgaagactctaaggaatgggggacattataacacaagcataagggatgccagtcagtacaatggagattctagcattggagcttcattgcacaaccttactgatgcatatcatggaagcaggcgcagcttaagctcgactatggatatcatgaatcagctggaggtctgtcctcagtgtcctcatttgtcaactatgctacatgtctaaagttgttttgtcccatgtggccatgtttctcgtttctccactatgctgtttgtatcaaattgttcttaccaaaagctgcaccaactgaaactgtcatgctgctgacgactcaactatctatgtgaaagatcagcttaaagagatgctactgtgcacctaatgtatctgtatcactaaccagttctatcttggatgattggttctgaaattcataacatttcttaaattatgtttgttttttgttttaaatttccaagaatactgtaaaatgtcttattttagtgcaggatcgatcgtacatacactcgtattgctggatctatgttcaggcatagtgtactagtagctcaaatataggaaaatgcttatcctctagaaggcgctgaactaccccccctcctccttgtgtccagagtaaagtcgatggacgacgcagtcagaacctcaggtcactatcatttggaaattcaagtcctacatcaccagcatcatatgcccaaaatggtcttggaaactatgctggacgtgaacacgtatccctcgatgttcctagaggaaggtacaagacgactagtttgcctgttcctggtcttggttcaagcagaggttatcagttgttgggtggctcatataatggaaaccatgatatgatctcaaccaataccccacaaaacatggctggaattcagacaggaccagcttggcttgaaagtgacgctgaggcaagcacatatttggaatcaaaggatgaagttcatgattttgcaagcctgcgacatgcagttcttgaacaggagctatacagtatacaaagcctgttggctcaggagaaggctagagaaacaacatatcgacaaagattacaaacaccacaattgcaaggcctcatccaggagcaaaatcccccaatcgatctctgtggtcttcacatcagcgaggcaatacacgtcctgaactacgagctcaacaaccgaagaaagatcgtgagatcaaccggtcgccgactccaggtgcaaccaggcctgctccgcatcctgctctagtaatggaactggtcgtcctagctgttgttcacaactggatcagatgaaaaagaagggaaaaagaaaagaaaagaaaagataagttgacctgtacttttgtatatggcagagattgctagcaggatagtagcgttaagaacttaagatagctcatgtaacattcatgtcaggctttttgtcagcaaatgtatacgtcttaaaatttgggagttagggaatattctcgttgtctttggtgccggtggatgcacacggcatagcgtcttcacagaatcacaatcatattctcgatcacaatcttcggtgctggtggatgcttaagttctgttcctgctggtgaattcaaattgtgagtaatgcctggtcgatgcattagttcttcacaatagtcgattcaaattgtgcgttgttagattattgttttgtattttgtctaagtgtaatgggcattggttagtctatatctctttactgatatatacaacattcagtctctataggatagggttttcaacattgtatccagtctagttctctcttccttagccgttgccaccacctggccgttgtcatca

SEQ ID NO: 219820 - DNA, 2821 bp, Zea Mays
ctggcgaaggcaacaggggccgaagtgtcaacgtgtggctgcaatccacctccgcattcactccacgcgcacgccgctatacgcgacgctgccgagcgcatcgccgccggtccctccctcacttcctgtgcctgttctcagcccgccgcttctcagtccacttctgccgcagcccctcttctctcggtctagagatccgtccgggcgcggcagcctcgctttcgtttcgaggtacatctgtccgtcagcaatgtccatagaagagaggaagataagtgtgataagcaagagcattgcgctaaatccaaatgcagaggaatttgttccttcatcccttagatctgtcaatgattcctccaagagatcatatgcaactacggttgtctcagggatatctaaagaatccagcactgacaagccagagtcaattttacgaagtaactctgatgaagaagcacatcagtactggcagcaacagctccctgacgacattacccctgatttcaaagtcatgggacaagatgaaagtcctggacctgacagtctatcactcacagacctgtccataaatgatggcattggcacatcaatattttctccgaaccagacactgagcatgcagcaccgtgcttcgccttttatcagggacaaactaaatacacacccaaagattaacttgtctatcccaacttatatggatgaacggtcccaagccacaattttgagtccaactgcaggttccatgagtccaaatgctgctccatgggtgaagactctaaggaatgggggacattataacacaagcataagggatgccagtcagtacaatggagattctagcattggagcttcattgcacaaccttactgatgcatatcatggaagcaggcgcagcttaagctcgactatggatatcatgaatcagctggaggtctgtcctcagtgtcctcatttgtcaactatgctacatgtctaaagttgttttgtcccatgtggccatgtttctcgtttctccactatgctgtttgtatcaaattgttcttaccaaaagctgcaccaactgaaactgtcatgctgctgacgactcaactatctatgtgaaagatcagcttaaagagatgctactgtgcacctaatgtatctgtatcactaaccagttctatcttggatgattggttctgaaattcataacatttcttaaattatgtttgttttttgttttaaatttccaagaatactgtaaaatgtcttattttagtgcaggatcgatcgtacatacactcgtattgctggatctatgttcaggcatagtgtactagtagctcaaatataggaaaatgcttatcctctagaaggcgctgaactaccccccctcctccttgtgtccaggtcaatctattcgctgtgactccgtgtactccggttttattctacttttgaacaagaacgagcgataatgaaacgattaattattcctttgatcttccttctactaacaaaattacatgtgccgtgtttgcacacgattttattctagttcgagcatgcttcacagaaatggctattgtacttgtttactgcatggatcttctacatacatttatgcctaataacagagtaaagtcgatggacgacgcagtcagaacctcaggtcactatcatttggaaattcaagtcctacatcaccagcatcatatgcccaaaatggtcttggaaactatgctggacgtgaacacgtatccctcgatgttcctagaggaaggtacaagacgactagtttgcctgttcctggtcttggttcaagcagaggttatcagttgttgggtggctcatataatggaaaccatgatatgatctcaaccaataccccacaaaacatggctggaattcagacaggaccagcttggcttgaaagtgacgctgaggcaagcacatatttggaatcaaaggatgaagttcatgattttgcaagcctgcgacatgcagttcttgaacaggagctatacagtatacaaagcctgttggctcaggagaaggctagagaaacaacatatcgacaaagattacaaacaccacaattgcaaggcctcatccaggagcaaaatcccccaatcgatctctgtggtcttcacatcagcgaggcaatacacgtcctgaactacgagctcaacaaccgaagaaagatcgtgagatcaaccggtcgccgactccaggtgcaaccaggcctgctccgcatcctgctctagtaatggaactggtcgtcctagctgttgttcacaactggatcagatgaaaaagaagggaaaaagaaaagaaaagaaaagataagttgacctgtacttttgtatatggcagagattgctagcaggatagtagcgttaagaacttaagatagctcatgtaacattcatgtcaggctttttgtcagcaaatgtatacgtcttaaaatttgggagttagggaatattctcgttgtctttggtgccggtggatgcacacggcatagcgtcttcacagaatcacaatcatattctcgatcacaatcttcggtgctggtggatgcttaagttctgttcctgctggtgaattcaaattgtgagtaatgcctggtcgatgcattagttcttcacaatagtcgattcaaattgtgcgttgttagattattgttttgtattttgtctaagtgtaatgggcattggttagtctatatctctttactgatatatacaacattcagtctctataggatagggttttcaacattgtatccagtctagttctctcttccttagccgttgccaccacctggccgttgtcatca

SEQ ID NO: 219821 - DNA, 2764 bp, Zea Mays
ctggcgaaggcaacaggggccgaagtgtcaacgtgtggctgcaatccacctccgcattcactccacgcgcacgccgctatacgcgacgctgccgagcgcatcgccgccggtccctccctcacttcctgtgcctgttctcagcccgccgcttctcagtccacttctgccgcagcccctcttctctcggtctagagatccgtccgggcgcggcagcctcgctttcgtttcgaggtacatctgtccgtcagcaatgtccatagaagagaggaagataagtgtgataagcaagagcattgcgctaaatccaaatgcagaggaatttgttccttcatcccttagatctgtcaatgattcctccaagagatcatatgcaactacggttgtctcagggatatctaaagaatccagcactgacaagccagagtcaattttacgaagtaactctgatgaagaagcacatcagtactggcagcaacagctccctgacgacattacccctgatttcaaagtcatgggacaagatgaaagtcctggacctgacagtctatcactcacagacctgtccataaatgatggcattggcacatcaatattttctccgaaccagacactgagcatgcagcaccgtgcttcgccttttatcagggacaaactaaatacacacccaaagattaacttgtctatcccaacttatatggatgaacggtcccaagccacaattttgagtccaactgcaggttccatgagtccaaatgctgctccatgggtgaagactctaaggaatgggggacattataacacaagcataagggatgccagtcagtacaatggagattctagcattggagcttcattgcacaaccttactgatgcatatcatggaagcaggcgcagcttaagctcgactatggatatcatgaatcagctggagtgcaggatcgatcgtacatacactcgtattgctggatctatgttcaggcatagtgtactagtagctcaaatataggaaaatgcttatcctctagaaggcgctgaactaccccccctcctccttgtgtccaggtcaatctattcgctgtgactccgtgtactccggttttattctacttttgaacaagaacgagcgataatgaaacgattaattattcctttgatcttccttctactaacaaaattacatgtgccgtgtttgcacacgattttattctagttcgagcatgcttcacagaaatggctattgtacttgtttactgcatggatcttctacatacatttatgcctaataacagagtaaagtcgatggacgacgcagtcagaacctcaggtcactatcatttggaaattcaagtcctacatcaccagcatcatatgcccaaaatggtcttggaaactatgctggacgtgaacacgtatccctcgatgttcctagaggaaggtacaagacgactagtttgcctgttcctggtcttggttcaagcagaggttatcagttgttgggtggctcatataatggaaaccatgatatgatctcaaccaataccccacaaaacatggctggaattcagacaggaccagcttggcttgaaagtgacgctgagggtagtgctctcgaattacaatattactacatccgttctcgaatatttatcgtccgctagttcatttttgaactaaaacgtgacaaataaaaaagaacggagggagtactttttatgatatggtagtaaatatgtgtggcatgcatgttttcttatggtttgaacttgtttgtgataatagcaagcacatatttggaatcaaaggatgaagttcatgattttgcaagcctgcgacatgcagttcttgaacaggagctatacagtatacaaagcctgttggctcaggagaaggctagagaaacaacatatcgacaaagattacaaacaccacaattgcaaggcctcatccaggagcaaaatcccccaatcgatctctgtggtcttcacatcagcgaggcaatacacgtcctgaactacgagctcaacaaccgaagaaagatcgtgagatcaaccggtcgccgactccaggttatgataatatcaagcgcccgcaccccagcaaggctgactgccgccgtcgagcagtatctcatggaacacggccttctgtacacgcaggtgcaaccaggcctgctccgcatcctgctctagtaatggaactggtcgtcctagctgttgttcacaactggatcagatgaaaaagaagggaaaaagaaaagaaaagaaaagataagttgacctgtacttttgtatatggcagagattgctagcaggatagtagcgttaagaacttaagatagctcatgtaacattcatgtcaggctttttgtcagcaaatgtatacgtcttaaaatttgggagttagggaatattctcgttgtctttggtgccggtggatgcacacggcatagcgtcttcacagaatcacaatcatattctcgatcacaatcttcggtgctggtggatgcttaagttctgttcctgctggtgaattcaaattgtgagtaatgcctggtcgatgcattagttcttcacaatagtcgattcaaattgtgcgttgttagattattgttttgtattttgtctaagtgtaatgggcattggttagtctatatctctttactgatatatacaacattcagtctctataggatagggttttcaacattgtatccagtctagttctctcttccttagccgttgccaccacctggccgttgtcatca

SEQ ID NO: 219822 - DNA, 1718 bp, Zea Mays
ctggcgaaggcaacaggggccgaagtgtcaacgtgtggctgcaatccacctccgcattcactccacgcgcacgccgctatacgcgacgctgccgagcgcatcgccgccggtccctccctcacttcctgtgcctgttctcagcccgccgcttctcagtccacttctgccgcagcccctcttctctcggtctagagatccgtccgggcgcggcagcctcgctttcgtttcggttccatgagtccaaatgctgctccatgggtgaagactctaaggaatgggggacattataacacaagcataagggatgccagtcagtacaatggagattctagcattggagcttcattgcacaaccttactgatgcatatcatggaagcaggcgcagcttaagctcgactatggatatcatgaatcagctggagagtaaagtcgatggacgacgcagtcagaacctcaggtcactatcatttggaaattcaagtcctacatcaccagcatcatatgcccaaaatggtcttggaaactatgctggacgtgaacacgtatccctcgatgttcctagaggaaggtacaagacgactagtttgcctgttcctggtcttggttcaagcagaggttatcagttgttgggtggctcatataatggaaaccatgatatgatctcaaccaataccccacaaaacatggctggaattcagacaggaccagcttggcttgaaagtgacgctgaggcaagcacatatttggaatcaaaggatgaagttcatgattttgcaagcctgcgacatgcagttcttgaacaggagctatacagtatacaaagcctgttggctcaggagaaggctagagaaacaacatatcgacaaagattacaaacaccacaattgcaaggcctcatccaggagcaaaatcccccaatcgatctctgtggtcttcacatcagcgaggcaatacacgtcctgaactacgagctcaacaaccgaagaaagatcgtgagatcaaccggtcgccgactccaggttatgataatatcaagcgcccgcaccccagcaaggctgactgccgccgtcgagcagtatctcatggaacacggccttctgtacacgcaggtgcaaccaggcctgctccgcatcctgctctagtaatggaactggtcgtcctagctgttgttcacaactggatcagatgaaaaagaagggaaaaagaaaagaaaagaaaagataagttgacctgtacttttgtatatggcagagattgctagcaggatagtagcgttaagaacttaagatagctcatgtaacattcatgtcaggctttttgtcagcaaatgtatacgtcttaaaatttgggagttagggaatattctcgttgtctttggtgccggtggatgcacacggcatagcgtcttcacagaatcacaatcatattctcgatcacaatcttcggtgctggtggatgcttaagttctgttcctgctggtgaattcaaattgtgagtaatgcctggtcgatgcattagttcttcacaatagtcgattcaaattgtgcgttgttagattattgttttgtattttgtctaagtgtaatgggcattggttagtctatatctctttactgatatatacaacattcagtctctataggatagggttttcaacattgtatccagtctagttctctcttccttagccgttgccaccacctggccgttgtcatca

SEQ ID NO: 219823 - DNA, 2889 bp, Zea Mays
atcaatgtgtgcgtctggcgaaggcaacaggggccgaagtgtcaacgtgtggctgcaatccacctccgcattcactccacgcgcacgccgctatacgcgacgctgccgagcgcatcgccgccggtccctccctcacttcctgtgcctgttctcagcccgccgcttctcagtccacttctgccgcagcccctcttctctcggtctagagatccgtccgggcgcggcagcctcgctttcgtttcgcttgtttaccaaaatttagggggtcacgtgaagcctgtccctgcttcaggaggggcgaatgttccttcttccaaattcccagttcgcgatgttttttccccttatggatggtcaatggtgcagtagctggcgtcaaatacttttagaatagagccttttctatctgatgtaccaatgctagaataaaactcatttgttcataactggatccctcaagcaatagtagttcttaatcttctacctttgttgaattgtgaaatatgacactgtgcttgcgctagtttgaagtccaacccaggagtgattagtggtgttcagctcagtaccgtagttctgctttgagcatgtttggtgtccggtgtccattttcgtctgcctcaatctgaatctttatgtttaccttttttccccactttcagcataatccaaattctatttgacatgttacctttttcatccatacctgtgatttggatttatgacttatcttgctgtaatttcctttgacctgattgtttagtcgtgttgaagaatgtagtatctgtggtagcatggccatgagaagccagtgattttgagttttctttgtcgttatttttctaagttagttccgcttaatatatcatgatcaaggccagttatttaattcttagaagcggtctgtgcttctgttaagtttctatttgcagaaatctagcttttactaccatgcccaattatgtctaataggcacggagaacaatcactttagaagacttgtactccttggcgtgtcatactctttgtaacaatcttaccattcttgagaagaggtacatctgtccgtcagcaatgtccatagaagagaggaagataagtgtgataagcaagagcattgcgctaaatccaaatgcagaggaatttgttccttcatcccttagatctgtcaatgattcctccaagagatcatatgcaactacggttgtctcagggatatctaaagaatccagcactgacaagccagagtcaattttacgaagtaactctgatgaagaagcacatcagtactggcagcaacagctccctgacgacattacccctgatttcaaagtcatgggacaagatgaaagtcctggacctgacagtctatcactcacagacctgtccataaatgatggcattggcacatcaatattttctccgaaccagacactgagcatgcagcaccgtgcttcgccttttatcagggacaaactaaatacacacccaaagattaacttgtctatcccaacttatatggatgaacggtcccaagccacaattttgagtccaactgcaggttccatgagtccaaatgctgctccatgggtgaagactctaaggaatgggggacattataacacaagcataagggatgccagtcagtacaatggagattctagcattggagcttcattgcacaaccttactgatgcatatcatggaagcaggcgcagcttaagctcgactatggatatcatgaatcagctggagagtaaagtcgatggacgacgcagtcagaacctcaggtcactatcatttggaaattcaagtcctacatcaccagcatcatatgcccaaaatggtcttggaaactatgctggacgtgaacacgtatccctcgatgttcctagaggaaggtacaagacgactagtttgcctgttcctggtcttggttcaagcagaggttatcagttgttgggtggctcatataatggaaaccatgatatgatctcaaccaataccccacaaaacatggctggaattcagacaggaccagcttggcttgaaagtgacgctgagggagctatacagtatacaaagcctgttggctcaggagaaggctagagaaacaacatatcgacaaagattacaaacaccacaattgcaaggcctcatccaggagcaaaatcccccaatcgatctctgtggtcttcacatcagcgaggcaatacacgtcctgaactacgagctcaacaaccgaagaaagatcgtgagatcaaccggtcgccgactccaggtgcaaccaggcctgctccgcatcctgctctagtaatggaactggtcgtcctagctgttgttcacaactggatcagatgaaaaagaagggaaaaagaaaagaaaagaaaagataagttgacctgtacttttgtatatggcagagattgctagcaggatagtagcgttaagaacttaagatagctcatgtaacattcatgtcaggctttttgtcagcaaatgtatacgtcttaaaatttgggagttagggaatattctcgttgtctttggtgccggtggatgcacacggcatagcgtcttcacagaatcacaatcatattctcgatcacaatcttcggtgctggtggatgcttaagttctgttcctgctggtgaattcaaattgtgagtaatgcctggtcgatgcattagttcttcacaatagtcgattcaaattgtgcgttgttagattattgttttgtattttgtctaagtgtaatgggcattggttagtctatatctctttactgatatatacaacattcagtctctataggatagggttttcaacattgtatccagtctagttctctcttccttagccgttgccaccacctggccgttgtcatca

SEQ ID NO: 219824 - DNA, 3878 bp, Zea Mays
ctagtattggttatgtccaactaaccaacttcataaaaaagtgtggatttctaaaaaagataaaaataaaaaaccgtctcttctccggcccgcctcctctgaaaccctaaaaaacccaatctatttgtttccgccgccgtgtctgtctcggcccaggcaagccaccgcatgcaccgccgtcgctcacaccgttccagcgcctcgtaccctcactgacgtagtgcgcgctgctccgccaacgcccccagcgacccaaacagactccgacccgcgccgtccgttccgtgtccggcctcgccgccgattctctcggagctcctgccctgccgtgcgggagcacttcttcgaacagatggaggctcgccgcgcgaggccgagcaaccagacgcactccagctgttggacgaatccctcctcctccacgccaggccctgcgtcgcctgaattcctcactacggtccgcggagcagcattttgcggccgtggcttcgcctccgccacagcaaggttgtcgtcatactcctttttatgtgtgaagaaggagaggaggtgcttatcgtagtcagtgacagtggtggatccagcagctcttgtggaaagcggcggaggggagttgacagtaacaacagcaacaaccgcggaagggggtgtgatgcttgcttgcagatgttgctgttatcgccttgggggtgattattctgtcctgtgctctaatgatgctcggaatgatgatggaactccccgtcagtgcgcctggttaatcacaagtaaattcatctcttttaatttgttctctctcttctccgattccctttgcacttttcttttctgcggagagagacgaggaggaatctgaatgtgtgggcgagtgttgaaagaggacgaaaataaatatctgacgagcagaggaatgctcgtatatatatgatgcttgtagaaaaagatcccggtgcagcaactcgctttcggccccgatcgtcttttcccctgctgccaaggtccaaccaaacacgatcggaggatagggctcccctcccggcttttctatccctccctctcctctgctcctgtgctatcctccgttcatcactcccccaggatcccctgcagctaccattgctacaacacgggtacagtacaggtgaggagggagaaaacaaacgaacgaaataaagagagtacgcatgggtttgcagatgatccatggcaggccctgcgccttgtgctgcccgtcctcctcctcctcgtcctccgccttgtggatgaggatgcaggcccagctgcccccaaagcagtctcaccatccatgtcagtgctctctctctctctctctctctctctctctgctcgtcaacgctagttccacgtgcattttcctgtcgtcctgtgtgctgcatggaattctctattggttgatggcgtacaagattactattgccgcggactgacggcacggcaggtaggctaggcagcagcaacacagacacacaccaaggatgacatgctcttgccatttcttcgttgtctgcagtgaacggaggaagggcaatctcctctgaatccctcgcggcactggcatggcatttcctgctaaggcgtcgcagcagggacggtgccacagctctcgcatcttcatccggggtgcttcaaatcgcagaggacaaatcatctgcggccaacttgacaaagcacaaggtgagtgcagaaaggaagctcctcaacgacgctcttgacagaactggtgtgcgatatgagactgagagctggatggatgaagagacatcgtcctggatggacagggatctcacggacagcgatttgcggtaccgcttgctaatgcagaacctcgaggaactggagaccagcttggttggtaaagacctggagatggacatccttgagcagcttggggctctgggatcgttcaacgcttctgtggccaggggtgtctcggcgttacatggtcgaccagatggctctctgcttgatgatccggagccggagacgactcctctggatgcggggcaagaagacagccaagtggtcgtcgtccggagtggcaagagccaggagaggaagctgagaaggatgagagcatcatcagatgagaaaggatccaggacctcggtgaaggtgaacccaccacgaagacccaagaaatcccgtaaggcgagtagcagccagtttatatccgagtggaaaagtcacccaggccaaaggaggatcattgtgcgtgagcaatcagcactgctgtccaccatcaaggaatgtgcaggtcttgagaagataagggagaagatggtgaaggaagggcaggaggtgagctaccacaggtgggcggaggcagctggggtggacgaggcagagctggtgagcaggctgcaggcaggttactgctgccgggacaggctactggtgaccaccgagtggctggtcaggtgcatcgcgagaacatacaccggcatggggacggccttggacgatctgcttcaggctgggaagatgggcgttcttgacggcgccgagaagttcgacagccggaaggggtgcaggttctccacgtacgtcaagtactggatcaggaaagggatgctcgctctgctggctgaaaactcaggagtcaccctgctgcctgcaagaatggagagcatcatgcgcaaggtgaaggaggcgcggcgtgggatccggtacaggcagggcaggaacccgtcggactcagaggttgccgccgccgtgggcgtgtcggtagccaacgtgaggctggcgcgcaagtgctctcgcagggccgtctcgctctactcggaggtcgcgatcggacaggacgtcaagttcgcggaggtgatcccggacgagtcggcgtctccggacgaggcggcgctgttccggggccagctgagggagcggctgctgctggtgctgggcaggctgcccgcgcgggaaggacgcgtgctgcggctgcggcacgggctggaggacgggcggtgcaggtcgctggaggagatcggcggcatctacggcgtctccaaggagtggatcaggaagatcgagaagtcggccatggccaggctccgggacgacgacgccgtgcgccgcgacctccacgacttcgtctagtctgtctgcagtgcactagaacaatttgttagctggtagggaacgatgtcatgtacgtagtaccatactatctatcagcagactgaaattgaagctgctattcacacgaaatatacaatgatagagatttgtgattcatgacggttataatgtcatgcttgctttcatgtttcaccccccatggagtgccactagctctaaaaatttctgaacacttgttgtaagtggcacgcacgcatgctgggttccgatggacatgccaggctccaggttcagcggcgagcagtggtatcgtcgtcgtcctgctcctgatgcccaccgtcgatgccttccagccagtacgcgccgccgttcggagacggagagctcgctgaagggccggcggaaacccgacggcgcgacaggcagagaggccagccgccctgcaggctcaggtagcagttccacgctgttgctcctgtgctagctaatccagccgtcatttccgttcttttctaatcacctgattatgctagctaattcgccagtcttctcttctctaactacgtactggatctctctttgatgcactgcaagatttggagctcaagtgcttctcagtccatgatggagacaggcatttatgtgcatggccaagttcactgtccatggtttatttctgatacatgtgtgtatgcaccattgtggcagagcgtcttgtttaggtccatgcatgggccctgctgatttgggacagccacctaaattgtccagttcactcttgc

SEQ ID NO: 219825 - DNA, 2097 bp, Zea Mays
cgccgcccgtcaccacccgcagcgagccttgctcgtcaccaactcaccatcacgcgcgagcgcgacgcttcagctctctctcgttgaagagctgcatctccagccagtgcctagcccgtcgagggaccggtcgccttggcggactcccgctggtgctcctccacgcccatctctctcttttcctcgctgcagccacggatcttggtagcagggacgccaccgcatttccagaatccaaacggaattttacaggaatcgcgctggaatttcacaggaatcagttcaatttcacggaacaaacgcaggagcaaggaaattttgtcacgttcccctcatttgtttccttcggcgacgactaggcgagtgctgcccgctcttcacgaggttttcacctgcgagtctgcgacgaacatcctccagttgatcttctggctggaaaatcacgttgacggtggcaagtaggggttctatcatccgcagcctcatctcaagaagcaaaattctttcatgatccctttgaaccggagggcaagcctgcccagggctgggatggagtactttgatgcaaggcggaagcctcgtaatgttggaaaaatcattgcagccctggtcctcacaacactctgtatatttgctctgaagcaatctcctggttttggtggcaatagtgtgttttctcgccatgaacctggtgttacccacgtcttagtaacaggaggagctggttatattggttcacatgccgctttaaggctcttacaggatagctatcgagttaccattgtggataatctatctagaggaaatatgggagcagtaaaggttctgcagggcttatttccgcagcctggtagactacaattcatctttgctgatctgggggaccagaaatctgtcaacaagatatttgctgaaaatgcatttgatgctgtgatgcactttgcagctgttgcttatgtgggagagagcacattggaaccccttaggtactatcacaatattacatcgaacactttactgattttggaggctatggcatctcatggagtcaaaacccttatctactccagtacatgtgctacctacggagaaccagagaagatgcctattacagaagccacacctcagttccctatcaatccatatggaaaagctaagaaaatggcagaggatatcatattagatttctcaaagtcgaagggagctgacatggctgtcatgattttaagatatttcaatgttattggctctgaccctgagggaagattaggtgaggctcctaggccagaactccgagagcatggtcggatatctggggcatgcttcgatgcagcattaggagtcattacaggattaaaggttaaaggaacagattatcccacaactgatggaacctgcataagagattatattgatgtcacagatttagttgatgctcatgtgaaagcactcaacaaggcagagcctagaaaagtcagcatttacaatgttggaacaggaagaggtcgctcggttaatgagttcgtcgatgcctgcaagaaggcaactggggttaacatcaaaattgagtacctcagcagaaggccaggagattatgcagaagtatatagcgacccaacaaaaatcaacaaggagctcaactggacagctcgatatactgatcttaaagagagtctgtcagtcgcatggaggtggcaaaagtcgcatcccagtggctacgggccaaatcgaatatagcctgctgatttataattcactgaatcaatacatattaattctttagttagcgataaaaaaatcttgctatgacactcctctcaaaatcactccgtattcttctcgttctttttatttcaaaggtttgctgtttttttactagtagaaacatgaacggtgatttggatacaaaaaacttgtgatgacaatttcattgtttttgacacaaattgttgatagaaaaaatgtacatttttcagccagtgagctgcaaggtttggttgcatcgagttaagaaaaaccttatgttgtgaccaatggaaatgctgtggattttgtgctgttgctgctgctgcaggatatttgcttcatataaaaatt

SEQ ID NO: 219826 - DNA, 2027 bp, Zea Mays
cgcgacgcctctgcgcccccgccgcccgtcaccacccgcagcgagccttgctcgtcaccaactcaccatcacgcgcgagcgcgacgcttcagctctctctcgttgaagagctgcatctccagccagtgcctagcccgtcgagggaccggtcgccttggcggactcccgctggaattttacaggaatcgcgctggaatttcacaggaatcagttcaatttcacggaacaaacgcaggagcaaggaaattttgtcacgttcccctcatttgtttccttcggcgacgactaggcgagtgctgcccgctcttcacgaggttttcacctgcgagtctgcgacgaacatcctccagttgatcttctggctggaaaatcacgttgacggtggcaagtaggggttctatcatccgcagcctcatctcaagaagcaaaattctttcatgatccctttgaaccggagggcaagcctgcccagggctgggatggagtactttgatgcaaggcggaagcctcgtaatgttggaaaaatcattgcagccctggtcctcacaacactctgtatatttgctctgaagcaatctcctggttttggtggcaatagtgtgttttctcgccatgaacctggtgttacccacgtcttagtaacaggaggagctggttatattggttcacatgccgctttaaggctcttacaggatagctatcgagttaccattgtggataatctatctagaggaaatatgggagcagtaaaggttctgcagggcttatttccgcagcctggtagactacaattcatctttgctgatctgggggaccagaaatctgtcaacaagatatttgctgaaaatgcatttgatgctgtgatgcactttgcagctgttgcttatgtgggagagagcacattggaaccccttaggtactatcacaatattacatcgaacactttactgattttggaggctatggcatctcatggagtcaaaacccttatctactccagtacatgtgctacctacggagaaccagagaagatgcctattacagaagccacacctcagttccctatcaatccatatggaaaagctaagaaaatggcagaggatatcatattagatttctcaaagtcgaagggagctgacatggctgtcatgattttaagatatttcaatgttattggctctgaccctgagggaagattaggtgaggctcctaggccagaactccgagagcatggtcggatatctggggcatgcttcgatgcagcattaggagtcattacaggattaaaggttaaaggaacagattatcccacaactgatggaacctgcataagagattatattgatgtcacagatttagttgatgctcatgtgaaagcactcaacaaggcagagcctagaaaagtcagcatttacaatgttggaacaggaagaggtcgctcggttaatgagttcgtcgatgcctgcaagaaggcaactggggttaacatcaaaattgagtacctcagcagaaggccaggagattatgcagaagtatatagcgacccaacaaaaatcaacaaggagctcaactggacagctcgatatactgatcttaaagagagtctgtcagtcgcatggaggtggcaaaagtcgcatcccagtggctacgggccaaatcgaatatagcctgctgatttataattcactgaatcaatacatattaattctttagttagcgataaaaaaatcttgctatgacactcctctcaaaatcactccgtattcttctcgttctttttatttcaaaggtttgctgtttttttactagtagaaacatgaacggtgatttggatacaaaaaacttgtgatgacaatttcattgtttttgacacaaattgttgatagaaaaaatgtacatttttcagccagtgagctgcaaggtttggttgcatcgagttaagaaaaaccttatgttgtgaccaatggaaatgctgtggattttgtgctgttgctgctgctgcaggatatttgcttcatataaaaatt

SEQ ID NO: 219827 - DNA, 2965 bp, Zea Mays
gattttgttcgattgtacaataatacagtaacattttgtcgttgtgttcatttagctccatttctcctatgtgtataaatttgtttgttcagaaacaacgtacatccaactcatatagccaatatacataatggaacaatggaaattcttgcagttctgagccttgtgtacttgctcatatggttggaggtatatatagaaaagtttcgaatttccttgctcctgtagtattctgcttattatcattcaccattctatacgacaagtatatttttcaacttcttttttcatttttgtcttatgaagaaatttatgctctcacctctcaatttctgtagatataagcgccttctttgctcagttgacctttcgaaggatttcttcttcagctactcttacaacatcatgcgcagccttcagaagaacataacccagaagaatactgggcaggctgtttatgaaccaatgtgtgtatggaatgaatttctgacacgagcaattcggaatcatctcaagaatacatgttggactgttgccttagtccatggattttttaaacaggtcgaagctctccgtatctgggaaggatttttggttgacccttatagctaggcgctcacgacactttgcgggaaccagattcttgaaacgtggcgttaatgaaaagggcagggtagcgaatgatgttgagactgagcagattgtttttgaagacacatctgatggaatcccaactcagatggcttctgctgtacagcatagaggatcgatacctcttgtctggtttcaggaaacttcaagacttaatattagaccagatattatattgaaacctgatgtggactacaaggcgactcgccttcattttgagaaccttgcacttagatatgggaatccagtaatcatcttgaacttaataaagacccgtgagaagaagccccgtgaatctctgctccgtgcagaatttgcaaaggctatccattacattaacaagagcctgcctgatgacaagcgtctaaaatttttacacatggatctgagtaagctttctcgaaggaaaggcaccaatgtgcttgcactgttgaccaaggtggcatcagatgtgttggatctaactgaattcctccactgtgaaataagtacatcaacaaaacctgatgacacctcaagtggagaaagaactgctgccaaaccacatgatgacagaagtagcagtgatcaaactgaatgtgcagctaagttggcacctcttttattacagaagggtgtcctcaggacaaattgcatagactgcttagatcgcacaaatgttgcacaatttgcatatggtttagctgctttagggcgtcaacttcatgcattggggcttactgaagcacagaaaattgaattgcacgatcctctggctgatgatctgatggacttctatgaatggatgggtgatacattagctattcagtatggtggttctgctgctcacaacaagatcttctgcgagcaaaggggtcaatggaaggcagcaacccaatctcaggagttccttcggaccattcaacgctactataataacgcctacactgatcacgacaagcaggatgctataaacatgttcttaggtcatttccaacctcagcaagggaaacctgcactgtggaagctggactcagatcagcattacaacattgggaggcaagggactttaaaagaagagattggaagatcgttcataaagaggtcactatcagatggtaacatactgttggagaacaacttgcctgtaactagctgtaacaatgaaacaaacaacacagaattgcttccaatgcaacagctggatgatattagagaacctaccgactctgcgccagagatctccatatgtgaacctaacccgtgctccagtgtgaactacggcagagtgcctggaagacactctatttcagaagagcggcagagttatttgaaaagattaggttaccctgaattgcattcttcaaatttcctcgaccttgatttgttgtcgtcttctgggaattcctgtgacgaggaagtttttgagaggtcatcactgatcaattcacctatggatgtggtcagcgttgaatcatctacgtcgtacagtgaacaaggacacactgatgagggaagggatgacatggatctttcccgttcaagcagccaggtctcagacgttcgggactattctgaccggtttgcgcactgggtcgcggatggaggcatgctttggtaaaaggccatggacttttgtcttgcttgacaactcggtagaatctgtgaccgcaggaaatggatgcgagcagatgacatggctagatgcagagatggtgggcgtggaaaaagtctcgcatcggtatggttgtgaccactggaaggcttgaacgctgatattcatcggatggggatggagatttcggtggttgggttgagtacaagattcaatttgctgtggtgaaaaattttaccatagtttgtttagacaataaataggcaaaatatatatgattcttttattttagcttacagtgcgtcccccttctccatagaaaattctgaaaagcaaaaaaaaaaaggaaaatctagaaaaaggaggaaaaaaaacttagataaagaacacttttgctgtaaatagttagtatgttacggaagtataaatattgtgaaattttgctgacgacacgacttcgctcaaacgtgtaatatactgttggacagtgttaacaaaatatatcccgtatcagtacgaaaactgtgtaaatttactgtaacgcacagtatgcattatttatttatttgtttctcagattatggaagagataaaattgcaaaaatatcttaacctctgacttctcacggtgcggccagcctcggtcaagctccccggcggcgggacgaggccggtgtccgcttcctaccacagctagggatggaaacgaaagactcgagc

SEQ ID NO: 219828 - DNA, 3027 bp, Zea Mays
cctccctcccctcctccactcctgaccctccaacgttccctccctggaagtgggccgcctcccgatctccccacaccgacaatgctgccgcgccgcgcgcgggcgcgcgggcgccggcgctgctaggatcctcgcgcgaccccgcgccacgccggcgagaaccccgaccactacccggcggggcgagggcgaccaatgcgcgagcgcgcccggcacgcgacccgggtgtcaccgatgccgccgcccacgggtggcgaggaccccgaggccgacgcggcgccctcctgcagtggctcagccgacgaagccgacccccacgagcaggtgctccccaacggcgacatctacacgggccagtggcgcggcgccgtgccccacggcgccggcaagtacctctgggcggacgggtgcatgtatgagggcgagtggcgccgcggcaaggccaccggccgcggcaggttctcctggccctcgggcgccacctacgagggcgagttcctcgacggcttcatgcacggcgccggcacctacgttggtgcctcgggggacacctaccgcggcgtctgggccaagaacctcgagcatggcgccggcgagaaacgctacgctaacggcgactgctacgacggcgagtggcgcgcggggctccccgatggttgcggacgctacgcctggcgcgacggcaccgagtacgccggcggctggcgcgctgggctcatccacggccgcggcacgctcgtctgggccaatggcaatcgctacgatggcggttgggagggcggccgaccccgcgggcagggcacgttccgctgggccgacggcagcctctacgttggcttctggggccgcgaggcgcccagcggcgccgtccaccagaagggcgtttactacccgtccccggcggcgatgggcaactccccccgggcgcgcgacccgagggaggtgtttgcacgtgacctgccggagtgcgtgcgctccggaaccgaggcccaatcagcgctcacgtctctgagatccctcaaatggctgatgcggtcggtcagcgggcgcggcagctcgtcgtctggctggagcaatggctcgggaggcagcctcgtgcacttctgggggtcggacggggaggtcaagtgcgaccttggggacgactggagacggcggagcgtcagagaagggagggggctgccaccaccgtcgcccgctctggttccatacctgcccaacggcgcgcccctgcggttgtccaagaagcagggggtgaccattgccaaagggcataagaactatgagctaatgctcaatctgcagctcgggatcaggcatgcagtaggaaggcaaggtcaagttttattagatctgaaatcatcagcatttgatccaaaagagaaagtgtggacaaaattccctcctgaaggctcaaaacatacccctccacacaattcttgtgatttcaaatggaaggattactgcccaaaggtgttccgaacactccgtaagctgttcaaggttgacccagctgattatatgttgtccctctgtggagatgatgctcttcgtgagctctcatcccctggtaagagtggaagcttcttttacttgacaaatgatgatcgttacatgataaaaacaatgaagaaaggtgaagtgaagatgcttttgaggatgcttcaagcttactacaatcatgtccgtgcatttgaggataccttagtgacaaagttctttggcctacattgtgtgaagtctggatcacaccagaagaaggttcgttttgtgataatgggaaatttgttctgctctgatcatactatccataggcgatttgatctgaaaggatcatctcttggccgtataactgacaagccaccagcagaaattgatgagtatacaactctgaaagaccttgatcttaactttatctttcggttacagaaacaatggtaccaagagtttcaaaggcaagtggacaaggactgtgagttcctcgagcaggagaagattatggattacagtctattggtgggtgtacattttagaggtgccattgacattgatggtgacaaacccgcaacacctcgcgtttcaagatgggacagagatcattttcgttctgatccaaataggtggtcaaaaattaagcttggagcaaacatgctgtcaagagctgaactgacaatccgaaagaacgacagtgatgtttttggagagccaaccggggagtactgtgacgttatcttatacttcgggattatagacatacttcaagactatgatattggcaaaaggctagagcatgcctacaaatcttttcagtatgattcgacgtccatttcagcggttgatccaaaacagtattccaggcgcttcaaagatttcatatacaaagctttccaagaagataaactagacagctgagaacagtgcattgcgacattggatttggcaggaattcggcagcttctttagggaaaggagtccgggtgattggggtcgctggagcacctggtggccccacagtttccaggaaacagattggccgtcatgtacatactacaaagcaacatgcacagatacggagtccagtcagtcattcacaaagagtaggaaatgtaacttgcagaatcaaattatacatagaaacatgtaatcgaatgtcccgagccgagccttcaggggttgtaaatgctctttgtttcagaggataccattcttgtcttgtatcggtagtcgttactttcttcgatagaattgggggccagttttgcctttgcactttcttttctttgaacaaagcacgacgtactgaggtgcttatttgattgatagaggcacgtcacacctgagaatattgtcagctgtacgaaatcctaatcgactccgttaactttttttttctgtaccattccagagaactccgtacttgctaccgcattagagattgttcacctctatcttgtcatccattgatctcaatgtatccatttacttatttgaatgcttcaaagagttaggtgcgttgatcgtgtttat

SEQ ID NO: 219829 - DNA, 2785 bp, Zea Mays
atgccgccgcccacgggtggcgaggaccccgaggccgacgcggcgccctcctgcagtggctcagccgacgaagccgacccccacgagcaggtgctccccaacggcgacatctacacgggccagtggcgcggcgccgtgccccacggcgccggcaagtacctctgggcggacgggtgcatgtatgagggcgagtggcgccgcggcaaggccaccggccgcggcaggttctcctggccctcgggcgccacctacgagggcgagttcctcgacggcttcatgcacggcgccggcacctacgttggtgcctcgggggacacctaccgcggcgtctgggccaagaacctcgagcatggcgccggcgagaaacgctacgctaacggcgactgctacgacggcgagtggcgcgcggggctccccgatggttgcggacgctacgcctggcgcgacggcaccgagtacgccggcggctggcgcgctgggctcatccacggccgcggcacgctcgtctgggccaatggcaatcgctacgatggcggttgggagggcggccgaccccgcgggcagggcacgttccgctgggccgacggcagcctctacgttggcttctggggccgcgaggcgcccagcggcgccgtccaccagaagggcgtttactacccgtccccggcggcgatgggcaactccccccgggcgcgcgacccgagggaggtgtttgcacgtgacctgccggagtgcgtgcgctccggaaccgaggcccaatcagcgctcacgtctctgagatccctcaaatggctgatgcggtcggtcagcgggcgcggcagctcgtcgtctggctggagcaatggctcgggaggcagcctcgtgcacttctgggggtcggacggggaggtcaagtgcgaccttggggacgactggagacggcggagcgtcagagaagggagggggctgccaccaccgtcgcccgctctggttccatacctgcccaacggcgcgcccctgcggttgtccaagaagcagggggtgaccattgccaaagggcataagaactatgagctaatgctcaatctgcagctcgggatcagtaggaaggcaaggtcaagttttattagatctgaaatcatcagcatttgatccaaaagagaaagtgtggacaaaattccctcctgaaggctcaaaacatacccctccacacaattcttgtgatttcaaatggaaggattactgcccaaaggtgttccgaacactccgtaagctgttcaaggttgacccagctgattatatgttgtccctctgtggagatgatgctcttcgtgagctctcatcccctggtaagagtggaagcttcttttacttgacaaatgatgatcgttacatgataaaaacaatgaagaaaggtgaagtgaagatgcttttgaggatgcttcaagcttactacaatcatgtccgtgcatttgaggataccttagtgacaaagttctttggcctacattgtgtgaagtctggatcacaccagaagaaggttcgttttgtgataatgggaaatttgttctgctctgatcatactatccataggcgatttgatctgaaaggatcatctcttggccgtataactgacaagccaccagcagaaattgatgagtatacaactctgaaagaccttgatcttaactttatctttcggttacagaaacaatggtaccaagagtttcaaaggcaagtggacaaggactgtgagttcctcgagcaggagaagattatggattacagtctattggtgggtgtacattttagaggtgccattgacattgatggtgacaaacccgcaacacctcgcgtttcaagatgggacagagatcattttcgttctgatccaaataggtggtcaaaaattaagcttggagcaaacatgctgtcaagagctgaactgacaatccgaaagaacgacagtgatgtttttggagagccaaccggggagtactgtgacgttatcttatacttcgggattatagacatacttcaagactatgatattggcaaaaggctagagcatgcctacaaatcttttcagtatgattcgacgtccatttcagcggttgatccaaaacagtattccaggcgcttcaaagatttcatatacaaagctttccaagaagataaactagacagctgagaacagtgcattgcgacattggatttggcaggaattcggcagcttctttagggaaaggagtccgggtgattggggtcgctggagcacctggtggccccacagtttccaggaaacagattggccgtcatgtacatactacaaagcaacatgcacagatacggagtccagtcagtcattcacaaagagtaggaaatgtaacttgcagaatcaaattatacatagaaacatgtaatcgaatgtcccgagccgagccttcaggggttgtaaatgctctttgtttcagaggataccattcttgtcttgtatcggtagtcgttactttcttcgatagaattgggggccagttttgcctttgcactttcttttctttgaacaaagcacgacgtactgaggtgcttatttgattgatagaggcacgtcacacctgagaatattgtcagctgtacgaaatcctaatcgactccgttaactttttttttctgtaccattccagagaactccgtacttgctaccgcattagagattgttcacctctatcttgtcatccattgatctcaatgtatccatttacttatttgaatgcttcaaagagttaggtgcgttgatcgtgtttat

SEQ ID NO: 219830 - DNA, 2365 bp, Zea Mays
cactagtggacaaagacaaaccggagcagtgcggatggaatgctatttggagcgctgggtccttgcccagtctgtgctaatggcatgtactattataatggtcagtaccaatgcagtggtaatgtgtcagagtggtccaagtgtacatactctgccacagaacctgtccgcgttaagaagaagtggcaaattccacatggaacaaagaatgattaccttatgaagtggttcaaatctcaaaaggttaagaaaccagagagggttcttccaccaatgtcacctgagaaatctggaagtaaagcaactcagagaacatcattgctgtcttctaaagggttggataaattaaggttttctgttgtaggacaatcaaaagaagcagcaaatgagtggattgagaagctcaaacttgctggtgccaacttctatgccagggttgtcaaagatattgattgtttaattgcatgtggtgagctcgacaatgaaaatgctgaagtcaggaaagcaaggaggctgaagataccaattgtaagggagggttacattggagaatgtgttaaaaagaacaaaatgctgccatttgatttgtataaactagagaatgccttagagtcctcaaaaggcagtactgtcactgttaaagttaagggccgaagtgctgttcatgagtcctctggtttgcaagatactgctcacattcttgaagatgggaaaagcatatacaatgcaaccttaaacatgtctgacctggcactaggtgtgaacagctactatgtactccagatcattgaacaggatgatgggtctgagtgctacgtatttcgtaagtggggacgggttgggagtgagaaaattggagggcaaaaactggaggagatgtcaaaaactgaggcaatcaaggaattcaaaagattatttcttgagaagactggaaactcatgggaagcttgggaatgtaaaaccaattttcggaagcagcctgggagattttacccacttgatgttgattatggtgttaagaaagcaccaaaacggaaagatatcagtgaaatgaaaagttctcttgctcctcaattgctagaactcatgaagatgcttttcaatgtggagacatatagagctgctatgatggaatttgaaattaatatgtcagaaatgcctcttgggaagctaagcaaggaaaatattgagaaaggatttgaagcattaactgagatacagaatttattgaaggacaccgctgatcaagcactggctgttagagaaagcttaattgttgctgcgagcaatcgctttttcactcttatcccttctattcatcctcatattatacgggatgaggatgatttgatgatcaaagcgaaaatgcttgaagctctgcaggatattgaaattgcttcaaagatagttggcttcgatagcgacagtgatgaatctcttgatgataaatatatgaaacttcactgtgacatcaccccgctggctcacgatagtgaagattacaagttaattgagcagtatctcctcaacacacatgctcctactcacaaggactggtcgctggaactggaggaagttttttcacttgatcgagatggagaacttaataagtactcaagatataaaaataatctgcataacaagatgctattatggcacggttcaaggttgacgaattttgtgggaattcttagtcaagggctaagaattgcacctcctgaggcacctgttactggctatatgttcggcaaaggcctctactttgcagatctagtaagcaagagcgcacaatactgttatgtggataggaataatcctgtaggtttgatgcttctttctgaggttgctttaggagacatgtatgaactaaagaaagccacgtccatggacaaacctccaagagggaagcattcgaccaagggattaggcaaaaccgtgccactggagtcagagtttgtgaagtggagggatgatgtcgtagttccctgcggcaagccggtgccatcatcaattaggagctctgaactcatgtacaatgagtacatcgtctacaacacatcccaggtgaagatgcagttcttgctgaaggtgcgtttccatcacaagaggtagctgggagactaggcaagtagagttggaaggtagagaagcagagttaggcgatgcctcttttggtattattagtaagcctggcatgtatttatgggtgctcgcgcttgatccattttggtaagtgttgcttgggcatcagcgcgaatagcaccaatcacacacttttacctaatgacgttttactgtataaatctaccaggagtgagtaatttatatattagcgggactggacctcttggtcgcgtgctatttt

SEQ ID NO: 219831 - DNA, 1711 bp, Zea Mays
gttcatcttctgaattctaaattcgagttgacatctgattcgaggctccacaaatgctccactggtgcacggtatgttatcattccgtgagctatgatgtacgtcagcgtccgtttcctcgaggctcgaccagtcgagcttgagaaaaatcaaagctcccacctacctcgagacccaggacgcgtggagagcggtgccaaaccaccatggcgatcctgctcctcttgctcttcgttttgtcctcagcttcagctgatgagtacggggaagagctgctgcagcgcgcgtggggggagcgggattggatggtgagcgtgcggcggcgcatccacgcgcatccggagctcgcgttccgggagcaccgcaccgcagccctcgtccgcgaggagctcgagcacctcggccttcccgcccgcgccgtcgccggaacgggcgtcgtcgctgatgtaggttccggggcgccccccttcgtggcgctccgcgccgacatggacgcgctcccgctccaggaattagtggagtgggagcataagagcaaggtggacggagtgatgcacgcctgcgggcacgatgtccacacagcgatgcttctgggagcagcaaagttactcagccagcgtaaggatcagctcaagtgagactcctttttcaacctgccgaggaaagtggtgcaggtgcatctcatatgataagagaaggggttctggacggtgttgaagccatatttgcaatgcatgttgattatcgtataccaactggtgtaatagcagctcacccaggacctacacaagcggctgtatgtttcttcgaagcaaaaattgaaggtaaaagtgggatggctgaaaccccacacttaaatgtggatcctgttgtcgtcacatcattggccatcctgtccctgcagcagcttatttctagagaagatgatcctcttcacagccaagtggtctcggttacctatgtgaaagctggaaaagcccttgatgctacccctaaccttgttgaatttggaggtactttgaggagcctcaccactgaaggcctttactgtctgcaaagaagggttaaagaggtggtagaagggcaggcggctgtgcataggtgcaagggagctgtcgaaataaaggttgaggactacccggtgtaccctgccgttgtgaacgacgagaagctgcatcgacatgtagaggatgtcggcagaggcttgcttggcccgggcaaggtgagaccaggggaaaagatcatggccggcgaagacttcgctttctaccagcagcttgttcccggcgttatgtttggcatcggcattagaaacgaggaagctggttctgttcactcggctcacaacccctatttcttcgtcgatgaggacgtcattcctgttggggctgctttgcatgctgccattgcagaactgtacttcactgacggccccctctttcgacaaagaagactagtggtttctcgttcgtgcgtattttgtctggatcagtccgaacagatggcttcagctggccaatcagatctgaacatctggtccaccatgctgatcagccgcgctccgcggccagtatcaacctccaactatttttccctctgtaaccagaaacactacacatgtttctcaaccctacagtggtctagctattttattctctctttaaacagaaacactgcaaggttcctaaccttatagtgggatttagagcaa

SEQ ID NO: 219832 - DNA, 1668 bp, Zea Mays
atgcagtctgtggctgagatggcttctaatgcctatcgcaaacccagtgtcagtccatcagctacgatgctgaaagctctgcctatgcggttcctcgcctcgccggagcccggtgggtggagccggcgactaccacgacgatcgctgcggtcggtttcggcagcgctcatgaccaaccccgcttacttcgaggtgggaagattcttgggtggctatggcttcatgaacatcacaagttactcatcatctcaatttggagagccttcaaatgttgccggtattcaagaccttggtcttggatattcaccagaagagatcgaacggttgagggtccaagatattggagaaggagaagtgacaattagactttatgagggaagagttgttcaaggtccattcaggggcacacgggctgtatttaaggtacatgaatatattaacagtcttaatatgctaagacataggatttgaaacaaaggtataccctggagcccgtgctgatgcttctgaagctgatttgatggcactgaatgagttaaggactcatgcgtttcttcagagtgatgctagtgacatatgcgagaacatccagtttcttttaggggccttcgagacagcaactggagaacagtggctcgccttccgtgatgacgggagatatagtgctgcagactatgcaaatgtaactagtgcaaggcaattgaaggaaaaatctggagggacgccattctggaaccctttcgatcgagcatacaaattggagttaaggagatactttgttcttaagttgctgaacggtgctatgagtggccttgttcacatgcacaatcatgatagactgcatcaaagccttggaccttcttctgtaattctcaatacggcattggataaagagggacgctacttggttccaaggctgagagatttggcattttctgtagatattgggtactcatctattggggctggagtgctgtcggacggactatggcgtcgagcctctgctgctggggcttccactcctttggagaagcgagcctttggaatagctgatgacatgcaagtatttttttttcccccttcaacaaaaaatgaacaccacagtttacatgcactttactaaacagttatggagctgggctgcttcttgcatacatgtcattcattccattctgcaaagcgggcgttatggatggtatctccttgcagagacttttagagagcacctttcggcttgacatttacgctgcaagagagtattgtctggcagatgaccagctgtcggaagcagtaagttttctagatttaggggatggtgctggctgggagttattgcaggcaatgcttaatccggattaccgcaagcgaccaattgcagaggctgtactgaaccacaggtttataactggagcagttttacgaaactactaatcagcattttttttacttgtataaagttgctacgtggaaattgtaaaagtacaataattttagtgggtgaagaggtgatacgtttcttggatgaacagtgcgtgttctctgtctgtcgcttcccattgcatggctatggctatggcgagcaaatagccgatgagcatacccactttcagctgcgctgcaggcaatcacctgagggaccgtagtgctgggagtagagatggcaatggg

SEQ ID NO: 219833 - DNA, 1369 bp, Zea Mays
aaaagagagtttcaattttaaattcttgaatatggagaacgggattgattgtaattttgtgttttctttattcaaaataaattttagtacattacagtcgtcataagggcatagcaattttttagcgacgagacacagcacattgttccttttcttttgtctttttaaccaggcatttgaatattatttgatcaattcgcgtagtggtcgaggcgtggccatgtggccccgttcgcgcggatacatgccaccccatagggcctacatgcgtagaactgcgatggtatagccgcgtagtcggatgagcgattcaagcgagaaatcaaaccgttcgtgattcgtgaaggcctcaactctcctttcctctcgtgggcgatcgactctctcctgcggcggcggcggcgatcaacgtcgacgactacggcccacgattctccttcgaagcgcgaatcatgatacattttgtgctccttatcagcaggcaggggaaggtgaggctgacgaaatggtacactccatacccacagaagcagagatccaagatcatcaaagagattagtacgctcgtcctgacaagaggccccaagctgtgcaattttgtcgactggcaaggttacagagttgtgtacaagaggtatgctagcctttacttctgcatgtgcattgaccccgctgacaatgaactggaaacccttcagatcatccatcactatgttgagatattggaccgctactttggcaatgtctgtgagcttgatctgatattcaattttcataaggcgtactttatattggacgaaattttgattgctggtgagcttcaagaatcaaacaagaaatcggtgctacgtctagtaactacacaggacgctttggtggaagccgcaaaggaggaggcaggctcgttgaggaacataattgcacaggctaccaagtagagcactcgtgtcttctacaatgattactcacacccccacggcatgatagtagcttaatcactaccttacggggcagcagcttttacccctgatttttcctcaatagtttatcccctcttccatctctgcattttgttcagaggtctgttctgttctgtcactctctctctctctatctctcttgttttcccactgtaccacctgtttcgagggaatgtgttgtttctgctcttttgcatgcacaacgttgtatacggaataaaataatgcaatgttttggttcccagtgctgtggtcccagttccatttagttgcccaactctatggccattcaggtctttggaaaggatatcttcttttgcagattctttttttcccaattatatttgcaggcctggcttgttgccttgttctgtgaaataggaatgaaa

SEQ ID NO: 219834 - DNA, 658 bp, Zea Mays
ccgttcgcgcggatacatgccaccccatagggcctacatgcgtagaactgcgatggtatagccgcgtagtcggatgagcgattcaagcgagaaatcaaaccgttcgtgattcgtgaaggcctcaactctcctttcctctcgtgggcgatcgactctctcctgcggcggcggcggcgatcaacgtcgacgactacggcccacgattctccttcgaagcgcgaatcatgatacattttgtgctccttatcagcaggcaggggaaggtgaggctgacgaaatggtacactccatacccacagaagcagagatccaagatcatcaaagagattagtacgctcgtcctgacaagaggccccaagctgtgcaattttgtcgactggcaaggttacagagttgtgtacaagaggtatgctagcctttacttctgcatgtgcattgaccccgctgacaatgaactggaaacccttcagatcatccatcactatgttgagatattggaccgctactttggcaatgtctgtgagcttgatctgatattcaattttcataaggcgtactttatattggacgaaattttgattgctggtgagcttcaagaatcaaacaagaaatcggtgctacgtctagtaactacacagctaaggattgggagtgatgg

SEQ ID NO: 219835 - DNA, 427 bp, Zea Mays
ttcgcgcggatacatgccaccccatagggcctacatgcgtagaactgcgatggtatagccgcgtagtcggatgagcgattcaagcgagaaatcaaaccgttcgtgattcgtgaaggcctcaactctcctttcctctcgtgggcgatcgactctctcctgcggcggcggcggcgatcaacgtcgacgactacggcccacgattctccttcgaagcgcgaatcatgatacattttgtgctccttatcagcaggcaggggaaggtgaggctgacgaaatggtacactccatacccacagaagcagagatccaagatcatcaaagagattagtacgctcgtcctgacaagaggccccaagctgtgcaattttgtcgactggcaaggttacagagttgtgtacaagagatataatctgttcctacacataat

SEQ ID NO: 219836 - DNA, 1521 bp, Zea Mays
tccaaaccccccctttccctcttctcttccaacgccactcagttctcttccctctctgcgcaccaagaagaggtgtcttgccagaagggagccgcctcgccgcagccgaaggccacccatgcagccgagcggccgcgaaatgcagggcggaggcggggcccaggacgacttcttcgaccagatgctgtccacgctgccggccgcgtggtccgaccttggctccggcaagtcgccctgggagctccccgcggcggcgggggccgtgaccgaggacaccgccgcgctcgacgagcctgcgctcctcgcgtcgcgcctccgccaccaccagatcggcggcggggagaagcccctcatgctccacctcagcgacctgcacggcctcggcgccggcgccggcgacgacgcggggttcatgccgctaccgctgttcacccagcacctcgccagggacgacgtggatgccgccttcaagtcccccaatgccgccggaggcgaccgggagctgtacaacgggttcggagccgctgggaatatgcacaccgccgccgtgcatcagccgccgccgttcgggcagggcgggtcaatgccggcggcgccgcagagcttcgggggtggcgggccggcgccggccgccggagcggcgtcgggcggaggagcgccgccgcggcagcagcggcagcgagccaagagggggcaagccactgaccctcacagcatcgccgaacgtctacggagggagaggatagcggagaggatgaaggcgttgcaggagctggtccctaacgccaacaagaccgacaaggcatcgatgcttgacgagatcattgactacgtgaagttcctccagctccaagtcaaggttctcagcatgagccggctaggcggagcgacagccgtcggcactctagttgccggcatcgcatcagagggcaacgggagcggagatggcacgagcgacagcggaaaagggaacgccgccaacggcgagaacggcggtggtggcagcctgcaggtgacggagcagcaggtggccaggttgatggaggaggacatgggcaccgccatgcagtacctgcagggcaaggggctctgcctgatgcccatctctctcgcctccgccatctcctccgccacgtggccgtccctcctatcccgcccctccatgggcgcaatgggagacgctagaggtcccctgcacgacggcggcagccctgcgtcgccgccactggtgaattgtggtgatgattccagcaccgtcaaggatgccggtgccggcggtaagcggtgaaggcaatgatcttgtcttgagaggttgcgtgtgaaagatcaacatgtccaagtgaaaaatgaaatgaattgggctaaaagttctggcaacaattaaatcttatcaaattgtatatttcactctttattattcaataggctacttcacttcttatgtctaataatattttctatcttatgtacaaaagttttctatcttacgtttcaacctaattctaagaatataaagttaag

SEQ ID NO: 219837 - DNA, 1572 bp, Zea Mays
tctacaagtttgggcagactggttcctgttttctgatgcatttcttaatgggctgagggctacttttcttagatcaggcaactctggtgttgttccgtttcactcgttatgcggtgatgcacccgaaattgaaaagaaaggtagctctgaggatggaaatgatggatttaagcttaatgaagacggtgccttggctactggaaaggcagcagcgacaaaggagctattagggctcccactagctgaacttgaacgccgctgtagacataatggcctctctctgtgtggtggtaaagaaatgatggtcgccaggctgcttaacttggaagaggctgagaaggaacgaatatacgagaaagatgttgacatgaaatatgtgcagggtgaacagcatgtggttggaagagaggacagtggtgtgaatgctcatagtacttcaaggtttggtgaaggttctaatggtgatgaattagatgtctctcggaacagtacgagagctggtaaaggacgttctggtggatctgcttctgccgaacttgaatcatttccaagcaagaagccgaaatacgatcctgttttgccagcttctaaatggagtcgagaggatgacatcagtgacgatgaagataggaaaggtggccgaggcttgggattaagctattcatccggaagcgatattgctgatggtctcggaaaggtcgatacaacagaagctagtactgaccacacaagtcgtcatcatgatacgattgttgatgaagagcacaggcagaagttgaggcagattgaaatttctgtcatgcagtaccgtgaatctcttgaggaacagggtctgcgtgacttggatgagattgagaggaaggttgccagccatcgaagacgtctccagtcagaatatggtttatccactccagctgatggtgctaacagcaggcgatcttctgagaacatcatcgtcgtcggagcggaaagagaggcatcgcgatgcacatgatcatcctaggaaacggggccggagccagagtagaagcttgagccctccaaggaagtcacaggagagggatcgagagcacaatcgcggtagggaccggtctcatggcaacgacgtggggagggatagggtacgcgggaaaagtgcaagccaagggcgagacgaccaccacgacagaagccgagatagagagaaggacaggagaaaagggaggtgaccgacccgaaaaccctcgtcaccatgcaccatttgccctaagcgaagggcccaggagcattatttgagctgggctacacgcccaccagcatctccaacggtaaacatatcttcgcaccaggcaggttaccctggtctgctccatgcttcgtctgtaataggagtttttgaggattaagttgaggttttttagagaagacttgttcgtaactttttttcttctttttttgcggattattcagatgtacccgatgtgtagtttatgctcaaaaccaatgtcgaatacagccagacccagaattgtcagtatcagacaaccgaggtatggactgcgattctgttcttccctggtggtgggctggtac

SEQ ID NO: 219838 - DNA, 2889 bp, Zea Mays
ttttttttacaacttctccctctcagtttactgttgaaaaggcaaacaaaatcacttagccgcgctgcctctgtgtctgtcttttcgtttaattagggtttccggatctgctctgcgtcgccgccgaccaacctccaccgcgcgacgccatggacttcgacgagtacgagtatctggagaagacggtggaagcgttcgcagcgccggccaacggttcgtcgccgcccgggtcggggtacaaggacaaggagcgcagctcacgccgccgctcaacgggcggtgacgaagagcgcgacaacgtagaacgcagatcgaagcgttctcgccccgaggaaggccgcgaccgcgatagagagcggcacaggtaccgcgacggcgaccggcaccgcagcagtcgggagcggcgggaccgtgaccgtgacgtcaaggagaaagagcagggcagggagaacgacaaggacaggaggagccgcgaccgcgaacgggagaaggaggagagggagaaggataggcagcggaggagtcggagccggtccgagcggcgccgtgatgacgaagagcgtgatcgctaccgtgaacgcgatgtcagacgtaggaaagaggaagttgctgaacctgaagttgatccagaaagagatcagaggactgtgtttgcttaccagttatctttgaaggcagatgaaagagatgtatatgagttcttttctagggctggaaaggtccgggatgttcgcctgattatggatcgaaattcacgacgttctaaaggtgtcgggtatattgaattctatgatgctatgtctgttccaatggcgatagctctttctggtcagttgcttcttggtcaacaagtgatggttaagccttcagaggctgaaaagaatttagttcagtcaaatgcttcaagtggagctgcttcaggtggagcaaggaagttgtatgttggaaatcttcactcaaacattaatgaagaccagttgcgacaggtctttgaaccatttggacaagtggagcttgttcagttgccattagatccgctcagtgggctatgcaaaggttttggttttgtgcagtttgcacgtcttgaagatgcaaaagcggcccagagtttgaatgggcaacttgagattgctggaagagtaatcaaggtttcagctgtgacagaccaagcaggcatgcaagttagtggagctacgggagatttggatgatgaagaagctggaggcttggcactgaatgccagttccagagctcttctaatgcagaaattggaccgcagcggcattacgaccaggtacctttttggggttgattgcataataataattctgacattttgataagtataggtctttaaaaaactatttagtatagcaccgatatttggagtatatttatttatttgttaattaattggtaacagagctgcacatttgattactgaggtgctgaatggactattcctccataatttgttttttttgtggcgctgcagagacttcatttcattttagaattccattatcttgcttgcttgtatgagtgccatcatttgtacccaaatctctcattattgacctctactatattatcgtcaggattcaaccaccactacagcaacactgtttccatatatatctagcttatcaaggtcgttctccatggacctcctccagttctttggtgtaaagtggtttggctgaaatattttgtttactgcagttctagtatttagtgccagttgcattgattgcaaatttcaggatggcgaattgatgatgtttgaaagtggacataagagaggaatcttgttacaatgcccttaccattttgatgcagatttcaatgattggctccataagaaacttgagttaaattttgttatagtagatgtacccttttatgtgtagcttactcactggacacgccaaccttttgtgttcctgcagtttgactggtgggacgggcattgctggtttgactactccagtggcaataccaactgtatctgtccttggtgctgccccagctgcagcccctcttctgcaccctacagtgcctggtcttgcaattcccggggcaactcttccaattactaccccatctattgatttggctccacctagtcaatgcctattgctcaagaatatgtttgatccagctttggagacagatcctgatttcgatttggacatcagagatgatgttcaggaggaatgttccaagtttggtcaattaaaacatatttttgtagacaaacattcaatgggtgcctgaagacagagtcacgctattcacttctgatgggctgatccagattgggggttccttggttcctcgtcgagtttctgcttctgagaagaggcaacggaaactgaagagtggacaaaagttgcgccggtttcaggagagctcttacatggatccaaatcaaagtctttgccttggagcactatttaacatagcagcaacaaatggcctagacatgggcagaagattatgcatctttggcttttgccgttctattgaaatgttaagcgatgtagtggaagatacggtattggagcatggcggtgaggttgtcactgcagagaaggcaagcagtaacggcctccaggagaagctaaccatgtctgttgcagtaccattgctgtggggcgttcctccagcatcagagaccctccatgtcgcggtgcggagcggtggaggtattgtcgataagatctattggcagtgggacttattctagatgtccagcattaacaaaattggttccaagatgtatatgtctctctaattttctgcacgcgttgtgcagcaactgtaaacttagtctctacctgtacagacccggtcacccttgtgcatatatataaaagaactttggga

SEQ ID NO: 219839 - DNA, 582 bp, Zea Mays
tgtcctcctgtttctacccttagcaaagtactgccggttttgtgtacctgcggtttgatagtataacagccgctatgagcgcacagaaagcactccatggaagatggttcgcagggaagatgatcacagcaacttttatgaccccacaacagtatgaaatgaagttcccgagctagtgaacagatgcatgattaatatggacgtagttgcttgggctcggtgggtgctggcatttctatattttagcgttttgagcttgtgtcaacttattactggaggtaattataaaaaaaactagtggaggaaaatttagtggaagctagtgtatcgggaaatggctaacgaaaaatggtgaaagaaagagtttccttgccctgtgggttagtgctcgaattgaaactgtactgtgtaatggagtttctccctgaagtgctagtactaatacctaaaatgatggaagaaagagttgacttgcgttgcgcttgttgatttgattatactcgtccgtaccctttgcattattgtttggagatgcttgtcacagtttttaagtgatgtacattaattgtgtgtttggttgag

SEQ ID NO: 219840 - DNA, 2227 bp, Zea Mays
ttttttttacaacttctccctctcagtttactgttgaaaaggcaaacaaaatcacttagccgcgctgcctctgtgtctgtcttttcgtttaattagggtttccggatctgctctgcgtcgccgccgaccaacctccaccgcgcgacgccatggacttcgacgagtacgagtatctggagaagacggtggaagcgttcgcagcgccggccaacggttcgtcgccgcccgggtcggggtacaaggacaaggagcgcagctcacgccgccgctcaacgggcggtgacgaagagcgcgacaacgtagaacgcagatcgaagcgttctcgccccgaggaaggccgcgaccgcgatagagagcggcacaggtaccgcgacggcgaccggcaccgcagcagtcgggagcggcgggaccgtgaccgtgacgtcaaggagaaagagcagggcagggagaacgacaaggacaggaggagccgcgaccgcgaacgggagaaggaggagagggagaaggataggcagcggaggagtcggagccggtccgagcggcgccgtgatgacgaagagcgtgatcgctaccgtgaacgcgatgtcagacgtaggaaagaggaagttgctgaacctgaagttgatccagaaagagatcagaggactgtgtttgcttaccagttatctttgaaggcagatgaaagagatgtatatgagttcttttctagggctggaaaggtccgggatgttcgcctgattatggatcgaaattcacgacgttctaaaggtgtcgggaatatttgtaatatggtgtacctgctgggatactcagcaacttattaagatggaaaacaagatcatattggtatattgaattctatgatgctatgtctgttccaatggcgatagctctttctggtcagttgcttcttggtcaacaagtgatggttaagccttcagaggctgaaaagaatttagttcagtcaaatgcttcaagtggagctgcttcaggtggagcaaggaagttgtatgttggaaatcttcactcaaacattaatgaagaccagttgcgacaggtctttgaaccatttggacaagtggagcttgttcagttgccattagatccgctcagtgggctatgcaaaggttttggttttgtgcagtttgcacgtcttgaagatgcaaaagcggcccagagtttgaatgggcaacttgagattgctggaagagtaatcaaggtttcagctgtgacagaccaagcaggcatgcaagttagtggagctacgggagatttggatgatgaagaagctggaggcttggcactgaatgccagttccagagctcttctaatgcagaaattggaccgcagcggcattacgaccagtttgactggtgggacgggcattgctggtttgactactccagtggcaataccaactgtatctgtccttggtgctgccccagctgcagcccctcttctgcaccctacagtgcctggtcttgcaattcccggggcaactcttccaattactaccccatctattgatttggctccacctagtcaatgcctattgctcaagaatatgtttgatccagctttggagatcctgatttcgatttggacatcagagatgatgttcaggaggaatgttccaagtttggtcaattaaaacatatttttgtagacaaaagtactgccggttttgtgtacctgcggtttgatagtataacagccgctatgagcgcacagaaagcactccatggaagatggttcgcagggaagatgatcacagcaacttttatgaccccacaacagtatgaaatgaagttcccgagctagtgaacagatgcatgattaatatggacgtagttgcttgggctcggtgggtgctggcatttctatattttagcgttttgagcttgtgtcaacttattactggaggtaattataaaaaaaactagtggaggaaaatttagtggaagctagtgtatcgggaaatggctaacgaaaaatggtgaaagaaagagtttccttgccctgtgggttagtgctcgaattgaaactgtactgtgtaatggagtttctccctgaagtgctagtactaatacctaaaatgatggaagaaagagttgacttgcgttgcgcttgttgatttgattatactcgtccgtaccctttgcattattgtttggagatgcttgtcacagtttttaagtgatgtacattaattgtgtgtttggttgag

SEQ ID NO: 219841 - DNA, 2391 bp, Zea Mays
ttttttttacaacttctccctctcagtttactgttgaaaaggcaaacaaaatcacttagccgcgctgcctctgtgtctgtcttttcgtttaattagggtttccggatctgctctgcgtcgccgccgaccaacctccaccgcgcgacgccatggacttcgacgagtacgagtatctggagaagacggtggaagcgttcgcagcgccggccaacggttcgtcgccgcccgggtcggggtacaaggacaaggagcgcagctcacgccgccgctcaacgggcggtgacgaagagcgcgacaacgtagaacgcagatcgaagcgttctcgccccgaggaaggccgcgaccgcgatagagagcggcacaggtaccgcgacggcgaccggcaccgcagcagtcgggagcggcgggaccgtgaccgtgacgtcaaggagaaagagcagggcagggagaacgacaaggacaggaggagccgcgaccgcgaacgggagaaggaggagagggagaaggataggcagcggaggagtcggagccggtccgagcggcgccgtgatgacgaagagcgtgatcgctaccgtgaacgcgatgtcagacgtaggaaagaggaagttgctgaacctgaagttgatccagaaagagatcagaggactgtgtttgcttaccagttatctttgaaggcagatgaaagagatgtatatgagttcttttctagggctggaaaggtccgggatgttcgcctgattatggatcgaaattcacgacgttctaaaggtgtcgggaatatttgtaatatggtgtacctgctgggatactcagcaacttattaagatggaaaacaagatcatattggtatattgaattctatgatgctatgtctgttccaatggcgatagctctttctggtcagttgcttcttggtcaacaagtgatggttaagccttcagaggctgaaaagaatttagttcagtcaaatgcttcaagtggagctgcttcaggtggagcaaggaagttgtatgttggaaatcttcactcaaacattaatgaagaccagttgcgacaggtctttgaaccatttggacaagtggagcttgttcagttgccattagatccgctcagtgggctatgcaaaggttttggttttgtgcagtttgcacgtcttgaagatgcaaaagcggcccagagtttgaatgggcaacttgagattgctggaagagtaatcaaggtttcagctgtgacagaccaagcaggcatgcaagttagtggagctacgggagatttggatgatgaagaagctggaggcttggcactgaatgccagttccagagctcttctaatgcagaaattggaccgcagcggcattacgaccaggattcaaccaccactacagcaacactgtttccatatatatctagcttatcaaggatggcgaattgatgatgtttgaaagtggacataagagaggaatcttgttacaatgcccttaccattttgatgcagatttcaatgattggctccataagaaacttgatttgactggtgggacgggcattgctggtttgactactccagtggcaataccaactgtatctgtccttggtgctgccccagctgcagcccctcttctgcaccctacagtgcctggtcttgcaattcccggggcaactcttccaattactaccccatctattgatttggctccacctagtcaatgcctattgctcaagaatatgtttgatccagctttggagacagatcctgatttcgatttggacatcagagatgatgttcaggaggaatgttccaagtttggtcaattaaaacatatttttgtagacaaaagtactgccggttttgtgtacctgcggtttgatagtataacagccgctatgagcgcacagaaagcactccatggaagatggttcgcagggaagatgatcacagcaacttttatgaccccacaacagtatgaaatgaagttcccgagctagtgaacagatgcatgattaatatggacgtagttgcttgggctcggtgggtgctggcatttctatattttagcgttttgagcttgtgtcaacttattactggaggtaattataaaaaaaactagtggaggaaaatttagtggaagctagtgtatcgggaaatggctaacgaaaaatggtgaaagaaagagtttccttgccctgtgggttagtgctcgaattgaaactgtactgtgtaatggagtttctccctgaagtgctagtactaatacctaaaatgatggaagaaagagttgacttgcgttgcgcttgttgatttgattatactcgtccgtaccctttgcattattgtttggagatgcttgtcacagtttttaagtgatgtacattaattgtgtgtttggttgag

SEQ ID NO: 219842 - DNA, 1643 bp, Zea Mays
ctgcactatactactccctcccttctgaattgagctacaaggaattgatggtccagtgtaatgttttgggaagatcagagtctcgcatgcagcagaagcttgaaaaggccaaagaaattttaaagaagttaaaggcaagggtacaggaacttgagaaggaattagaagataaagaaaatggtctgttaagggacttgaggtcttcaaagaaatttaaagcagaccatataaaatctgggaatgtcacagctaatagtgctttcactagttcaagtcctggatatgaaaatcaaacaaacaagctcgatgaggtgatgcaagatccgtgcaacgacaagactcactttgaccggttaaaatctgaagctgggagtgttctgaatgcccaagacaacctggacaacaaggatgtagatgtgatagacctagaagccaatgattctgtttttggagatgaacagaaggctcagttttccgccaagccattcgggaccgatgatagcacaccgaattccgagaacaagtctagcctttgccaaaatgatgaccgacattccgtggcatctgaatgcacaaccgcacacgcagcaaatggaggacccttcctcaaacacagagaagcaactgtaaaatcaacctttatggcgaacattagggccaaactgcatattcctcgggagagtccttccgtgagaactaacgcgacaagttcaacgctggagagtgaaacattgacaattgatggcatctccaaacaagcaacgagattggcatctggcactggacctcagcagatccacaacttcaactctttttctgatgatttccaagcgccaggaattcctggcacggatggagcaaggagaagcattggcaaatggtgcaagggcccagcagatcccagttctgcgagtgggagcagaggcaacctgatcgccgtgggaccggatggccgaggaggcaaggtcaagatcctgagggaccttggccgaccccaggatagcaagtcccaagcgctgtggcccaaggcgcagaaggttgcaggcagaggtggccagtcccagatccatcagttctttggcaagagatgatcctgctactgaatgaatatgttgtgccgcatggagcctggttagctgaacctaaatcctgcatgcagctgtgtcggtatgcaatgcgtgctgtcgaacaactgaacgtgtatctctgttgtgcttgagctgatctacgtgtggatagttgtagagcacacctctggctcagcttggacatagccctggtttcatcacatggcagctggatgcagcagaaaagggaaacaagtttgttgaagagtctgatggtaggttctgggaggtggtgtgggcttgggagagcctacctacactacacgtcagctgtgttggatctaaccatccaatcataacaggacaccgggcatgtatggcgcttctagtttgtttgtttgtgaagtagtgcaagtgttgagcttctcgagtccctgaaaaggatgtttagtggacagctacaccagctcccgtctttttcttcaaagattttagctgccataactgatgtacttgttttgtatagtcatcattttacatttaaatatagacataaaaatcaagagttaaaacgaa

SEQ ID NO: 219843 - DNA, 1424 bp, Zea Mays
gtactagttaaaacatctgtcgtcgtgctcacgacatgcgcgcctcctcctccgcaccttcttcttccccttcttcccagtacatcgttgagctcttccaccgtactccaccattgttttgtttctccccatccccatcttcgtcgtcagcaccacccaagcattctccgcgcttgctctgctccaggtggcgctgcggggatgagcggcgcgacggtggaggaggtgcagatccaggaggctctcctcttctctgaaaccatcaagggtctcaagacactgaggtcgcagctgtactccgcggcagagtacttcgagcttgcctacacgcagcaagacgaaaagcaggcgtacggtgacgaacaacctcaaggagtatgccgtgaaggccctcgtcaacaccgtcgaccacctgggctccatatctttcaaggtgtccagcctaatcgatcagaggttcagtgaggccaccgatgccgatctccggatctcctgcatccaccagagaactcaggccagccaagcctgtgtcgacagagagggcatttcgcagcagtccttggtgatcactgccccaaagtatcacaagagatacatcttgccagctcaaggccagtcaatgcccagtgccatgcccaacttcagggagatgaacaaggtggtcgtcacaggcagggcgtctcagatgcatcaagtattcagcgctgaaacaagagctaaagagaagaagcagccttcactcagaaagttgcaatccatcgctcgcctaccttcgcagcgtgcacgttcagcgtcgccagcacagcgtgcgcatcccatggcaccagctaagaacgctacacccaccaacagagataagcgatcggaatcaccagttccttcgacagctccagctccactgacaaggtccgcgtcgctctcaaagaaggcatccttgctcaagacatcaagcgtcagggctcaggccgccgtctcacagcccaagaaactggcaccaatgaggacgcaggtcgacaggagcgacgattccaaggacggtgagcgtacccctaagaagagcaagaagttcctcaagtccatcctcagcaggcgcaagtccagaaaagatgagccgctgccgagttactttgacgactactgagccacaggatttttttttcttctccctccgttggacggcaccgcgcgcggtctctgcgtactcctacttcagtttgtttcactttcatccaagtgttatgttctcaatataaatatcgtcttcgtatagaaaatagcttaaagtttacatgaatgcagtgggaagtttcagcaagatgtcatcaccccacttgcctgtttctataagagatgctcagatcaagagtaaacctgtaacagtcgatgggaatacacaagtaacacagaaacatcgggtgtaaaag

SEQ ID NO: 219844 - DNA, 1633 bp, Zea Mays
gaaaaaaccacatattcccttcttctttcccaatctcactggcaggcactgcctccatcatcctctgactcagagagagagagagcagccgagccggttcaaccccatgaataccgctgctgcagagatcacggcctgcttctgcgtctgcagctccagcagtagcaacagcaggggctgcagtgcaaacgactgctagttcccctttccccgcatgatctctgccccttcccctaccttctcttgttcttgcttgcacgacccttttccttgtgcgctagctgccgcttcttcttcgtcttcctggagctccccgcatccacacatgccccaagaaccagacaataaaacaacacggaaccatcggagtctttttctactactatttccagcgatttgattatatggatgtgtgcacaggtgcacgtagataggtagaatagaagggagattatagctagctagaggcagcgagcagctcggttgctgggacacgcgatcgagctacagcaaagaagactgcagggtggcgcggcgggcatggaggatctgtacagcatccacccggggatctcgcgccacggggcggcggcgactagcgaggcgtccggggtcgccggtggaccgggctcacccccgcccccgcccccgccggcggcggatctgacggagctggtcaaggcgcagatcgccgggcacccacgctacccgtccctcctctccgcctacatcgactgccgcaaggtgggcgcgccgtcggaggtggccacgctgctggaggagatcggccgggagaggagacgtactgccggttgctggagcggtacaaggaggagctgtcgcggccgttcgacgaggcggcgtccttcctcagcagcgtcaggacgcagctcagctccctctgcggcggcgccgcctcgctctccgatgaaatggtggagtcctctgaggacgagccatgctcaggcgacacagacgcgacgacagacccagggcaggagcacagctcgcgcctggccgaccgcgagctcaaggagatgctgctgaagaagtacagcggctgcctgagccggctgcggtccgagttcctgaagaagaggaagaaagggaagctgcccaaggacgctcggtcggcgctgatggactggtggaacacgcactaccgctggccgtaccctacggaggaggataaggtgaggctggcggccatgactgggctggacccgaagcagatcaacaactggttcatcaaccagcggaagcggcattggaagccgtcggaggacatgcggttcgcgctcatggagggcggcgtctccggatcctcctccgggacgacgctctacttcgacacgggcaccatcgggccgtgatcgatgcgatagatacctctgacgaattgggggcaaattgttggttgatactgagattagttacatgaagcaatatccgctgtcattttgtcggattcattgtgtatatgcatgggcgacaacgtgtattgtcgggtacacagtatgtagtggcatgtaaagacaccgtaacaatataacatgaattgttcaattgcctgttgcattttgatcaccctgttttacatctgaaaatttaaaattcagttcggaagcgacgg

SEQ ID NO: 219845 - DNA, 673 bp, Zea Mays
ctttcctctattattctcttctttttaggatgcgctggatatgctggagtgtcaacgtgacttctggagtaaaagaagaccgcatgatgatcacaggaatgcatactgtttctgatatcttctgtgttggctgtggatccatagttgggtggaaatatgatgcggcacatgagaagggccagagatacaaggaaggcaagtttattctggagaggtacaaggtgtcgggccctgacggaagccaatactgggttccacaagatgctcacttgggcggaagcgacgccgatgacatataaaacacgatccaacaagctcaagcctgtcgttgatcccctgtaaataacctgggtggcgttgctctttaggcagccgacagccggggattgctccattgaaataattcgccggcgtaaattgttgctgttccaggtgacatgatcgtatccctccctccctcccgttgtccctggaagtcattagatgttaccgctgtatatgtgcgtaacctgtgttgcttataagtccatctgagttgtatgccaagcactagtgaccaaataagtaaagtaaatttctcaagtgtctggtcgacctgggtgtcaagcgagggcagtatgtacaaatctgcattgtattgtgtgttcggttccaacgtcactcttaaataacc

SEQ ID NO: 219846 - DNA, 4203 bp, Zea Mays
ttttgagccttatatagtaaaccgcgcacctctctctctctctcctctctcctagcctttctttcctggcggcggcgacgccgactactgggcgagcagcgccgccatacccagttcgtcgggcccttcgaccttcgtcggcaacgagcttccaccagccattacagtaccatggaggaacctctgttggaccatgaatcttcttccttatctgaagcaacaggtcgtagatcacttttctcagatgctggattgtttagtaatatcaccttttcttggatgggtcctttacttgatcttggcaagaggaaaacactagaccttcatgatgtgccattcttggatgacagtgacagtgtccacggaatcacccctaagtttaaatcaaagattgcctcgatttctgccacagggcaatacactgatgttacaacagttaagttagtcaaatctcttgtgctcacaacatggaagctaatcattatcactgcagtttatgccctaatccgtaccgttacttcatatgttggtccctatctcatcgagcacttcgttgactacttaaatcaaagcacacgatccactaaaagaggataccttttggtgttggcatttgttgctgcacagctgatggaaggtctctcatcaaggcatttgctctttagatctcaacaattaggcttgcgcgtgcattctgctcttattgcaattatttaccaaaagggtcttgccctctccagccaatccaagcaaggtagttcaagcggggagctgatcaatgttgtgaacattgatgctgagcgagtaggagatttcaattggtctctgcatgaactttggctgctcccagtgcaaattagtctcgcaatgattatcttatactctactcttggcttggcatcattcgctgcccttgctgcctgtgttttgacaatgttggctaacatacctttggggcggattgagcaaaattaccaggagaaaactatgaatgccaaggatgctagaatgagtgctatgtctgagatattacagaacatgcatattctcaagcttcatggttgggaattggttttcttgtcaaagattaaagagataaggaaggttgagatgaactgggtaaagaaatatgtctacacctcatcaatgcttatatctgtatttttttgtgcccctgcatttgttgctatgatcacttttggaacttgtataattatcggcatcccattagaaacagggaaagtattatctgctctagcaacatttaggcagttgcaaggtccgattcacagtctgccagacgcgatctcatcaatcattcagacaaaagtatcacttgacaggatatgttcatttctctgccttgaggaattagcaagtgatgcagtaactaagcttccgagtggtagcaccgatatatccattaaggtgagaaatggtagcttctcctggcaaaaattctctcaggtgcctactctccaagatctggacttgtgtgtgcaacaaggaactagagttgctatctgtggaactgttggatcgggtaagtcaagcttattgtcttgcatacttggtgagataccgaagttatctggagaggttcaaacttgtggtacaattgcttgtgttagccaatcaccatggatacaaagtgggacaattgaagaaaacatacgttttggtacacaaatgaacagggaaaggtacaaaaatgtccttgaggcatgctgtttaaataacgatttggatatattacctttgggtgaccaaacaattataggagaaagaggaatcaacttaagtggtggacaaaaacagaggatacagattgcccgtgctttgtatcaagatgctgatatcttcctatttgatgatccatttagtgcagttgatgctcgcactggactgcacttgttcaaggagtgcttgctagaatttttagcttcaaaaactgttatatatgttacccatcatgttgaatttttaccttcagctgatcttatcctggtcatgagagatggaaaaataacacagtcaggggattacactgaaattctgaaatctggagaagatctcttggaattagttgcatcccataaagatgccttatcaactttagacatgctggagcgccctattgaaaattttgagagtacatatcatcctggtggcaatgaaagtaacctgtttatagcgggggataagaaagaccagaacgaggaaggagatattcaaaatggtcagctagtacaagaagaagagagggagaaaggccgggttggatttattgtctactggaagtatattatgatggcatataatggagcacttgtgccacttattttgctagctcagataattttccaagttcttcaaattggatgcaatttctggatggcttgggcagcaccaatatctgaaaatgtgaatcctccaatcagtagtttgcagatggtaaatgtgtactttgcattagcaattgttagctcattgtgcatattcattcgatcacatcttcttgtcatgaccggatgtaagactgctaatattctatttgagaacatgcacaactgcattttccgagcaccaatgtctttctttgactccacacctagtgggcgaatcttgaacagagcttccacagatcaaagcacagtggatacaagaatttttgacctgatgggctatcttctatttcctgctattgagattctaggaacagttattctgatgtcacatgttgcatggcaagtcttcatagtttttgtccccattattactgcatcgctgtggtatcagcaatactacatagatgcagctagagagttgcaaaggttggttggagtttgcagatcccccgtgcttcaacatttttctgaatcaatggctggctcaaatataattagatgctttcaaaaggaaagacaatttatccgttatattggatatttggtggataatttatctcgaccaagtttgtataatgcagccgcaatggaatggttgtgctttcgcttggatatgctttcatcctttgttttttccttcacattgatacttctggtctcttcaccatctgctttaattgacccaaagactgctggtcttgcggtcacttatggactaagcctcaatatgctacaagggtgggctattgctgtcctctgcagtttagaaaatagaatgatatcagtggaaagaatgttgcagtatacgactattccttcagaaccaccacttacaatatcagaacgccaaccaaatagacagtggccaacaaagggcgaaattgagtttcttaacctccatgttcgatatgcaccgcagctgccttttgttttaaaaggcctgacgtgcaccttactcggaggaaagaagacaggtattgttggtagaacaggtggtggcaaatcaaccttgattcaggcactatttcgcattgtggacccatgtattggccaagtgtttatagatggcactgacatctgcaccattggactacatgacctccggacaagattgagcatcattccacaagatcctgttatgtttgaggggaccttgcgaaccaatattgacccccttggggagtacagtgacgagaaaatctgggaggcattggattcatgtcatcttggggatgaagttagaaagaacgagcttaagcttgactctacagtgacagaaaagggcaaaaactggagcacaggtcagcgtcaacttgtgtgtctgggaagggtgattctgaaacggaggaagatcttggttttggatgaggcaacttcatccgtggatccaattacagacagcttgattcaaaaaaccttaaaacaacaatttctcaaatgcacaatgattacaatagctcaccgtatcacatcagttcttgatagcgacaaagtcttgcttctggataatggtgaaattgcagagcatgacgccccagcaaaactgctagaggacagttcatccctattctccaaacttgtatctgagtataccatgggatctgataagtggcgaatgcaagaaagcagctaaatcaatactctacagataatacaggacaaacgccctaggaagtgtgagtatctacgtgtcaccaattttatagcttaataaaaagcaaatttttaaaaaacaaaaaaaaaactatgaatatccatattccccaaggcccttggaagtgtgatatatttgttt

SEQ ID NO: 219847 - DNA, 4127 bp, Zea Mays
ttttgagccttatatagtaaaccgcgcacctctctctctctctcctctctcctagcctttctttcctggcggcggcgacgccgactactgggcgagcagcgccgccatacccagttcgtcgggcccttcgaccttcgtcggcaacgagcttccaccagaagccattacagtaccatggaggaacctctgttggaccatgaatcttcttccttatctgaagcaacaggtcgtagatcacttttctcagatgctggattgtttagtaatatcaccttttcttggatgggtcctttacttgatcttggcaagaggaaaacactagaccttcatgatgtgccattcttggatgacagtgacagtgtccacggaatcacccctaagtttaaatcaaagattgcctcgatttctgccacagggcaatacactgatgttacaacagttaagttagtcaaatctcttgtgctcacaacatggaagctaatcattatcactgcagtttatgccctaatccgtaccgttacttcatatgttggtccctatctcatcgagcacttcgttgactacttaaatcaaagcacacgatccactaaaagaggataccttttggtgttggcatttgttgctgcacagctgatggaaggtctctcatcaaggcatttgctctttagatctcaacaattaggcttgcgcgtgcattctgctcttattgcaattatttaccaaaagggtcttgccctctccagccaatccaagcaaggtagttcaagcggggagctgatcaatgttgtgaacattgatgctgagcgagtaggagatttcaattggtctctgcatgaactttggctgctcccagtgcaaattagtctcgcaatgattatcttatactctactcttggcttggcatcattcgctgcccttgctgcctgtgttttgacaatgttggctaacatacctttggggcggattgagcaaaattaccaggagaaaactatgaatgccaaggatgctagaatgagtgctatgtctgagatattacagaacatgcatattctcaagcttcatggttgggaattggttttcttgtcaaagattaaagagataaggaaggttgagatgaactgggtaaagaaatatgtctacacctcatcaatgcttatatctgtatttttttgtgcccctgcatttgttgctatgatcacttttggaacttgtataattatcggcatcccattagaaacagggaaagtattatctgctctagcaacatttaggcagttgcaaggtccgattcacagtctgccagacgcgatctcatcaatcattcagacaaaagtatcacttgacaggatatgttcatttctctgccttgaggaattagcaagtgatgcagtaactaagcttccgagtggtagcaccgatatatccattaaggtgagaaatggtagcttctcctggcaaaaattctctcaggtgcctactctccaagatctggacttgtgtgtgcaacaaggaactagagttgctatctgtggaactgttggatcgggtaagtcaagcttattgtcttgcatacttggtgagataccgaagttatctggagaggttcaaacttgtggtacaattgcttgtgttagccaatcaccatggatacaaagtgggacaattgaagaaaacatacgttttggtacacaaatgaacagggaaaggtacaaaaatgtccttgaggcatgctgtttaaataacgatttggatatattacctttgggtgaccaaacaattataggagaaagaggaatcaacttaagtggtggacaaaaacagaggatacagattgcccgtgctttgtatcaagatgctgatatcttcctatttgatgatccatttagtgcagttgatgctcgcactggactgcacttgttcaaggagtgcttgctagaatttttagcttcaaaaactgttatatatgttacccatcatgttgaatttttaccttcagctgatcttatcctggtcatgagagatggaaaaataacacagtcaggggattacactgaaattctgaaatctggagaagatctcttggaattagttgcatcccataaagatgccttatcaactttagacatgctggagcgccctattgaaaattttgagagtacatatcatcctggtggcaatgaaagtaacctgtttatagcgggggataagaaagaccagaacgaggaaggagatattcaaaatggtcagctagtacaagaagaagagagggagaaaggccgggttggatttattgtctactggaagtatattatgatggcatataatggagcacttgtgccacttattttgctagctcagataattttccaagttcttcaaattggatgcaatttctggatggcttgggcagcaccaatatctgaaaatgtgaatcctccaatcagtagtttgcagatggtaaatgtgtactttgcattagcaattgttagctcattgtgcatattcattcgatcacatcttcttgtcatgaccggatgtaagactgctaatattctatttgagaacatgcacaactgcattttccgagcaccaatgtctttctttgactccacacctagtgggcgaatcttgaacagagcttccacagatcaaagcacagtggatacaagaatttttgacctgatgggctatcttctatttcctgctattgagattctaggaacagttattctgatgtcacatgttgcatggcaagtcttcatagtttttgtccccattattactgcatcgctgtggtatcagcaatactacatagatgcagctagagagttgcaaaggttggttggagtttgcagatcccccgtgcttcaacatttttctgaatcaatggctggctcaaatataattagatgctttcaaaaggaaagacaatttatccgttatattggatatttggtggataatttatctcgaccaagtttgtataatgcagccgcaatggaatggttgtgctttcgcttggatatgctttcatcctttgttttttccttcacattgatacttctggtctcttcaccatctgctttaattgacccaaagactgctggtcttgcggtcacttatggactaagcctcaatatgctacaagggtgggctattgctgtcctctgcagtttagaaaatagaatgatatcagtggaaagaatgttgcagtatacgactattccttcagaaccaccacttacaatatcagaacgccaaccaaatagacagtggccaacaaagggcgaaattgagtttcttaacctccatgttcgatatgcaccgcagctgccttttgttttaaaaggcctgacgtgcaccttactcggaggaaagaagacaggtattgttggtagaacaggtggtggcaaatcaaccttgattcaggcactatttcgcattgtggacccatgtattggccaagtgtttatagatggcactgacatctgcaccattggactacatgacctccggacaagattgagcatcattccacaagatcctgttatgtttgaggggaccttgcgaaccaatattgacccccttggggagtacagtgacgagaaaatctgggaggcattggattcatgtcatcttggggatgaagttagaaagaacgagcttaagcttgactctacagtgacagaaaagggcaaaaactggagcacaggtcagcgtcaacttgtgtgtctgggaagggtgattctgaaacggaggaagatcttggttttggatgaggcaacttcatccgtggatccaattacagacagcttgattcaaaaaaccttaaaacaacaatttctcaaatgcacaatgattacaatagctcaccgtatcacatcagttcttgatagcgacaaagtcttgcttctggataatggtgaaattgcagagcatgacgccccagcaaaactgctagaggacagttcatccctattctccaaacttgtatctgagtataccatgggatctgataagtggcgaatgcaagaaagcagctaaatcaatactctacagataatacaggacaaacgccctaggaagtcttcatagtactggaccctatccgacagccttgcaatctc

SEQ ID NO: 219848 - DNA, 4158 bp, Zea Mays
ttttgagccttatatagtaaaccgcgcacctctctctctctctcctctctcctagcctttctttcctggcggcggcgacgccgactactgggcgagcagcgccgccatacccagttcgtcgggcccttcgaccttcgtcggcaacgagcttccaccagaagccattacagtaccatggaggaacctctgttggaccatgaatcttcttccttatctgaagcaacaggtcgtagatcacttttctcagatgctggattgtttagtaatatcaccttttcttggatgggtcctttacttgatcttggcaagaggaaaacactagaccttcatgatgtgccattcttggatgacagtgacagtgtccacggaatcacccctaagtttaaatcaaagattgcctcgatttctgccacagggcaatacactgatgttacaacagttaagttagtcaaatctcttgtgctcacaacatggaagctaatcattatcactgcagtttatgccctaatccgtaccgttacttcatatgttggtccctatctcatcgagcacttcgttgactacttaaatcaaagcacacgatccactaaaagaggataccttttggtgttggcatttgttgctgcacagctgatggaaggtctctcatcaaggcatttgctctttagatctcaacaattaggcttgcgcgtgcattctgctcttattgcaattatttaccaaaagggtcttgccctctccagccaatccaagcaaggtagttcaagcggggagctgatcaatgttgtgaacattgatgctgagcgagtaggagatttcaattggtctctgcatgaactttggctgctcccagtgcaaattagtctcgcaatgattatcttatactctactcttggcttggcatcattcgctgcccttgctgcctgtgttttgacaatgttggctaacatacctttggggcggattgagcaaaattaccaggagaaaactatgaatgccaaggatgctagaatgagtgctatgtctgagatattacagaacatgcatattctcaagcttcatggttgggaattggttttcttgtcaaagattaaagagataaggaaggttgagatgaactgggtaaagaaatatgtctacacctcatcaatgcttatatctgtatttttttgtgcccctgcatttgttgctatgatcacttttggaacttgtataattatcggcatcccattagaaacagggaaagtattatctgctctagcaacatttaggcagttgcaaggtccgattcacagtctgccagacgcgatctcatcaatcattcagacaaaagtatcacttgacaggatatgttcatttctctgccttgaggaattagcaagtgatgcagtaactaagcttccgagtggtagcaccgatatatccattaaggtgagaaatggtagcttctcctggcaaaaattctctcaggtgcctactctccaagatctggacttgtgtgtgcaacaaggaactagagttgctatctgtggaactgttggatcgggtaagtcaagcttattgtcttgcatacttggtgagataccgaagttatctggagaggttcaaacttgtggtacaattgcttgtgttagccaatcaccatggatacaaagtgggacaattgaagaaaacatacgttttggtacacaaatgaacagggaaaggtacaaaaatgtccttgaggcatgctgtttaaataacgatttggatatattacctttgggtgaccaaacaattataggagaaagaggaatcaacttaagtggtggacaaaaacagaggatacagattgcccgtgctttgtatcaagatgctgatatcttcctatttgatgatccatttagtgcagttgatgctcgcactggactgcacttgttcaaggagtgcttgctagaatttttagcttcaaaaactgttatatatgttacccatcatgttgaatttttaccttcagctgatcttatcctggtcatgagagatggaaaaataacacagtcaggggattacactgaaattctgaaatctggagaagatctcttggaattagttgcatcccataaagatgccttatcaactttagacatgctggagcgccctattgaaaattttgagagtacatatcatcctggtggcaatgaaagtaacctgtttatagcgggggataagaaagaccagaacgaggaaggagatattcaaaatggtcagctagtacaagaagaagagagggagaaaggccgggttggatttattgtctactggaagtatattatgatggcatataatggagcacttgtgccacttattttgctagctcagataattttccaagttcttcaaattggatgcaatttctggatggcttgggcagcaccaatatctgaaaatgtgaatcctccaatcagtagtttgcagatggtaaatgtgtactttgcattagcaattgttagctcattgtgcatattcattcgatcacatcttcttgtcatgaccggatgtaagactgctaatattctatttgagaacatgcacaactgcattttccgagcaccaatgtctttctttgactccacacctagtgggcgaatcttgaacagagcttccacagatcaaagcacagtggatacaagaatttttgacctgatgggctatcttctatttcctgctattgagattctaggaacagttattctgatgtcacatgttgcatggcaagtcttcatagtttttgtccccattattactgcatcgctgtggtatcagcaatactacatagatgcagctagagagttgcaaaggttggttggagtttgcagatcccccgtgcttcaacatttttctgaatcaatggctggctcaaatataattagatgctttcaaaaggaaagacaatttatccgttatattggatatttggtggataatttatctcgaccaagtttgtataatgcagccgcaatggaatggttgtgctttcgcttggatatgctttcatcctttgttttttccttcacattgatacttctggtctcttcaccatctgctttaattgacccaaagactgctggtcttgcggtcacttatggactaagcctcaatatgctacaagggtgggctattgctgtcctctgcagtttagaaaatagaatgatatcagtggaaagaatgttgcagtatacgactattccttcagaaccaccacttacaatatcagaacgccaaccaaatagacagtggccaacaaagggcgaaattgagtttcttaacctccatgttcgatatgcaccgcagctgccttttgttttaaaaggcctgacgtgcaccttactcggaggaaagaagacaggtattgttggtagaacaggtggtggcaaatcaaccttgattcaggcactatttcgcattgtggacccatgtattggccaagtgtttatagatggcactgacatctgcaccattggactacatgacctccggacaagattgagcatcattccacaagatcctgttatgtttgaggggaccttgcgaaccaatattgacccccttggggagtacagtgacgagaaaatctgggaggcattggattcatgtcatcttggggatgaagttagaaagaacgagcttaagcttgactctacagtgacagaaaagggcaaaaactggagcacaggtcagcgtcaacttgtgtgtctgggaagggtgattctgaaacggaggaagatcttggttttggatgaggcaacttcatccgtggatccaattacagacagcttgattcaaaaaaccttaaaacaacaatttctcaaatgcacaatgattacaatagctcaccgtatcacatcagttcttgatagcgacaaagtcttgcttctggataatggtgaaattgcagagcatgacgccccagcaaaactgctagaggacagttcatccctattctccaaacttgtatctgagtataccatgggatctgataagtggcgaatgcaagaaagcagctaaatcaatactctacagataatacaggacaaacgccctaggaagtacaggaggtcgtactactctgctagcactgccagcaccatcggtagcttgtctccaccgcaacctcaggta

SEQ ID NO: 219849 - DNA, 1600 bp, Zea Mays
ctttctttgactccacacctagtgggcgaatcttgaacagaatcaaagcacagtggatacaagaatttttgacctgatgggctatcttctatttcctgctattgagattctaggaacagttattctgatgtcacatgttgcatggcaagtcttcatagtttttgtccccattattactgcatcgctgtggtatcagcaatactacatagatgcagctagagagttgcaaaggttggttggagtttgcagatcccccgtgcttcaacatttttctgaatcaatggctggctcaaatataattagatgctttcaaaaggaaagacaatttatccgttatattggatatttggtggataatttatctcgaccaagtttgtataatgcagccgcaatggaatggttgtgctttcgcttggatatgctttcatcctttgttttttccttcacattgatacttctggtctcttcaccatctgctttaattgacccaaagactgctggtcttgcggtcacttatggactaagcctcaatatgctacaagggtgggctattgctgtcctctgcagtttagaaaatagaatgatatcagtggaaagaatgttgcagtatacgactattccttcagaaccaccacttacaatatcagaacgccaaccaaatagacagtggccaacaaagggcgaaattgagtttcttaacctccatgttcgatatgcaccgcagctgccttttgttttaaaaggcctgacgtgcaccttactcggaggaaagaagacaggtattgttggtagaacaggtggtggcaaatcaaccttgattcaggcactatttcgcattgtggacccatgtattggccaagtgtttatagatggcactgacatctgcaccattggactacatgacctccggacaagattgagcatcattccacaagatcctgttatgtttgaggggaccttgcgaaccaatattgacccccttggggagtacagtgacgagaaaatctgggaggcattggattcatgtcatcttggggatgaagttagaaagaacgagcttaagcttgactctacagtgacagaaaagggcaaaaactggagcacaggtcagcgtcaacttgtgtgtctgggaagggtgattctgaaacggaggaagatcttggttttggatgaggcaacttcatccgtggatccaattacagacagcttgattcaaaaaaccttaaaacaacaatttctcaaatgcacaatgattacaatagctcaccgtatcacatcagttcttgatagcgacaaagtcttgcttctggataatggtgaaattgcagagcatgacgccccagcaaaactgctagaggacagttcatccctattctccaaacttgtatctgagtataccatgggatctgataagtggcgaatgcaagaaagcagctaaatcaatactctacagataatacaggacaaacgccctaggaagtgtgagtatctacgtgtcaccaattttatagcttaataaaaagcaaatttttaaaaaacaaaaaaaaaactatgaatatccatattccccaaggcccttggaagtgtgatatatttgttt

SEQ ID NO: 219850 - DNA, 1247 bp, Zea Mays
atactacatagatgcagctagagagttgcaaagccgcaatggaatggttgtgctttcgcttggatatgctttcatcctttgttttttccttcacattgatacttctggtctcttcaccatctgctttaattgacccaaagactgctggtcttgcggtcacttatggactaagcctcaatatgctacaagggtgggctattgctgtcctctgcagtttagaaaatagaatgatatcagtggaaagaatgttgcagtatacgactattccttcagaaccaccacttacaatatcagaacgccaaccaaatagacagtggccaacaaagggcgaaattgagtttcttaacctccatgttcgatatgcaccgcagctgccttttgttttaaaaggcctgacgtgcaccttactcggaggaaagaagacaggtattgttggtagaacaggtggtggcaaatcaaccttgattcaggcactatttcgcattgtggacccatgtattggccaagtgtttatagatggcactgacatctgcaccattggactacatgacctccggacaagattgagcatcattccacaagatcctgttatgtttgaggggaccttgcgaaccaatattgacccccttggggagtacagtgacgagaaaatctgggaggcattggattcatgtcatcttggggatgaagttagaaagaacgagcttaagcttgactctacagtgacagaaaagggcaaaaactggagcacaggtcagcgtcaacttgtgtgtctgggaagggtgattctgaaacggaggaagatcttggttttggatgaggcaacttcatccgtggatccaattacagacagcttgattcaaaaaaccttaaaacaacaatttctcaaatgcacaatgattacaatagctcaccgtatcacatcagttcttgatagcgacaaagtcttgcttctggataatggtgaaattgcagagcatgacgccccagcaaaactgctagaggacagttcatccctattctccaaacttgtatctgagtataccatgggatctgataagtggcgaatgcaagaaagcagctaaatcaatactctacagataatacaggacaaacgccctaggaagtgtgagtatctacgtgtcaccaattttatagcttaataaaaagcaaatttttaaaaaacaaaaaaaaaactatgaatatccatattccccaaggcccttggaagtgtgatatatttgttt

SEQ ID NO: 219851 - DNA, 1222 bp, Zea Mays
gaagatctaaattaatcattcagaagcaaaaactgaggagctaacataaacatctgagatgggttcctcatttattataatatcgaaatatctcgatgatgtctggtcactaatctaagagcaggctatgctggaggtgccacagtccagtttagtccatcttccctgccatagcgatttctgtttggttgctccttggccatctggactaaatttaaggagcaatggcccaagaaacagtgtgaacagctgcaagttgttccaagagttaacggttgctggattctgtcaatttcttcacgtaggcgccaattgcttcgatgtaattgtctccgtgggcgaagaagccaacgatcctgctgtcgctctgcaccggaacctggaacgcggctcccagctgcgttccgaaaggcccgtgtgttttgcccgtgctggtcacgagcgtcagagaggacacgacactgggtattgttctgtcccacgcgcatggatggaatgtcccagtaacttccactatgaactcttcaggggcaagatgaatctttcgaccagttcctccgcagccgccccacggaccggtggtgtgctgctgcccgtcgccatcgctgtacagatactccagcgagtttacgatcgtcccgctgaagatcgtcactctgtgcaggcgatgcggcctctctgcgatgtcatggagagcatttccaaccccgccccaaggcccaatcctggcgacgacggcctcatcaccacatcttgtttcccaactgcttttggttcgggtttcggcgccgtgtagacaccgatcgcgttgaggtaccgtccggagcgcccaaagaaaccgacgatgcagccattgccctgcactgggatgtggaaggatgtgcctcgccctcttccaaacggcccgtagctacgagcgttggtgacgaacgtcagagacgttatgacgtttgcatggccgttgaatgtgccgattgacccagacacacctgtaaggaactctgaaccagctagctgaaactgtaaggaaatcaaagagaagttatacttcattgtccctcgggacaattttgaataccacgttctcggtggatagtttgtttttttaaatgttcatcacactcacagagctgttgtctcctccatgaccaccccaagggcctgcggtgcggtactggctgtcagggccagcgtacgagaactcgatcgagtcgatgataag

SEQ ID NO: 219852 - DNA, 3137 bp, Zea Mays
gtgattcatcgtcttcccggaaccaacaggccgctgtttgactttgacccaaccacaccacgcgggacggggctccgcctccgaccccgcgccgacctaacgtgaccaactcactcaacctcgctgccgtgacgtgccgtaccgtgccgccctgtccatcgggtcaaatccctcgtcgcttcctctccgcctcctcgccacttctccgctaatccccaatccggaacctcaccgcggagaaccccagatcaaacccttccccgcccattcccacttccatccttccagtacgatccgtttcttccttacttccctgctcatccgagggtgaggaaggagtcgggcgaggaatccaccgccggggtttcttgatccgggcgcgtgattcgccgcgcccaggcaccagtgagaaatcaaatcaagaacggggtgggggaagtgagacgagggcgcggggagcaatcaagatcgcttcttggagctttcggcccccccgagccaatgccggatccggttagcggcgccccccgctcccacggcgccgggctggcatgccccctctgagcgcccccgcctgcctccgcggctcccgatgctcgtgtggtcttcgggagcaggagagggagcagcggccgtcgtgggcggcggccaggagcgaggatgcagatccggctgtcgccgagcatgaggagcatcaccatctccactagccatggcctgctagacttgatgaggttcaaggtcgccgcgcgacacttctcctaccgcaccgtcttccacaccgtcctaatcctcgccttcctcctgcctttcgtcttcatactcaccgccgtcatgactctcgagggcttcaacaagtgctcttcactagattgtcttggaagacgtttgggtccgcgccttcttggtaggggaaatgatggttccatgaggcttgtgagggatttatatgtgatgcttgatgaagtaaattctgaggaagcacctcttaatttgaaggttccagaaacttttgatgaatttatctgggacatgaagaataatgattatgatttaaggtcatttgcttttaagttgaaggctacgatggagagcatggataaggaattgaggtcatcaaggttatcggagcagttgaacaagcactatgctgcaattgctattcctaaaggcctttattgcctttcattgcgtttaactgatgaatactcctcaaatgcccttgcaaggaaacaactaccacccccggagttggtgcctagtctttcggacaactcctattaccattttgttttagcatcagataacatccttgcagcctcagttgtggtcagatcaacagttagatcatcactgaaacctgagagaatagttttccatgttattactgacaaaaagacctatcctgccatgcactcatggtttgctttaaattctctcagtcctgctattgttgaggtgaaaggtgttcaccaatttgattggttaacaaaagaaaatgttcctgtacttgaagctatagaaactcagcgcactgctagagatcgttaccatggaagtcaccgtccaagaaccagtgctagtgataacccaagggtttttgcggccaagctgcaggcaggaagtccaacatacactaatgtactcaatcatattcgaatatacttgcctgaggtattagaattttcttgactattattctcatctcttactttcctagtaccatttttgttgggtgaaacaagtatcgtgcttatatagatagaaggatggtttgaaacaatgaaaactgcaaaagaattgaaagcattttagacttttgctctgtagaactattcactgtgaacctgttctagtttgctggtcctgctgggatcaaggagtaagtgatgctgccctcttcttgagatatctggagctttctctgcatgtagtctatatataattgtatatggtacaaacttgttcaaaatgtggttatatttgttgacctgcatccttttttttttgctgaaagttacactgatttaatctgcaatcggtggatgcagttgttcccaagcctcaacaaggtcgtatttcttgatgatgatgttgttgtccagcatgacctatcaccactttgggatatcgatctagctgggaaggttaatggtgctgttgagacttgcataggtggagacagtcgggtgatgtctaagaggttcaggaattatttcaacttttctcatcccctcattgcaaaaaactttgacccttcagagtgtgcttgggcatatggtatgaatatttttgacctgaaagcatggaggaagacaacaatcaaagatcagtatcatcattgggtcaaggagaacttgaagtcaaacttcacactttggaggcttggaacattgccaccaggccttattgcctttaaaggccatgttcacccaattgatccatcatggcatctgttaggcttgggttatcaggaaaagacagatgtcagtagcgttgaacaagcagcagttatacattataacgggcaaagtaaaccgtggctggagattggttttaaacatcttcagccattttggacaaaatatgtgaactactcaaatgaattcataagaaactgtcatataatggagcctcagtttagattgtcttgacaatatatataaaagcatatagtaagtgaaattaaattcgttattttggaaatcaacagcagggagtttatcaagtgcaactggggagctcagtaatcccttaacatggttacatgcgctgtggagaatattcaatgaacagaaaggaaatgttattttttccccatttactgtagggcccttttcctttaatttattccatttgtatcatagctcatgaaattaagatattgcttaggatggttcttttgtattttatggagcaatataagttgggttgatggtagtcccatcgttattgtaattgatgaagagcatacacatttcaccatgtgaaaagcatggattttgattatgcaaagcaaaccttgtatactttttacattgtatgtgtgatttcatttgaaccaacattgattttacagaagaaaaacaccgatttaactaattttagccagcagaaagatcaatagtgctctgaac

SEQ ID NO: 219853 - DNA, 11700 bp, Zea Mays
ttcctgagcaaaccccttggagtgggttcagttgcatctaagacctcatcaaatggactatgccatcaaatgagtggttgaactgctccttgatgtagtagcctcttttgcttcagttgcatcttaagacctcatcggctatctccacttttaggctactagcttgctagattggttctccacgaattgtttatgaactatgacaacacccgctaagttccacacgtccgcggcagcctctcacacaagtacacaacccctcgcacaacctgtcattgcctgtatggttttctgctttctgcacacaagaaacttaatcagcaaaaagagctcaaaagtcatagggcctgtttggttcctttagtctatggactaaagtttagtcccaaccctgtttagttttagggactaaaaatattcaaaacgcattaaatgacttataagaagaccaaaatgcctcttaacattgttcaaaagggacctcaaaccaaaagggaccttaggctcaatagaaaacgggattatcatagccataaggagattgataaaattgttcaaaacatgccttttgacaaagctccagtccttaatggatttaatggaaagtttctgagacacatcatcaaaattgatttttataaactttgtcatgatttttatgatggtaacattaatctggatggaattaacacctctttcatcgctctcatcccaaaggtgaacaaccctgttagggtgaatgattttaggccaatctctcttctcagtatagccatcaaattaatcacaaagctattggtgaataggctgaagcctgtgattcaacgaattgtgcacaaaaatcaatatgattttattaaaaacagaaccatacaggattgtgtcttgcttggtgctatgaatacttacatcagtgccatctttctagaaaggaagtggttgttctcaaattttgataaagcttttaatacagtggagcatagtgtcattattgctatactcaatcagttgggttttcccgtcaggtggattcgttgggtcagttcaaccttaaattctgaatcctctactgttcttttaaatggtgtttctgggaaaaaaaattctttgcaaaagaggtgttaggcagggggatcctttatctcccttgctctttgtgattgcaactgagcttctccaatacatcattagtaaggctacccatcttagggttttatcccttcctattgagcatatgttttgtctgaaagaaattcttcgctcattcacaaacactaccatgctcaaggtgaattatagcaaatcatgcctcttacccatcaatctggaagccaccaaaacagctcaattggctagtctttggttgccaagttggctctattccctttacatatctcagtctacaaatggggattattaagcccagaattaaggatttcttacctctgttgagtaaaatagaaagaagaccaattatgaccagcatgtggctatcaatggcttggagactgactatagtaaattccacattttctacgcttcctacatacaccatgtgcacaatcaagcttccagcttagtcatcaactctattgatagagccagaagagattgtttatggaaagagaatgatattaatgcaaatagtaagccaatgatttcttgggataaggttaccacccccaaggacaagggtggtctggggttattaaccttaaaaatacagaatattgctttgctaatgaaacatcttcataagttttatgatcgattagaagttccctatctggaatactcgctataactcatggcagattcctcattgctcctctgaaagagactcgttctagtggaaagatatttttagactgggagattactatagaggtattgctatgctgatggcaggtgatgagaaaccttttttttactatgggatgttgtctggaataactctcttttcaaatcggatttcatatgtctatgctcgtttgtcaaaaagaaaaactgctttcttgctcagtttctgggcaacatggacttccaagaaaattttcatgcacctctttctatggaagccactgaagaatatctcaagttctatgagacaattatttcagttcaaaacaacatgcatggcaaggacaaatggatctattcttgaggaaacagcaatttccgttcaagcaaggtctacagactaaacttccaatccatttgcccacctcctttcatgtggatctggaagtctaaagtgagtaaaaagatcaaggtgtccatttggctgacctatagagacagaatcaactcaaaaaatattcttcaaaaaacgaggtgtaaagttacaaatgatgattaacctatgtgctttgggacattaattgtgaggaaaccacctaggcacctatcatgttttatttgaatgtccattcagtacagcctgctggaatcacgttggtattcacagggatcattgtttgaatttctttgaaatgatcatatcagcgagggatcaattcacgaaaaagttcttcatggaaattctagctattacggcctgggagatttggaagcagaggaatgttgttatattcagagattttgttccatcctttacgtcttaaaggttttgcttcagtagcaggttgaagctccagatgcttagaatgaactcggacgttcgcttggcaatttccttatggcttgttctttataattgcttctttattttcttttttccttctgtctgcttttgcttctatactttctttattgtgcagttcctcctttttatttaatatataccactataagggtctcccctacaaatttatcggttaaaaagataaaaagtgaaatatggaaggtacataacaaagggaaattaagttctgacagataaagggcgtacccagtgtcgtaggcttcccgcactgtgcggggtctggggaagggtatctttaagcgccaagcgttacccgcataatatgcagaggctggggctcgaacccgggaccttccggttacagacggtaggctctaccgctgcatcaggcctgccactttaaattattattagtcgaataagaccactttgtccatccttgaaactttcaaactgaccaatctagtcatttaggtttcctttttcttttgctccaacataacctcggtacaacatgcctaatcagcctcaaagttgtcatcctttgttgggtcatcatggaaaagacgttccttttacccttattttgctccaataccaaggcctaatttggaagcaagagggggcaaacccaagatggaaagccccctgtggagaactaactgccataaaggaatgtacactgcaatctacagcccatgattaatcgacgcccccggcagctataaaaggttatctatggatagattatgtaataagtgagtagaattatcgacaatccaacaaaaaaagcaagagcatcggaagagaaagtaaagataacagtaaaaaggaacaaaaaagggtaaaaggtaaaaaagtaggtaagaatgagaaatttggaattgtgccatcatgaaatgtgggcttcgcaggattgccattaaatgggtgggtttcgctcaggtgccattataaacaatgacataagcgttataatgtcttttggctatttaacaaaaactgaaatgactttaatttagttatagcttataggagatgatatgactgttttggccctctctggttttcaatggccttctctttcccttctggtgaccacgcttcttcccccatgaccggtggtgtgcagctccaacgacagcagcgggagcgagcagtccggcctgccgcatttcatcctaggagagcagcctgtgtctgcgtggccatccacgttcccgcagatcttgtcactggttggggaaaaaacggatctcctgcgtgtatcctcctgtgtccagacgtgaagtatccatagctaggcaatgtgcaactacatgtaggtgaccttgagatttttttcgctcctcacgccgtatgctctcgtgaattcacatgttttatgcttgcaggataacgttgagtacaacgctggaaagaaaaagagaaaaagtgcatggtcacagggaaagaatggaggcggtcaccaggacagaaagagaagaccgtgaaaaggcagagaggggcaaactagtcagatcatctcctataattaaattaaagctatttcagtttttgttaaatagccaaaaggcattatagcgtgtacgccatcattttaatggcacctaagtgaaacccactcatttgatggcaatttggtggagcccatgtttcataatgacacagttccaaatttctcggtaagaatgtgcatagttgactggattgagatatttttgggggtcaaattggatacttttccaccaaattattattaaagatgcatgagaattgtgaaatatggaacatccacatggagttaaggacccgttcacaaaaacatggagttatggataatagtgacttacgtttattgtcctctttaattcctcctcgcttccatctccagctttcctgatgacaattcagcatttattaacacttcgtagaagattattttgacatgtaagaaccttatcaactacaggatagatatacgtcctttgccaagcttatcatcagcaataacatcagatgcaccaatatctggaacttcgctgactacttgcctcaagaagtcatggacatacatgtttgtatgaactgtttccagaacacattaatacaaactaatcagttaaataaatgatgattaataacatgcaaaagatgatactacagtccagaaaatactcattttttatctatatatgacataggcaagcaagtttgacgacgaacccacaaagcaattttttgccacctgaatcacactacataggcaagcggatttgtccgtaaacccacaaagcaatttgttgccacatgaaccacactgcataggcagtatgcagtaggcatgatagtgtggaaccctcagccaatgcgaggcaccgtaaatctagtatttaatggtaaaagttctttttgctaacgtggaaatgctgggatcctgcagagcttgcggctctcacaagtaaaaaaattcctgtcccgtattcaaaacaatgacagataagctgttgagttatgaatggcatggcacaatcagtattgatagggaagtaactgaaatgtgagaaggcatgatctaatggctgttcaatacaatcactggcgttatttcctttttggagcagaaaaaaacaaagtacattaaatggccccagataggaaatcattaagcaaattaaagggtagaggggggggggccacaggacacatgcaaaatttactctatggaaagatgtggaactttcaggaagtatgaatttagaagttgtttccttagaaagccaatatgtatgctttttcttgcccatgaaatccaaaatattcatttatatgcttctagttatcataaacatgcattcattcgcaatacagttctattctctagcatatagtcattttgcaacattaagattttaaactgggaagaatagcgaatttagtttttttttgcaatatgatattaaggaatatacatttgggtggccgatttttatgaggtatcatcaatatgtacccaggggctggcttgacaaagacaaaaattggcaccgaaattacccaactaattgcaaaaaagaaaacgagagcaaaacttattgacattggaaacttcaagcaagtacaccattgtggtgattatgatgagcaagagctaataatatgaaccaggaggattattttagtggtttagaactttagatgagcaagagctaacaatatgagctccaaacaagcactccattaattaaaactccaaataaaccatttattgacattggagcaaacacggaataattcgtacaagttcaatgttgatgccatttaaaccctaactccaagatagacatgaaactcatctatcctaccgcatcgtcaaacccaatgcaattgaagttctttacgaaaaaatgcatgcaaacaacttggtcggggagggaaagaccgccctcccggtattatattaagaagagacggaaacagatgtctcggacgagaaaatccccaaaccctagtcccctatcactaatggcccagcgccaaccgtccactctgcaacggcccaaccagagggtggcgcataggacatcgtaacccgagagctgatggggcacaacgaggggattctttttaaccaagcctgaaaaatcgccccccgggggggggggggggggggtcgagcccaggacttggaggtcctactcggaagcccttaatcactagactagaggccctttcactaaaaacactcctaggtttcccaaggtgtcaagaaatgttaagatacgatcctcatgatccaaaggtacgctcctaggatcacgaaggcctatctctaggagaccatagaggaccgtaccttcgtgatcctcaaggtgtgattccctcaaagtcaagaaatgttaagatgacatgtcctcgtgatcatggagtcaattcattgaaaccctcctaggttttgccttcaaaatacgatagtacatccaaatgttatgtcatcatgagtccttgatcctcaaggaaaccaagcttgagtctacatagagaagcaagaaggcagaagaaggaatgcaaccatggaaccaaccaccttgtacgaagcatctactaatgtggatggcacaccaaagaccacatgttcttcccccactaaaaaaggttgttcacatgtcattaacttttacatgcatcgagatcaagaaaagacttggatggctagcatggataagtggacaacctaagataggcttcaattttcattggaataccattgtaccctataggagaaccaaaactaatttatttggtagtaggcagatgatggtttagcaaaaaaaatcttataaaattaagagttgtttgatgccaccaatcacacaacgatgaactagaagtaaagaaatctccttggacaattttattgctgaaagaagtatatcaagtgtgaccaatttggaaaaacaaagcgatgatcacatgtttgtgtcttgaaccaatgcccactttccgaacatgaagacatccaagacttgcttgtaccatgtgtctttgcaagagagttttgacacaagctcttcacccatcggccgcaagagctaacagaagtttaagcgagctagagggatatcgtcgaagggtgcattgtgattagctagcaaacatgcccaacgttgcaatgggacatataccttatcatgcagccaccttgtggcttggagaaaagattgtgtcatgcgttccaattcgtctaggaatctaagtgagtgttatgcatgggcgtgcgatgcttgattgcataatgtgttcaaatatgtctcgggattggactccgctcatgccctagacccatgatactctaacttgcacatgcacaagcgtggtagaccatgaaacgctttgtgatattatacgagcaatcatgcttgtgcgttgctacgagacatattgggtttgtttggttcagctttttctgaccagcttttccgagaatctagttgtggggaggatctcgctttgtagagaatttgagtatcattacgattacgtgtggaggaagataaagttatccatggggctcaggatctataaagtgacggattattacgattgcgacgactcaaccgattatatgtttatgttaattttgaatggtttttactcaaacgaattttatagaagctggctgaaaagctgagtgtttggcagtccgcagcagcttttggtggctagaagctgcgaaaagccgaaacaaacaggggcatagcttgttgcatagtcacttggagaacttgtgactcagagacttattgaacgattgtgtcatgtgttttgatttgtcaaggaatcgaactttgtatcgtgcttggatgaatgttgctttaacttgtacatgcaaaagaggcatatagaattttcaataatgtcatgtgctccaattcgtcttgggattggatgtttgcacatacatatgatgtgatcaccttacgacttggagatatattcaaggatcatgtcatatgtttgagacccttccgaaagagagacaggacgaaacaaagctttgtttcatgtccctaacatgtatgaagaggtgaaaattcaaaacttcagggtccaattataaatactgaaattaagcaattttgcttatcccttctctccgaaggagccaaaggagagaagggtgttaacatcatgaaacatgaatgaatcacttcaggtattatatcacaatacacacaggcgaaggaccaagcatatgagcttcgataatgaattaccttcgaaaactctttcccgggactaaggtgctacaggcacaaggttacaaaataaccgacacccgtagcagtagtatttttcatttatttttagggccagaccggcacacctttatacatatgaaattacaattcagccctccctattacatagcatcccttcacgattgaggggatacaattccgtcattttacacccttgacgtgtagtgtatgacttttcttctcttggagatcaccttcggctcccttcactggcaaaccatatcggaggcaccaaaacttgtttatccttcctttggctttgcaacacatccgaagcctcggcttcaatctttgtctgaagcttccttatcttttgacttttatatagatctttatcatgagaaaaagcttaaacaatgatccttgttagtagggacctttggtcgaagacctcctcaacatcatgcttttcaattcactgtttaatctaacagagcgccatacctagacatgctcaacttgatttcgtcttgtgttcgaatacgtcttgggatcgtactctgccctaggactcatgttgctctaactcgcacaagcacaagagagtggtagactaggggaacactacatattgcaatattatatacacacatacatgctcgtacgttgcaacgagatgtacaattgtgaactaaaggtacctgaatgactggtgactcagagatttattcgacgattatgacatgtgctccaattcttcaaagaatcagactctaatcatgcttagatgcacaatgctttaactcgtataagcacgggaggcatggagattatcgattgtatcatgcgcgctaattcgtcttgggatcaaactcaacaccatgtctacacacgctactcttactcgtagcaaccacaggggtggcacgccatgcaaatgtaacatcttccaatttgtctttagattaaactcttcactgtgtctatgacacgagggagtgaaggagcatggaaatgttctatactttgatattaggtatagacatgcacaagggatacaactccctcatcattctagaattgatcagcatgatgggaagaaacatattgcaacggccatgcataaggaaatttgagtggttcttggtgtctcaacaatttggaaccatcagaccaatgtcatcttcaagaatggctcctcccttacagaggatgtaagatgttcacctacaaagcattgctagtaccatgggttgtagtcattttttgtcatcttcaagaatgactccccctcattacagatgtaggctaactcgcctctgatgccttgatagtgtcatgggttgtggtcttttttattaaacactagaataaatctaatttggaaaactaactggttgtaacaaactttcttaatgcaatgacacacatttcacgcttgttcaagaaaaaattgtcacaagtttggcaagctagagagaaaggtctagctactcaataaggataggaccatcgataaccaaacccaagcgaaggcaaagtggaaggaaaaaaaaaggagcaaccaaataaacttatgcaatggtaatacaaagagttaaacaatgacacattcgatggagttaaagttaaaacaacggaacatccattggccatagagaaaaatgcccatggtggtggccctctatcaagaaggtagaggcatgtccagcatcaagaagtttcaactttcaagtacttagtcaatatcgtgtcaacatccatccaatgttttcaagtcgtccgattaatcgcgattaatcgtccaaaatgccatggtggtggccctctatcaagaaggtagaggcatgtccagcatcaagacgtttcaactttcaagtacttagtcaatatcgtgtcaacatccatccaatgttttcaggtcatcctattaatcgcgattagtcgcgattaatcgtccaaaatggtttggaccaatcatgattaatcgcccaagtcggacagccagaacgaccagcaagtcgtccgacttgaaaacattccatccatccaacaaaagcttcatcatgacatgataagggcctataccgtaaacgtcacaatcatatgttgtgtagggttccacaatgaggtagaatgtttattactaatctatgttcactctctgtctagaaactaggttatcatgtggctaggtcgtatctctttacatcctcacttgcaatattgccccttgtcaaagtattggtcatcccttgcttttttagtttgatatttgatattaagctattctacccccatcttcctctgttttgatattgtattttagtgcacatctaataagaaaatgaataatatggccttgtagccctactaatctttttcttgccacggtgttgaactatataacatctagtaaactatagttgactataaattatgttatgtaggcacactttacgaacgtgtcttctattcaaacactataacactaaataaaagagaacttctcaacttatacaaaatacaaaacaaaaggggcaggacaatacatcaagcacaagaggagaaaagagtatgcattgttgtttaacacacattcgataaccaataaccatacatgcagttaagcttgttcttagctgcattagatgacatcacatttaacatgcaaacataaactaaaaatctaccatctccagttactcttaagggagttcagactgaagtctgcaaaaccaaccaggttcaagctacaaaacatattatttgaaacgactgccataccaatattaacttgttgggcctacaaatgaaggttaaccagattggtaggacagaaggttcaagctgtcatcaccattaagctcaagctcccatctcagagctgctgtatttgatggttggatgacatgtactgtgcctatcaacatatgccttcacaagtttttctatctttggtccacatgtggctatgtacttcgtaatcaactcttcagtagttggtacttgatttggctcaatggagtccacaaccttctcgacagattttctcactaccagtttatgagcatctttactcagattaccttttttccatattggtttgaccaactcctttatatgttctgccaaatgaaaacggaaatcccttgttttctcattgtaatcaactgcatccttttttctgtcacaagctttcaccttgatagtatcatccaggctagagctgcatcctctatcaggagcaataaagtaagcaggttcatttga

SEQ ID NO: 219854 - DNA, 1200 bp, Zea Mays
cgccatttcgttgaactgctggaagacacgtcggtgcacactagatttggattggggagaggagaagcgacagctttcggatgtgcaaatgtgcctagtaaataaaggttgataagctgtgaggttgaagctagagacgccgctgttttaagtttcttcaaggacaagggaacattaatgtcacctaaagtactttcctcgatggaggttgaagctggttttgctggcgatggcgtcggttcaaataatggaccacaagacatgtggtcacttggcgagatagatccaaaaagagcaaggttcccgtgctgcattgtctggactcctcttcctgtagtttcatggcttgctccttacatagggcatgtcggaatctgtcaggaggacggggctgtcttggattttgctggttcgaatttggtgagcgtggataattttgcttatggttcagttgccagatacctccagcttgacagaaagaagtgctgccttcccgttaatcttgcagaacacgtatgcaagcagtcttacaaccattcagaattaggagcagcgatatcatgggacgatgctctgcgatcgagcatgagacgcttccagcacaagtactacaacctgttcacctgcaactgccactcgtttgtggcgagctgcctgaaccggcttgcctacaatggctccctggagtggaatgtcttgaacgtggctgcccttgtctggtttcatggccgatgggtggacagaatgtcttccgttcggtcgttcttacctgtcctacccgtgacatgcatcggcatcttaatggctggctggtctttcctgctagggatggcagcgttctctgctctttctgattggatggtttgttttcacagtgtactgcgttaagggtttggtatgttgactggaaaaagaattactgaaagcactccattagtgcattgcagtctaggaattatggatgtaatcgctgtgctggagtcaggtaaatcactcgtgtcctcagcctcagtgattcagacctgtgcaagttcgtcaaacaaaaaaattgacctatggaggtggtctggagataatttggttcatggcaagttcgtcaatttatttagtgctgttccaaggaaaaaagaaattcttttgattcaagcatctctttctgaacttaacaacttgatgtattagttttatatttaatattcc

SEQ ID NO: 219855 - DNA, 1167 bp, Zea Mays
tgcttgcactcttacgtccacgttcggtgtattacatagtgacattgccatatgaaattgtaaagtaaataaaggttgataagctgtgaggttgaagctagagacgccgctgttttaagtttcttcaaggacaagggaacattaatgtcacctaaagtactttcctcgatggaggttgaagctggttttgctggcgatggcgtcggttcaaataatggaccacaagacatgtggtcacttggcgagatagatccaaaaagagcaaggttcccgtgctgcattgtctggactcctcttcctgtagtttcatggcttgctccttacatagggcatgtcggaatctgtcaggaggacggggctgtcttggattttgctggttcgaatttggtgagcgtggataattttgcttatggttcagttgccagatacctccagcttgacagaaagaagtgctgccttcccgttaatcttgcagaacacgtatgcaagcagtcttacaaccattcagaattaggagcagcgatatcatgggacgatgctctgcgatcgagcatgagacgcttccagcacaagtactacaacctgttcacctgcaactgccactcgtttgtggcgagctgcctgaaccggcttgcctacaatggctccctggagtggaatgtcttgaacgtggctgcccttgtctggtttcatggccgatgggtggacagaatgtcttccgttcggtcgttcttacctgtcctacccgtgacatgcatcggcatcttaatggctggctggtctttcctgctagggatggcagcgttctctgctctttctgattggatggtttgttttcacagtgtactgcgttaagggtttggtatgttgactggaaaaagaattactgaaagcactccattagtgcattgcagtctaggaattatggatgtaatcgctgtgctggagtcaggtaaatcactcgtgtcctcagcctcagtgattcagacctgtgcaagttcgtcaaacaaaaaaattgacctatggaggtggtctggagataatttggttcatggcaagttcgtcaatttatttagtgctgttccaaggaaaaaagaaattcttttgattcaagcatctctttctgaacttaacaacttgatgtattagttttatatttaatattcc

SEQ ID NO: 219856 - DNA, 822 bp, Zea Mays
aaatttgtaggtttcctatttcagaggtgttcctgtttcaatatagatgacatgttaaagttcaattctgaagtttcgtaaactgtttggtttgatttttttctgtgctgccttcccgttaatcttgcagaacacgtatgcaagcagtcttacaaccattcagaattaggagcagcgatatcatgggacgatgctctgcgatcgagcatgagacgcttccagcacaagtactacaacctgttcacctgcaactgccactcgtttgtggcgagctgcctgaaccggcttgcctacaatggctccctggagtggaatgtcttgaacgtggctgcccttgtctggtttcatggccgatgggtggacagaatgtcttccgttcggtcgttcttacctgtcctacccgtgacatgcatcggcatcttaatggctggctggtctttcctgctagggatggcagcgttctctgctctttctgattggatggtttgttttcacagtgtactgcgttaagggtttggtatgttgactggaaaaagaattactgaaagcactccattagtgcattgcagtctaggaattatggatgtaatcgctgtgctggagtcaggtaaatcactcgtgtcctcagcctcagtgattcagacctgtgcaagttcgtcaaacaaaaaaattgacctatggaggtggtctggagataatttggttcatggcaagttcgtcaatttatttagtgctgttccaaggaaaaaagaaattcttttgattcaagcatctctttctgaacttaacaacttgatgtattagttttatatttaatattcc

SEQ ID NO: 219857 - DNA, 1419 bp, Zea Mays
agatacggaggggcaaggtacgtggtgccttaccttggctaaggcactgaatctggatccctcctccacctccacgcgagcggacgacacgaagcggccatagccgcacgttgggatcccctccgctacgcctctcgatggtctccgccagcgcgccgccgccgcaggcccagtccgacgcggccgggtcgggggaggaagtgagcaagaaggtgcggaagccgtacacaatcaccaagtcccgggagagctggacggagcaggagcacgacaagttcctcgaggccctgcagctctttgatcgtgactggaagaagatagaggcttttgttggctccaagactgtcatccagattaggagccatgcacagaagtaccttttgaaggttcagaaaaatggaaccagcgaacatgtcccacctccacgaccaaagcgaaaagctgcccatccatatcctcagaaggcttccaagaatgttatgccagattttgcgggagtgtacagcttcttaggtagtgttttcgatccaagtacaagtggtcatctgcagaaacttaaggagatgaatccaattgacgttgagacggcactgttgttgatgaggaatctctccatcaatttaaccagtcctgattttgaagatcaaaggaagttgttgtccttatacagcgcttctgatggacctgggctagggagctcaagaagttcagctctagcgacgagcgcgcctttcatgtaaggtctctcggcatataatttcagttcgacagacctcaggaggatagtgcctgccctggcgtagtagcaccgatgagtgatgaaggaggcgtttgcaccttttgtgcttctcgctagctccatgccttcggctgacgattgtgaagcgtgcacccttcctggcctttcctatccccaaaagctcggccatctaggctcgtgaaatgctgcttcagatcaaggctgtccttggaaatgggaagatgaaaggagaatctgggtaatgccggttgctccctttcccattctttgttgagttcagctttctgattggtttctggtggccctcttgatacggaacttgtgcgctccgtctgagaaagcatgtgtgcaaagtttcatttgaggagttgaggcgatcatggcgctgtaaaatgcggcttatcttcccccttcagggctggtttggtggaccaaccctcaaacatttgcaattcctatgtacgtctgtagtgcatcaggtgttgttgcccacgtgtaaaaggaaaataaattcacaatgtaaaggagacttgtgcgttagcactaccatttgaatttatgaaatgtcaaagcagcccagcgagtttgtacttgccacatttttttgtcgctgtatcagcagtctggctactctggcatcgagttcgtttccaagggtg

SEQ ID NO: 219858 - DNA, 1987 bp, Zea Mays
agatacggaggggcaaggtacgtggtgccttaccttggctaaggcactgaatctggatccctcctccacctccacgcgagcggacgacacgaagcggccatagccgcacgttgggatcccctccgctacgcctctcgatggtctccgccagcgcgccgccgccgcaggcccagtccgacgcggccgggtcgggggaggaagtgagcaagaaggtgcggaagccgtacacaatcaccaagtcccgggagagctggacggagcaggagcacgacaagttcctcgaggccctgcagctctttgatcgtgactggaagaagatagaggcttttgttggctccaagactgtcatccagattaggagccatgcacagaagtaccttttgaaggttcagaaaaatggaaccagcgaacatgtcccacctccacgaccaaagcgaaaagctgcccatccatatcctcagaaggcttccaagaatgattcatcttccatccataggaactctggcatgaacgtgcctgtttcttcatgggctcatagttccatcccacaagctgttgcttcatcaatggtgaaagatttaggtgctggaacaccaggttcaaacaatttttgctcaagtagtactgaaggccttccaagaacttggcaacctggtgaaacaaatgatccaataaatcaaattccgtcactccgccgtcagtacctcatgatatttctgataatcatcttgtagtgcaaaatacttactccgattctgtccatctctactatttctaagaattatgtcttaaccatcctcctgtgcatcttttcttgtgaatttgtaagcttcaatctcaaatccgctggccccttcttttagaatgaaccgaacctccaatattctcttgatgatgcttaacatacagagaaacggtgtaacacaaaacagcacaatccatttctttgtactgtttctttttcaaatattttactgttttcaatattgaatctatgtcttgaatgaattgctagcttatctaattcatatttacattcttgacatttcaattatgtctttccaatgtttgatatagttatgccagattttgcgggagtgtacagcttcttaggtagtgttttcgatccaagtacaagtggtcatctgcagaaacttaaggagatgaatccaattgacgttgagacggcactgttgttgatgaggaatctctccatcaatttaaccagtcctgattttgaagatcaagtcttgccaattcgtgatgccagtactcagcagagcaggcctgaagtccgaaccactatcttatagcatagactcttatctcctgacacccacaaagggatgaaagtgaggaagttgttgtccttatacagcgcttctgatggacctgggctagggagctcaagaagttcagctctagcgacgagcgcgcctttcatgtaaggaagcgtgcacccttcctggcctttcctatccccaaaagctcggccatctaggctcgtgaaatgctgcttcagatcaaggctgtccttggaaatgggaagatgaaaggagaatctgggtaatgccggttgctccctttcccattctttgttgagttcagctttctgattggtttctggtggccctcttgatacggaacttgtgcgctccgtctgagaaagcatgtgtgcaaagtttcatttgaggagttgaggcgatcatggcgctgtaaaatgcggcttatcttcccccttcagggctggtttggtggaccaaccctcaaacatttgcaattcctatgtacgtctgtagtgcatcaggtgttgttgcccacgtgtaaaaggaaaataaattcacaatgtaaaggagacttgtgcgttagcactaccatttgaatttatgaaatgtcaaagcagcccagcgagtttgtacttgccacatttttttgtcgctgtatcagcagtctggctactctggcatcgagttcgtttccaagggtg

SEQ ID NO: 219859 - DNA, 1794 bp, Zea Mays
gttaaaccaacaagatgttgttcgaggcgttcccctcctccacgcaaccttctcccctccagatccaggattgccgggctccttgactcgttacctcgcgcgccctcggtgagctactttgtttcgatttagcgacaaatcagtttgcttcatgttgcgcaggcttagatctgaatgccggattcttcgtcttacggcttgaatcgagctgggaggctgtggatctgagcacgggaggtacaacaaatccgcgtgttctagagctagcgaaatcgcaaggctattagggttcctttcggagcgcgtctgaagcgatgatggctgaagtcggcggtgggatcgggatcttctctgccctgctccactcgggatgatgaatctgctgcgctgataattattggatgaatttcgataattattagatctaagagatgcgccgacttgaagaggcgaggtaaggtgcaacatgtataagacgtgacatgctatagaggcctttgccatggtgggtgcgctcgcatggcaggccacggtaataaaagaagatatttttgtgtcctgggggtggagatcgcacgggggattgttttttggccccgggttctcctccctcgtggtgttccgtgtccctatgtgcattggtctttgcgtggtttgcgatctcagctcacctacacgcttcggatttctgcatctaacacggagatctacaacaaaaacaaacatggagctacaacgagattcttaaggtacaatcgttaatttactgtaacaattaagtttcttttctcatctctgacgccacacttgtatccttatgttctctctctgcacattcaaagaaaccgttaaacccccatgaataatgacattcgacgtccactttgcccagctgtgttgaatttaatagttcaacaatttcagactcccatgaactcagtgaaacaagcgttactgatgtcctaagtgaaattttatgtcgcacttaagatggcgctgcgtctttatttcgttgtatattttattttcaacaactccaatctgattatgtcgtggcatttcatttgtatttatcatgtcaattgggatatttggtccttgtaagcttttggcatgtttgttagttaagccattgcaattgttggacttgtggagggttgcaaaatcgcagtgattctactattcatcatgtcatcatgtgaaatcttctaccacggagcacgtcaatcgtggctgggctgatggacgactgtgctgatggaactgattcgttacgtgggttgaagattttgtgccaaatatgcgatctggttggttactccgccctgctgacgttgttttagcccagagatactcatgttgttcttggcctttgaggttggacaccatagaagaaggagatgcttgacgtgtccaagagtcctcatctcattaagggctagtttggaaactcataccccctctagaattggagaggatttgagtttccaaactagtttatcgatgttttaaactagtaccaacgagtaaatttgtgtatgcccgttctggatccagatggtgtgctcagtgtgcgcaagatttatattggtcggtagaacgtccctacttccagtctttactggcttgcggtaccgacacctggttgttcgtagtagggttacaagctagagagagggggaagagttccaagtcttattctactaaaggatctatgtatcaagtgttggttctcgggttcagtctccccttttgtcaggccgatcctcctccttttatagaccaaggagagga

SEQ ID NO: 219860 - DNA, 1818 bp, Zea Mays
gttaaaccaacaagatgttgttcgaggcgttcccctcctccacgcaaccttctcccctccagatccaggattgccgggctccttgactcgttacctcgcgcgccctcggtgagctactttgtttcgatttagcgacaaatcagtttgcttcatgttgcgcaggcttagatctgaatgccggattcttcgtcttacggcttgaatcgagctgggaggctgtggatctgagcacgggaggtacaacaaatccgcgtgtatgacgagttggatcggcaccggttctagagctagcgaaatcgcaaggctattagggttcctttcggagcgcgtctgaagcgatgatggctgaagtcggcggtgggatcgggatcttctctgccctgctccactcgggatgatgaatctgctgcgctgataattattggatgaatttcgataattattagatctaagagatgcgccgacttgaagaggcgaggtaaggtgcaacatgtataagacgtgacatgctatagaggcctttgccatggtgggtgcgctcgcatggcaggccacggtaataaaagaagatatttttgtgtcctgggggtggagatcgcacgggggattgttttttggccccgggttctcctccctcgtggtgttccgtgtccctatgtgcattggtctttgcgtggtttgcgatctcagctcacctacacgcttcggatttctgcatctaacacggagatctacaacaaaaacaaacatggagctacaacgagattcttaaggtacaatcgttaatttactgtaacaattaagtttcttttctcatctctgacgccacacttgtatccttatgttctctctctgcacattcaaagaaaccgttaaacccccatgaataatgacattcgacgtccactttgcccagctgtgttgaatttaatagttcaacaatttcagactcccatgaactcagtgaaacaagcgttactgatgtcctaagtgaaattttatgtcgcacttaagatggcgctgcgtctttatttcgttgtatattttattttcaacaactccaatctgattatgtcgtggcatttcatttgtatttatcatgtcaattgggatatttggtccttgtaagcttttggcatgtttgttagttaagccattgcaattgttggacttgtggagggttgcaaaatcgcagtgattctactattcatcatgtcatcatgtgaaatcttctaccacggagcacgtcaatcgtggctgggctgatggacgactgtgctgatggaactgattcgttacgtgggttgaagattttgtgccaaatatgcgatctggttggttactccgccctgctgacgttgttttagcccagagatactcatgttgttcttggcctttgaggttggacaccatagaagaaggagatgcttgacgtgtccaagagtcctcatctcattaagggctagtttggaaactcataccccctctagaattggagaggatttgagtttccaaactagtttatcgatgttttaaactagtaccaacgagtaaatttgtgtatgcccgttctggatccagatggtgtgctcagtgtgcgcaagatttatattggtcggtagaacgtccctacttccagtctttactggcttgcggtaccgacacctggttgttcgtagtagggttacaagctagagagagggggaagagttccaagtcttattctactaaaggatctatgtatcaagtgttggttctcgggttcagtctccccttttgtcaggccgatcctcctccttttatagaccaaggagagga

SEQ ID NO: 219861 - DNA, 3755 bp, Zea Mays
aaaccaacaagatgttgttcgaggcgttcccctcctccacgcaaccttctcccctccagatccaggattgccgggctccttgactcgttacctcgcgcgccctcggtgagctactttgtttcgatttagcgacaaatcagtttgcttcatgttgcgcaggcttagatctgaatgccggattcttcgtcttacggcttgaatcgagctgggaggctgtggatctgagcacgggaggttctagagctagcgaaatcgcaaggctattagggttcctttcggagcgcgtctgaagcgatgatggctgaagtcggcggtgggatcgggatcttctctgccctgctccactcgggatgatgaatctgctgcgctgataattattggatgaatttcgataattattagatctaagagatgcgccgacttgaagaggcgaggtaaggtgcaacatgtataagacgtgacatgctatagaggcctttgccatggtgggtgcgctcgcatggcaggccacggtaataaaagaagatatttttgtgtcctgggggtggagatcgcacgggggattgttttttggccccgggttctcctccctcgtggtgttccgtgtccctatgtgcattggtctttgcgtggtttgcgatctcagctcacctacacgcttcggatttctgcatctaacacggagatctacaacaaaaacaaacatggagctacaacgagattcttaaggtacaatcgttaatttactgtaacaattaagtttcttttctcatctctgacgccacacttgtatccttatgttctctctctgcacattcaaagaaaccgttaaacccccatgaataatgacattcgacgtccactttgcccagctgtgttgaatttaatagttcaacaatttcagactcccatgaactcagtgaaacaagcgttactgatgtcctaagtgaaattttatgtcgcacttaagatggcgctgcgtctttatttcgttgtatattttattttcaacaactccaatctgattatgtcgtggcatttcatttgtatttatcatgtcaattgggatatttggtccttgtaagcttttggcatgtttgttagttaagccattgcaattgttggacttgtggagggttgcaaaatcgcagtgattctactattcatcatgtcatcatgtgaaatcttctaccacggagcacgtcaatcgtggctgggctgatggacgactgtgctgatggaactgattcgttacgtgggttgaagattttgtgccaaatatgcgatctggttggttactccgccctgctgacgttgttttagcccaggtgtttctgctgctcattccttgcattttttatggcactgtacatacaattggacaacctaatttttggcagttcaactcatttagaagttagaagggtttgagaaacattctcccctagaaatacatggaggtgtatctgatgattgttttttttgttacaaagtttcctagtttaatttgtatgatattctggaaattcattgtgctgtagggaggattttcagtaagcgctagtttgggttagatatatagatggattatgataagggctagctatatagattatgataatctatatactggtaagggcttatggattgtaataatctatatgtctagcccttactgaaatgtaatatagattatgggtttaggcctagcttatggattatataagcacctattatgtagattacagtgtttacagattgaaacggtagaatgggcgagttctgcatttctattaggactagtttttaaactcgaattctttttggaattaccctcaaatcaaacaagctcttagggtggttaggagtggattgaagagaatttgaggctagtcaaaattgaatagaaaagaatttaattttcttcaatcttctctaatgcacatgcaactgaacacggccttgattggtgcctcaaattttagaccatattggccatcattgtattctatttttagtagattatgcatatgcatatactcagtggagtttgaaatatgagtgagataggtaatggatatgggaggtgctggagatatagcattaatacctaaaaattattctcataagttaaggctcctgaatgttgatgcatgtgtaaagggccgttggacccttcatttcggaggaattagagtgcacttaataaagtaggctatttagtgtaaaatttgatattccatcattttcaaagttgaaatataagcttggagggataaaaattggtctctatatttttatactataatttatagtaaaatttgatactccattttccaaagttcaaatataagcttttcttcaattcattaagtggagggataaaatttggtttctatatttttatactacaatttataataacgctccaactaagggcctatgtggttcttggtgttaaaatttagcactacatttttaacacttagattgaaatatgagtgttaaaaggtgctacaagtgaagtgctaaattttagcatctaatagaactttagctccaaagtgtgctaacctttagtacttgttaaagtttagcatataacatccaagcatgtcttcagtatttcctctatatagccaacaatagtataaagtagtttctctatattgccaacaacagtacaatatgtatattctgcataaaactattgtcttgattgataagtgcttaaattatgtttaactcacttggaagccaaaaaaagagtatcccagttcttaattttgtgctagagttttttttgtatatataagaatgatatgcactggatattataggctcggaatttgctgtcagattttatattactcatcaaagaagacatgacaactctatgcaaaataaacgtctcaaataaactgatttctgcaaaaaaaaatgaacattaaaatgacctagttttccaaagctaaacgtcattttgctggatgttgtagtgtagatctcagagtctgcttgttgagatgtggatctttcctcatcacggtgaggtcctccgttgactagtagcgtatgcgttgctgcgtgctgtctcggatggatggtggttcaattccaccaagattctttacttaaaatttctgctcagtagagatcctaccatgcaatcgattgcttcaagatgtttttcttttttcttagagacattattcgttttagtattttagtagattatttaacggatgatatatttggtgcacatagaagtttagtgcatatggtgtatatattaaatcatcaccatccatcttggatctaacgtctctggttggttatttcaatttataaataacaaccttccactactacatcccaccacgtcgaagggtgttcttagtaaaatatatcaacgttagatctaaaatgagtgatgctgatttaatatgtgcatcatgtgcaatagatatgttttctatttaacgtatgtcatggttgtgtcactttattcagcatattataatgcagggtaggtacgttcaaccgtagtgacagataaagaagtatgcaattaggtagaatgtagttggtatatgatatagctatttgtaatttataatgcttgcgtgtacatctgtatgtttaggtatggctacatgaatagtggctttgggtgtgtttgtggctttagatgtcgtgacactgcatccttttgactgtaatgtcatctatcacatttagtatgattaacaaaa

SEQ ID NO: 219862 - DNA, 1099 bp, Zea Mays
tgtgttcatgcacatgtgttactgcatttcatcaatgcctcacatgctaacctgaatgcacggaagcgcatgaactccaaccggtcgtaccagtatgacccactgaacatggactttgtaccacacatcgaagagtcgtgcaagatcgttatgtcatcttatggagttttcaagaagaaagcaagagaacagggatggataatgtctgaatcacttcttaacccgggacgagcaagattgtgtggagcagtaccacaatgatccaagcctttttcgtttttcatgatgaagaggatgagttctttttcatacaattggtatgtgagtcagcgaaactaacttaagtcgacaatcagctcaagtacataaaatgcaccaaattgtcatgagtcctgatcctgcaggaacagtacttgaacctggagcgttagatcgcaacaaccaccatgacaggggggtgctgactcaggaagggtccgtgaaggctccaaactgcggaagatcgactaacaatcagctcttgtatattcttttggtattgtataatggaggcggctatctttcctaatgttgaccggactaagtggtcatcggctgatttgttttgactatctgacaacaatcccccctgctaaccttgcggtatcgtggtcctcatttccctaatttggggagcggtacatgccagttttcgtaaagaatatcagtgtttatatgcaaattgatttgatcatttgtctcaggcctgtttggaacaagggagatgttttctgcgtatgtttcgtgaaattaaactgattcctatgattttttgcactattcctacgaattactgcacttcaaacaccctcggatgtctcgatatatatagagatagtgctctgttttgttagtcatcgtccatgatgggctggttaccgtggctgttcttacttttctatttaggaccagtttagcggggctatgactctaaaaactctggctttagtttttgtagagaagcagcttcttcgagagaagttagtaggtttaaaatgtccattgtgaccctacgtgtctgacttgtgtatacaaaagagaaatatgatatgttgaggaa

SEQ ID NO: 219863 - DNA, 2177 bp, Zea Mays
atgggcgcagcgggacgtgcagtgcggagggatgaagagcggtcagcggcggctgggcgcgtgcgaagatatgctacgaagaagatcggcggaggacaacatggaagatcggcgaaggacactaagcttatcgtgtacatcccaagtggaaatcatgtcctttataagatcatatgttgtgcccgaaggctttccagatagtgtcacaccttcatatgttccatacatgacatggagagcattgaagcatttctttggtggagcaatgggtgtgtttacaacaaggaccttgctcaactctgttggagtctcccaaagcagggctgcatctggtgctgtggctatcaactggattctcaaggatggggctgggcgtgttggaaagatgctttttgcccgccaagggaagaaatttgattatgacctgaagcagctacgcttttctggtgatctcttgatggagttaggagctgggatagaattagctactgcagctttcccacagcttttcctaccaatggcatgcatagcaaatgttgttaagaatgttgctgctgtcacttccacctctactcgaacaccaatttacaaggcgtatgcaaaaggagaaaacatcggtgatgttactgctaaaggagaaagtgttggaaacattgctgatctgttgggaactggaatgagcatactaatctcaaagagcaatccatcactggtaacttcatttgccttcttgtcgtgtggatatcttctcagttcatatcatgaggtgagatctgttgtactaaacaccctgaatagggcaaggttcactgtggctgtggattctttcatcaggactgggtatgtaccctcgctgaaggatggaaactcacaagagacaatatttaatccaccttggcgacatgagccagttgcaataggatcaagatttggagatgcgtttcaagaacctgcttcgtttcttgctataaaacctttgttcgaggatgagaggtatattgttacatataacccaacaaaggacaaggtatatgctttgctcaaggaccaagcaaagccagatgacattctcaaagctgcttttcatgcacatgtgttactgcatttcatcaatgcctcacatgctaacctgaatgcacggaagcgcatgaactccaaccggtcgtaccagtatgacccactgaacatggactttgtaccacacatcgaagagtcgtgcaagatcgttatgtcatcttatggagttttcaagaagaaagcaagagaacagggatggataatgtctgaatcacttcttaacccgggacgagcaagattgtgtggagcagtaccacaatgatccaagcctttttcgtttttcatgatgaagaggatgagttctttttcatacaattggtatgtgagtcagcgaaactaacttaagtcgacaatcagctcaagtacataaaatgcaccaaattgtcatgagtcctgatcctgcaggaacagtacttgaacctggagcgttagatcgcaacaaccaccatgacaggggggtgctgactcaggaagggtccgtgaaggctccaaactgcggaagatcgactaacaatcagctcttgtatattcttttggtattgtataatggaggcggctatctttcctaatgttgaccggactaagtggtcatcggctgatttgttttgactatctgacaacaatcccccctgctaaccttgcggtatcgtggtcctcatttccctaatttggggagcggtacatgccagttttcgtaaagaatatcagtgtttatatgcaaattgatttgatcatttgtctcaggcctgtttggaacaagggagatgttttctgcgtatgtttcgtgaaattaaactgattcctatgattttttgcactattcctacgaattactgcacttcaaacaccctcggatgtctcgatatatatagagatagtgctctgttttgttagtcatcgtccatgatgggctggttaccgtggctgttcttacttttctatttaggaccagtttagcggggctatgactctaaaaactctggctttagtttttgtagagaagcagcttcttcgagagaagttagtaggtttaaaatgtccattgtgaccctacgtgtctgacttgtgtatacaaaagagaaatatgatatgttgaggaa

SEQ ID NO: 219864 - DNA, 2242 bp, Zea Mays
tgattgagggagaaaatgcagggggtaggaggaggaaaaagttcacagaacggggacatatttttgtacaagttcatctggcagatcattcaaatcttgcaacagaatccaaagttgagccggtggctaatgggatgaatggacatacagatgagaaaactgctgtagcaaccagtgtttctctcaacacactaagtggttttgaagctgctgatagccgaaatagttgggaaaacttcaagcttttgctttcttatgagaaaaatgagatgccctatgaaagtgtatctgataaagttactcttgtagtaagtgtggaagatacaggaataggtataccattggatgcacaagccaaggtgttcacacctttcatgcaggctgatagttcgacttccaggacatatggtggtactggaattggattgagcatcagcaaatgtcttgttgaactaatgggtggtcagataaactttgtcagccgaccacatgttgggagtacgttcacatttactgcggttctcaaaagatgtgacagaagcgctattggtgacagtaagcctgttatgttgcatcctcttccatccagtttcaaaggtttatctgcactattggttgatagaagaccagtaagagctactgtaactaagtatcacttgcaaaggctgggaattgcctgtgatgttgttgcaaccattgaactggctcttggtgtgctgtccgggagaaatggcagttccctaaccagtatgaagcaaccatgcatgttattgatcgagagtgattcatggggcttcaatattgatgtttctttacgatctagactcctggagatgaagcagaatggtcacacacatgtattacccaaaatcatccttcttgcagctgcagaatcgggcaaactcaaagaacactatgcagttgattctgtgatcacgaaacccctgaaagcaagcgcacttgccgcttgtctgttccaaacacttggcatcaaacagtcaagcaacgagagaagtgacaactcaggttctctttacgggttgcttcttggcaagaacatattggtggttgatgacaacaaggtaaatcttagagtggctgctggcacgttaaagaaatttggagcaaaggtggagtgcgtggagagtggaaaagatgccctcgccctcctacaggtcccatataagtttcatctttgtctcatggacattcagatgcccgaaatggatgggtttgaggctaccaagcaaataagggcaatggaagcgaaggcaaatgagcaggcagtcgcctgtgacaattcagaaatagatggtgcgacaagggcagcaagatggcgcctgcctgttcttgcaatgaccgccgatgtcatccaggccacccatgaagagtgcacgaagtgcggtatggatgggtacgtcacaaagcccttcgaggagaagcagctcttccaggcgttgcagaagttcttggaccccggcatgtcctgctaacgccgaagtgatgcgttggaggtgaggcactattctcctctattctgtaattccctaaccttggccgcaacctgatccccaagaaagaccgtgcagcgcgggctgctcgtcgatcatgccagcggggaacagcaggcagacaaggcagcacgcaccacgggccttcgctggtctgcctgcctgtgcaggcgtcgtgtaaatgtattgtatttgcagggatactgtttacagcgctagtatgccccgtgccacaatgtccgagctacctgtggctgatgcacgttgcgcataggtggttttttttgtacagcttccaccatttttgtgctccagatcagaccaccgaaggaggcaagcatgctcgctggtgcagtgcagcactggaaggaaaacctgacttcctgagagtagatttttgctgtttaattgcattgggatttatgatgtattataatcagataaatgtgtgatgtaagctggcgtaattggcccaatgcatttccattgttatggatgagttgaaatggcattggttagacacttagactacactattgggtgtatgcccttccacagttccattttccctgcaaaatatcaaaatgtgcaaagggatagtggaatcatggcttgaattatatgaattttctttggtgtttttttcccgtatcgaagctcgactataacattagaagaaagcatctggaggcatgtttaagttttggttattacacactataaaatacaag

SEQ ID NO: 219865 - DNA, 3545 bp, Zea Mays
atgccacttcttaaatggagtttttctctacttggtttttttatgtgcccctgcggcctgcgcgcagtgcgcacgcgcgtaatttgccgatacagattactgttcggccgttttgtttgtcggctggaggctttactttcggtcgatttgtttgttctgcagaacacgttcgcggactacaccgccaggacgtcgttcgagcggccgctgctgagcggggtggcgtacgcgcagcgggtggtgcacgccgacagggagggcttcgagcgccaccaggggtggatcatcaagaccatgaagcacgagccgtccccggcgcaggacgagtacgcgcccgttgtatactcgcaggagaccgtctcctacatcgaggggctcgacatgatgtccggcgaggaggaccgtgagaacattctgaggtcaagagcatcggggaaggcagttctcactcgaccattccggctcatgtcgaatcacctgggtgtcgtattgacttttcctgtctatcatgcggatcttccttctgatgccaaggaggaggatcgtgttgctgccaccgcaggataccttgggggagcatttgatgtagaatcattagtggaaaatttgttgaggcagctagctggcaatcaggaattggtggtaaatgtttatgatgtcacaaacatttcgaaccctcttgtcatgtatggatcagaagttcctcttggcaacccctcaccatcgcacatctgcatgctagattttggtgatccattcagaaagcatcatatggtttgcagaaacaagcctcatgtcccatggtctgcaatttctaccccatctggtgtctttgtcatatgtatgcttgtggggtacatcgcgggtgccgcttggagtcgttatgataatgttaaggaagattgccggaaaatggaggagctgaaaaaacaggcggaagcagccgatgttgctaaatctcagttccttgcaactgtttctcatgagatcagaacgcccatgaatggagttctaggaatgcttgatatgctgttagacactgacctaacctcaactcagagggattttgcacaaaccgctcaagtctgtggaaaggctttaatatcgctaatcaatgaagtgcttgacagagcgaaaattgaagccagaaagttggatcttgaatctgtaccatttgatctgagatccatccttgatgatgtcatctcattattttcttcaaagtcaagagagaagggaattgagcttgatgtatatgtctctgaaagagttcccgaaatcttgttgggtgatcctggaaggtttcgacagataattacaaatttagtgggcaactcaattaagttcacagaacggggacatatttttgtacaagttcatctggcagatcattcaaatcttgcaacagaatccaaagttgagccggtggctaatgggatgaatggacatacagatgagaaaactgctgtagcaaccagtgtttctctcaacacactaagtggttttgaagctgctgatagccgaaatagttgggaaaacttcaagcttttgctttcttatgagaaaaatgagatgccctatgaaagtgtatctgataaagttactcttgtagtaagtgtggaagatacaggaataggtataccattggatgcacaagccaaggtgttcacacctttcatgcaggctgatagttcgacttccaggacatatggtggtactggaattggattgagcatcagcaaatgtcttgttgaactaatgggtggtcagataaactttgtcagccgaccacatgttgggagtacgttcacatttactgcggttctcaaaagatgtgacagaagcgctattggtgacagtaagcctgttatgttgcatcctcttccatccagtttcaaaggtttatctgcactattggttgatagaagaccagtaagagctactgtaactaagtatcacttgcaaaggctgggaattgcctgtgatgttgttgcaaccattgaactggctcttggtgtgctgtccgggagaaatggcagttccctaaccagtatgaagcaaccatgcatgttattgatcgagagtgattcatggggcttcaatattgatgtttctttacgatctagactcctggagatgaagcagaatggtcacacacatgtattacccaaaatcatccttcttgcagctgcagaatcgggcaaactcaaagaacactatgcagttgattctgtgatcacgaaacccctgaaagcaagcgcacttgccgcttgtctgttccaaacacttggcatcaaacagtcaagcaacgagagaagtgacaactcaggttctctttacgggttgcttcttggcaagaacatattggtggttgatgacaacaaggtaaatcttagagtggctgctggcacgttaaagaaatttggagcaaaggtggagtgcgtggagagtggaaaagatgccctcgccctcctacaggtcccatataagtttcatctttgtctcatggacattcagatgcccgaaatggatgggtttgaggctaccaagcaaataagggcaatggaagcgaaggcaaatgagcaggcagtcgcctgtgacaattcagaaatagatggtgcgacaagggcagcaagatggcgcctgcctgttcttgcaatgaccgccgatgtcatccaggccacccatgaagagtgcacgaagtgcggtatggatgggtacgtcacaaagcccttcgaggagaagcagctcttccaggcgttgcagaagttcttggaccccggcatgtcctgctaacgccgaagtgatgcgttggaggtgaggcactattctcctctattctgtaattccctaaccttggccgcaacctgatccccaagaaagaccgtgcagcgcgggctgctcgtcgatcatgccagcggggaacagcaggcagacaaggcagcacgcaccacgggccttcgctggtctgcctgcctgtgcaggcgtcgtgtaaatgtattgtatttgcagggatactgtttacagcgctagtatgccccgtgccacaatgtccgagctacctgtggctgatgcacgttgcgcataggtggttttttttgtacagcttccaccatttttgtgctccagatcagaccaccgaaggaggcaagcatgctcgctggtgcagtgcagcactggaaggaaaacctgacttcctgagagtagatttttgctgtttaattgcattgggatttatgatgtattataatcagataaatgtgtgatgtaagctggcgtaattggcccaatgcatttccattgttatggatgagttgaaatggcattggttagacacttagactacactattgggtgtatgcccttccacagttccattttccctgcaaaatatcaaaatgtgcaaagggatagtggaatcatggcttgaattatatgaattttctttggtgtttttttcccgtatcgaagctcgactataacattagaagaaagcatctggaggcatgtttaagttttggttattacacactataaaatacaag

SEQ ID NO: 219866 - DNA, 3556 bp, Zea Mays
atgccacttcttaaatggagtttttctctacttggtttttttatgtgcccctgcggcctgcgcgcagtgcgcacgcgcgtaatttgccgatacagattactgttcggccgttttgtttgtcggctggaggctttactttcggtcgatttgtttgttctgcagaacacgttcgcggactacaccgccaggacgtcgttcgagcggccgctgctgagcggggtggcgtacgcgcagcgggtggtgcacgccgacagggagggcttcgagcgccaccaggggtggatcatcaagaccatgaagcacgagccgtccccggcgcaggacgagtacgcgcccgttgtatactcgcaggagaccgtctcctacatcgaggggctcgacatgatgtccggcgaggaggaccgtgagaacattctgaggtcaagagcatcggggaaggcagttctcactcgaccattccggctcatgtcgaatcacctgggtgtcgtattgacttttcctgtctatcatgcggatcttccttctgatgccaaggaggaggatcgtgttgctgccaccgcagggtgagataccttgggggagcatttgatgtagaatcattagtggaaaatttgttgaggcagctagctggcaatcaggaattggtggtaaatgtttatgatgtcacaaacatttcgaaccctcttgtcatgtatggatcagaagttcctcttggcaacccctcaccatcgcacatctgcatgctagattttggtgatccattcagaaagcatcatatggtttgcagatacagaaacaagcctcatgtcccatggtctgcaatttctaccccatctggtgtctttgtcatatgtatgcttgtggggtacatcgcgggtgccgcttggagtcgttatgataatgttaaggaagattgccggaaaatggaggagctgaaaaaacaggcggaagcagccgatgttgctaaatctcagttccttgcaactgtttctcatgagatcagaacgcccatgaatggagttctaggaatgcttgatatgctgttagacactgacctaacctcaactcagagggattttgcacaaaccgctcaagtctgtggaaaggctttaatatcgctaatcaatgaagtgcttgacagagcgaaaattgaagccagaaagttggatcttgaatctgtaccatttgatctgagatccatccttgatgatgtcatctcattattttcttcaaagtcaagagagaagggaattgagcttgatgtatatgtctctgaaagagttcccgaaatcttgttgggtgatcctggaaggtttcgacagataattacaaatttagtgggcaactcaattaagttcacagaacggggacatatttttgtacaagttcatctggcagatcattcaaatcttgcaacagaatccaaagttgagccggtggctaatgggatgaatggacatacagatgagaaaactgctgtagcaaccagtgtttctctcaacacactaagtggttttgaagctgctgatagccgaaatagttgggaaaacttcaagcttttgctttcttatgagaaaaatgagatgccctatgaaagtgtatctgataaagttactcttgtagtaagtgtggaagatacaggaataggtataccattggatgcacaagccaaggtgttcacacctttcatgcaggctgatagttcgacttccaggacatatggtggtactggaattggattgagcatcagcaaatgtcttgttgaactaatgggtggtcagataaactttgtcagccgaccacatgttgggagtacgttcacatttactgcggttctcaaaagatgtgacagaagcgctattggtgacagtaagcctgttatgttgcatcctcttccatccagtttcaaaggtttatctgcactattggttgatagaagaccagtaagagctactgtaactaagtatcacttgcaaaggctgggaattgcctgtgatgttgttgcaaccattgaactggctcttggtgtgctgtccgggagaaatggcagttccctaaccagtatgaagcaaccatgcatgttattgatcgagagtgattcatggggcttcaatattgatgtttctttacgatctagactcctggagatgaagcagaatggtcacacacatgtattacccaaaatcatccttcttgcagctgcagaatcgggcaaactcaaagaacactatgcagttgattctgtgatcacgaaacccctgaaagcaagcgcacttgccgcttgtctgttccaaacacttggcatcaaacagtcaagcaacgagagaagtgacaactcaggttctctttacgggttgcttcttggcaagaacatattggtggttgatgacaacaaggtaaatcttagagtggctgctggcacgttaaagaaatttggagcaaaggtggagtgcgtggagagtggaaaagatgccctcgccctcctacaggtcccatataagtttcatctttgtctcatggacattcagatgcccgaaatggatgggtttgaggctaccaagcaaataagggcaatggaagcgaaggcaaatgagcaggcagtcgcctgtgacaattcagaaatagatggtgcgacaagggcagcaagatggcgcctgcctgttcttgcaatgaccgccgatgtcatccaggccacccatgaagagtgcacgaagtgcggtatggatgggtacgtcacaaagcccttcgaggagaagcagctcttccaggcgttgcagaagttcttggaccccggcatgtcctgctaacgccgaagtgatgcgttggaggtgaggcactattctcctctattctgtaattccctaaccttggccgcaacctgatccccaagaaagaccgtgcagcgcgggctgctcgtcgatcatgccagcggggaacagcaggcagacaaggcagcacgcaccacgggccttcgctggtctgcctgcctgtgcaggcgtcgtgtaaatgtattgtatttgcagggatactgtttacagcgctagtatgccccgtgccacaatgtccgagctacctgtggctgatgcacgttgcgcataggtggttttttttgtacagcttccaccatttttgtgctccagatcagaccaccgaaggaggcaagcatgctcgctggtgcagtgcagcactggaaggaaaacctgacttcctgagagtagatttttgctgtttaattgcattgggatttatgatgtattataatcagataaatgtgtgatgtaagctggcgtaattggcccaatgcatttccattgttatggatgagttgaaatggcattggttagacacttagactacactattgggtgtatgcccttccacagttccattttccctgcaaaatatcaaaatgtgcaaagggatagtggaatcatggcttgaattatatgaattttctttggtgtttttttcccgtatcgaagctcgactataacattagaagaaagcatctggaggcatgtttaagttttggttattacacactataaaatacaag

SEQ ID NO: 219867 - DNA, 3681 bp, Zea Mays
cgagctctggctttccgctctgcgcgcgcagttaattgcatgtctcgccgtctctggaaatccttgctgctcctcccattgccataacacctcgaccatgttaccatgtactagtacgtagtagtacctgctctgcctctgcctctgctgctgctttcacttcatttaattactgtcaagtccatggttcccttgcgcgcagaccatgccacttcttaaatggagtttttctctacttggtttttttatgtgcccctgcggcctgcgcgcagtgcgcacgcgcgtaatttgccgatacagattactgttcggccgttttgtttgtcggctggaggctttactttcggtcgatttgtttgttctgcagaacacgttcgcggactacaccgccaggacgtcgttcgagcggccgctgctgagcggggtggcgtacgcgcagcgggtggtgcacgccgacagggagggcttcgagcgccaccaggggtggatcatcaagaccatgaagcacgagccgtccccggcgcaggacgagtacgcgcccgttgtatactcgcaggagaccgtctcctacatcgaggggctcgacatgatgtccggcgaggaggaccgtgagaacattctgaggtcaagagcatcggggaaggcagttctcactcgaccattccggctcatgtcgaatcacctgggtgtcgtattgacttttcctgtctatcatgcggatcttccttctgatgccaaggaggaggatcgtgttgctgccaccgcaggataccttgggggagcatttgatgtagaatcattagtggaaaatttgttgaggcagctagctggcaatcaggaattggtggtaaatgtttatgatgtcacaaacatttcgaaccctcttgtcatgtatggatcagaagttcctcttggcaacccctcaccatcgcacatctgcatgctagattttggtgatccattcagaaagcatcatatggtttgcagatacagaaacaagcctcatgtcccatggtctgcaatttctaccccatctggtgtctttgtcatatgtatgcttgtggggtacatcgcgggtgccgcttggagtcgttatgataatgttaaggaagattgccggaaaatggaggagctgaaaaaacaggcggaagcagccgatgttgctaaatctcagttccttgcaactgtttctcatgagatcagaacgcccatgaatggagttctaggaatgcttgatatgctgttagacactgacctaacctcaactcagagggattttgcacaaaccgctcaagtctgtggaaaggctttaatatcgctaatcaatgaagtgcttgacagagcgaaaattgaagccagaaagttggatcttgaatctgtaccatttgatctgagatccatccttgatgatgtcatctcattattttcttcaaagtcaagagagaagggaattgagcttgatgtatatgtctctgaaagagttcccgaaatcttgttgggtgatcctggaaggtttcgacagataattacaaatttagtgggcaactcaattaagttcacagaacggggacatatttttgtacaagttcatctggcagatcattcaaatcttgcaacagaatccaaagttgagccggtggctaatgggatgaatggacatacagatgagaaaactgctgtagcaaccagtgtttctctcaacacactaagtggttttgaagctgctgatagccgaaatagttgggaaaacttcaagcttttgctttcttatgagaaaaatgagatgccctatgaaagtgtatctgataaagttactcttgtagtaagtgtggaagatacaggaataggtataccattggatgcacaagccaaggtgttcacacctttcatgcaggctgatagttcgacttccaggacatatggtggtactggaattggattgagcatcagcaaatgtcttgttgaactaatgggtggtcagataaactttgtcagccgaccacatgttgggagtacgttcacatttactgcggttctcaaaagatgtgacagaagcgctattggtgacagtaagcctgttatgttgcatcctcttccatccagtttcaaaggtttatctgcactattggttgatagaagaccagtaagagctactgtaactaagtatcacttgcaaaggctgggaattgcctgtgatgttgttgcaaccattgaactggctcttggtgtgctgtccgggagaaatggcagttccctaaccagtatgaagcaaccatgcatgttattgatcgagagtgattcatggggcttcaatattgatgtttctttacgatctagactcctggagatgaagcagaatggtcacacacatgtattacccaaaatcatccttcttgcagctgcagaatcgggcaaactcaaagaacactatgcagttgattctgtgatcacgaaacccctgaaagcaagcgcacttgccgcttgtctgttccaaacacttggcatcaaacagtcaagcaacgagagaagtgacaactcaggttctctttacgggttgcttcttggcaagaacatattggtggttgatgacaacaaggtaaatcttagagtggctgctggcacgttaaagaaatttggagcaaaggtggagtgcgtggagagtggaaaagatgccctcgccctcctacaggtcccatataagtttcatctttgtctcatggacattcagatgcccgaaatggatgggtttgaggctaccaagcaaataagggcaatggaagcgaaggcaaatgagcaggcagtcgcctgtgacaattcagaaatagatggtgcgacaagggcagcaagatggcgcctgcctgttcttgcaatgaccgccgatgtcatccaggccacccatgaagagtgcacgaagtgcggtatggatgggtacgtcacaaagcccttcgaggagaagcagctcttccaggcgttgcagaagttcttggaccccggcatgtcctgctaacgccgaagtgatgcgttggagcgcgggctgctcgtcgatcatgccagcggggaacagcaggcagacaaggcagcacgcaccacgggccttcgctggtctgcctgcctgtgcaggcgtcgtgtaaatgtattgtatttgcagggatactgtttacagcgctagtatgccccgtgccacaatgtccgagctacctgtggctgatgcacgttgcgcataggtggttttttttgtacagcttccaccatttttgtgctccagatcagaccaccgaaggaggcaagcatgctcgctggtgcagtgcagcactggaaggaaaacctgacttcctgagagtagatttttgctgtttaattgcattgggatttatgatgtattataatcagataaatgtgtgatgtaagctggcgtaattggcccaatgcatttccattgttatggatgagttgaaatggcattggttagacacttagactacactattgggtgtatgcccttccacagttccattttccctgcaaaatatcaaaatgtgcaaagggatagtggaatcatggcttgaattatatgaattttctttggtgtttttttcccgtatcgaagctcgactataacattagaagaaagcatctggaggcatgtttaagttttggttattacacactataaaatacaag

SEQ ID NO: 219868 - DNA, 3394 bp, Zea Mays
ggcgacgccgggaagaaggtgccgttcacggggctgttccggtacgccgacggcacggacgtgctgctcatgctcctcggcacggtgggggcgctggccaacggcgtctcgcagcccgtcatgacggtcatcttcggccaggtcatcaacgccttcggcgacgccaccatcgacgacgtcctcaaccgcgttaaccaggcagttctgaacttcgtctacctaggcattgcaacagcggttgtttcctttcttcgtaagtactctctctaagaagactctgttaactttttcaatcttcacattcgcttgcaatctgcaccacaaactggcatggatgccgctgatggttggccatcgttagtataaaataatcttccgtacaatggttaatggtgagataagataagcttaagaaaaagaagctcgcctcatcatataccagcttgcgccaacactagttgacatagcgcagagttcaactttgactttagttctgtacaaaaagcttgtgttcaatatagtggttaggacgacagatccaccatgttttgaatgtccatggacagtatcacatgaaggaagaaacgtacaataaagacattgcttcgttaacaaactgacttagaaaaacttgaaacaggattctacatgcataagccatgtggtaactatatcagtgtagaactgtagataagtgtagccatacttgctgtttatgcagaggtgtcatgttggacaatgacgggagaaaggcaggcaacgcgcattcgatctctgtacctcaaatctgtcctgagacaagagatagcattcttcgatgtagaaatgacaaccgggcaaatagtttcaaggatgtctggtgataccgtgctagttcaggatgccattggtgagaaggttggcaagttccaacagcttgtggcaaccttcatcggcggtttcgtgatagcattcgtgaaaggatggcttctatctcttgtcatgctggcatgcatccctccagttgtcatcgctggcggaatcgtctcaaaaatgcttgctaaaatatctaccaagggccaagcatcgtacagtgacgcaggcaatattgttgagcagacacttggggctataaaaacagttgtctccttcaacggggagaagcaggctattgcactgtacaataaactcatacacaagtcatacaaagctgctgttgaagaagggatcaccaatggttttggcatgggttctgttttctgcatttttttctcgagctacggtttggccatatggtatggcggaaagttggttcttagtaaaggttactctggaggagatgtcatcaacatcttgtttgctataatgaccggggcaatgtctttaggtaacgcaacaccctgcatggcagcctttgcagaaggacaatccgcggcatacagactgttcacaacgatcaagaggaaaccagagattgacccagacgaccaaaccggtaagcagctagaagacatcaagggtgacgttgacttaaatgacgtgtacttcagctacccggcgagaccagaacagctaatatttgatgggttctcgctgcatgtgtctagcggcactacaatggccatagttggggagagtgggagtggcaagtcaactgtgataagcctcgtggagagattctatgatccacaggctggtgaggttttgattgatggggttaacattaagagtttgcagcttgattggataagagggaagattggtttggttaaccaagagccgttgctctttatgacatctatcaaagataatataacatacgggaaagaggacgcgacgattgaagagatcaaaagggcagctgagcttgctaatgcagcaaatttcatcgataagttgcccaatggctatgacacgatggttggtcagcgtggtgctcagctatcagggggacaaaagcaaaggatcgctatcgcaagagcgatcatcaaaaaccccagaattctcttgttagacgaggctactagcgcactggacgtggagtcggagcggattgttcaggaagcgttgaataggatcatgctggacaggacaacacttgtggttgcacatcgcctgagtactgtgagaaatgctgattgcatatcagttgttcagcaagggaaaatagttgaacaaggtccccacgatgagctggtaatgaaccctgacggtgcttattctcaactcattcgtctccaagaaagcaaagaagaagaggaacagaaaccagagcggcacgtgtctgattcaaggtctaaaagtagaagcctctcactgaaacggtcgataagcagaggttccatggggaacagtagccagcattttttgaccctccccattggcatgcctggctcagttgaattgctggaaggcaacgatgagaattgggaggaggacgagaaagagcaggctcgtgacggtgaccgtgaggccccaaagaaagctccgatgggacggctagccagcctaaacaagccagaggtaccgatacttgtgttagggtcgctagccgctggagtccatggagtgctcttcccgttgtttggcctgatgatctccaacgccatcaagacgttctacgagccgccgcaccagctgaaaaaggacgcgagcttctggggcttgatgtgtgttgtgcttggcatcgtgtcgatactgtcaataccggtggagtatttcttgtttggggtagccggcgggaagcttatcgagcgcatccgtgccctgtcgtttcggagcatcgtgcaccaagaggttgcctggttcgatgatcccaaaaattccagtggagcacttggcgcaaggctgtcggttgatgctctgaatgtgcgacgtctagtgggtgataacttggccttggcagttcaggtcacctcgacgctgatcgcgggattcgtcattgcttttgtggcagattggaagctcacgttgattatcctgtgtgtgatgccactgtcgggtgtgcaaggttatgcacaagtgaagttcttgaagggtttcagccaagacgccaagatactgtacgaagacgcaagccaagtggccaccgacgcagtcagcagtatcaggaccgtagcttctttctgtgctgagaaaagagtgacgacgatttacgatgacaaatgtgaagcctcgaagaaacaaggggtcagaacagggatggttggaggcctcggtttcggcttctcgttcttgatgctgtaccttacatatggactttgtttctatgttggagcgcagttcgttcgtcacaacaagtctacttttggggacgttttcaaggttagaaaaaatgcatcttatcaccagcgttgctctctctctctctctctctctctctctctctctctctctctctctctctctctctcct

SEQ ID NO: 219869 - DNA, 1080 bp, Zea Mays
gttctcaacctgcattgcctaatgctgtcatgccgaggtgcatggggatttgggaccatggttcaaagcaagcagtctcaaaatcaagtgatggcttccgtataagagggacttttcagggtctcttgctcatcattcggtgccaacgatggagacaactctttgctggcttgagccttaactatgccaaggcttaatgactcaaatgtcaaggagataaagagcaagacaaagaagtatgtcgtggtagttgtgcgtcacccttgtctgatagtttggtcggcatatctttgttttttagaaactgctcccaactctctagctatctatgggtgcatgtgctattgcttagatctgtacttccatatatgtgctgattgatatgttaaatttgactcctcatcctcttggtatgtattttcaaaagaaagaaaaatgcagtgtctggcgtaggatcatcttcatccaaaggaaaggcaattgcaggtaaaaggggagaaaaatccaagagggaatataacagcagtggtattcaagaagcagagagaaataaactgtttttctttgagggctcttcatataattttgacttggaggatctattgagggctttggctgaagtccttggaaaaggaagttatgggactacgtacaaagctgttctggaggatggaacaacagtggtggtcaagagattgaaagaagtggtggcgggaaagagggaatttgaacagcagatggagctaattggcaaggtttgccagcatcaaaacactgtcccattgcatgcttactactactccaaggatgagaagctcttggtgtatgactatgtcccactaggtagcctttgtgctgctttgcatggtaacaaagctgttggaagaaccccattggactgggagaccagggtgaagataactctgggcacaacacgcggaatggcttaccttcactccgtgggtagcggcgggaagttcattcacgggaacatcaagtcaagcaacatccttctctcacaggaactcggcgcctgtgtcaccgagttcggccttgcccagctcatgtccacgccccacg

SEQ ID NO: 219870 - DNA, 2010 bp, Zea Mays
aggggacaaagcgggaggggtttctgatggcgccgaagcggaagcctgccgcggcggcgaagtcggaccctgatggcatattccgcggcgtctccgctttcatcgttcccaacggcgtccaggctcgccgcctcgtggtgtggaagcagaggctggtgcagatggggggccgagtcgtggagaagcccacgaagggcgagctggcgggggtcaaccacgtgttggccatggacgccaaggcgctactccgggagcttgacgccgcttggctccaccgcttccgcgggagtgtggtgtccttcgaatggattgaggagtgcctcaagtctggggagaggctgcccatccacaactttgcaatcaattacgaaaaggaatttaagccaaagaatgcggtttgcactggaaatctagttgcgtcacggccctctaaaaggaccaaaatgtcgtctgagtatcctggggaccaccagataattagtggaggggatagggagaaggaactagcagctggagggcctccaggtgcaagtgcacatgtggttgaaggatcaagtgcggggaagcagcctaaccagtatgcaagtagccaaagtagctcagcagattccaaggacaccataggttcgcatggtacatttggcatagaggaagcctcttctggaggacccagcatatatgctccagcagacttgaacaagaacatcaccaaaatttttggaaggcttatcgatatatatagggccctgggagatgacagaagatcatttagttattacaaggccataccggtgattgagaaattgccattcaaaatcgaaagtgctgatcaagttaaaggtctccctactatcgggaaatctttgaaagaccatataaatgaaatagtcaccactggaaaactttccaagctggaacactttgagaatgatgaaaagtttattcggtgaagtttggggagttggtcctgcaactgcgctcaagttatatgagaagggacaccgtactcttgatgatctacagagagatgagtcacttacaaatgcacagaggattggattaaagttttttgatgatatcaagcaaagaataccccgacatgacgttagcgagatggagaaacttttacaagatgttgggactgatatcttgcctggggtaacaattgtttgtggaggatcatatagacgcggtaaagcatcttgtggtgacatggatattattataactcatcctgatggagaaagccatgtaggatttttatccaagtttgttcaacggctgaaggaaattaactttttgagggaggatcttatctttagcatacacagtgttgatgggactgatagcggggttgacacatactttggtctttgcacataccctgggcgtgagctgcggcaccgcatcgacttaaaggtgtacccgaggaacagatatgcatgtggtctgcttgcatggactggaaatgatgtactaaatcggcgatttaggctactagcagaatccaaaggatatgtacttgacgatactggattatacctagctacacgcggcagtggtggaaagcatgctggcagatcagacgccatagttaactgtcacaccgagaaggatgtgtttgagacgcttggattcccttggctggaaccacatgagcgcaacctttagggcttgtttggaaactcaaacccctagggatcccaacctttactaggtaagcaatccatggggatgtcatttggataagccatttagttctccttataggacttctcattcctagggttgcctccctcttgcttccaaattaggccctagctgtttttgaacgttcatctagagaatgtgttttgtacagttagttatatatgttacctgtatctttaacctacctcgactttctgggtactaacagccttttgtactgattgttgttcatacttcccctttttgtgctgtcactagtaggcagtttttgttcagcttcgctttctatgcttctcccaa

SEQ ID NO: 219871 - DNA, 847 bp, Zea Mays
cccacccgacctctctctctcatcccttctcttccctctctcttctctctaccacgacgcgccaaggatcaagcgcacgcgacgcccgacgcccgacgccccgactgcctcgacccgccagcgcccaggaagacccgacgccgccaacgcccaggaagactcgaccgaaccctaacttcttgccgccgccacctcctcttactcgcatgccaccgtcgctcccctgggcgcaaacccgctgtcgctcagcccggcgcacgggatcgggcggtccggggacgccggcagtacacacccgtcgtcggtttccgcaggtggcgcgccctgatgtcacgcggcatgtgcccgatccgctgtcgctgtcgctgtaactgtttccaagattttgctctgcgagcttgctggatcctctgaccgcttccgcgggacgtgttcccgaatttccattttttatttttctttactacctttttctgtttactccattttttctcttaaaaaaataagagctctactatttaaacaagcggggcgtacaaatcgagcactgaaccttgtgagcccaggtatgttccaatgtttgtggagatagagtacgatccgaactgctagtacacatctgttctaattgaagagcaactggaggctcttggaagagcaatagttgctggcaagacaggcaattgaaaatgagaattgatcttttttatgggcgaagtgttgaagatggctttggtgaaggaaatgtcttgttagcatcaagtaagtggcgacatcacaacccctacaagcttgtgccttaaaacaagaggatacaagaagttggagtgctttttgtgaagacttt

SEQ ID NO: 219872 - DNA, 595 bp, Zea Mays
cccacccgacctctctctctcatcccttctcttccctctctcttctctctaccacgacgcgccaaggatcaagcgcacgcgacgcccgacgcccgacgccccgactgcctcgacccgccagcgcccaggaagacccgacgccgccaacgcccaggaagactcgaccgaaccctaacttcttgccgccgccacctcctcttactcgcatgccaccgtcgctcccctgggcgcaaacccgctgtcgctcagcccggcgcacgggatcgggcggtccggggacgccggcagtacacacccgtcgtcggtttccgcaggtatgttccaatgtttgtggagatagagtacgatccgaactgctagtacacatctgttctaattgaagagcaactggaggctcttggaagagcaatagttgctggcaagacaggcaattgaaaatgagaattgatcttttttatgggcgaagtgttgaagatggctttggtgaaggaaatgtcttgttagcatcaagtaagtggcgacatcacaacccctacaagcttgtgccttaaaacaagaggatacaagaagttggagtgctttttgtgaagacttt

SEQ ID NO: 219873 - DNA, 1130 bp, Zea Mays
taagacatatatgatctaaatggctgttggagtttctgaatggccagcccaggggatgcggagggcatcaccatctccatgggggagctgagcgtagaagcagcgacttcgtcagctaacggcggtggtgatgttgccgctgtcgaccaggatgatgtgtgggaagatgtttcagattctcatgggcacgcgtctaccttagacagagaatggatccacaggcagaaccagtttcaaaagatgggctatcgggacggaataacacaagggcagaaggactctgcccaggaaggcttcaatgctgggttcaggcaatctgtaaacgctggctacaagtggggccttgttcgcggggttgccaggtgtatatccttccaagaactgatctcttgtattgccattctcctctagtcttgccctccgattttgatttcctttcctatctgtcgtcattccaaagtagtgcgctagccaatcttccagacagcttgaaagagaaactggtgccggacgtccagtgcagagggaaactacaggatctgcacagctccgtgcgagaaatatcagcagatgacgctctccagatgttccacgagagtatccgccagagtaaccctccgtcagaggggtcaggatcatatgtagtagcatcagccaccgatggagctacggaaccaaacaggatgaaaagcctaccgaaggatctcgtgttgttgctgcgtgaatgctcggatatcaaagtcagcaaggagttggcgtgggattcatgaacaaggcgactcagaaattccaaccactacaagtgtggcagaatcacactgagttcccagattactgaacgcctacctgggctgatggatgaatgtgattcggggattttgttttggaagtgactgagatactcgaaaggttcagggacctcgaatcgaatgtgtctgtagtaatgcagatttttattccatatttcccttttttttgctgcaacctgtaactagaattgtaactataaatttgcagttcttaaacaattgtaatgtttttttttctctccctgaattctgtcatcttcctgaacaatggtcttcatgtggaagtatagtattttgccacgttttgagccgacattcaga

SEQ ID NO: 219874 - DNA, 2745 bp, Zea Mays
cacaaatcaggattggtagagcccatctctgcgccctgccttgctggctctgacctctccctcccttccccttcctcgattgttcctcccccttcttttattagggttttttttgtctccttagatttgcgcctgttctcacctgtgcgcatactagtctctgcatcagagagtagagacctcggagccgatcttcaacacgcagattgggcagagctgcctgccggagggagagtggagagagagagagagagagagagagagagagctcaaggggggcaaaaggagtttttttttatccagcttgttagcttgattctctttgatccgggagagcagccgccagtccaactaatcctagctattggtgtgccggggctttgattgttctccagatccgagccacctgctgggtggactccaggaatccgagcacgaagttgacaggggagttctcagggaaaagttgcgcaggggaggaaggaagagcctgaaagggcggtgcggagagaaagactataagagcgacctgggtcccttgaggatgccgtcaagaaaccgcgtggagaggagggcgatgagatgagggatgctggccgcggtgatggactatttcagctcctgctggggcccgcgatcgggtgacgggcacagggggaagggccccgacgccgccggccggcaggacggtctcctctggtacaaggacgccggtcagctcgtcactggggagttctccatggccgtggtgcaggccaaccagctgcttgaggaccagagccaagtggagtccggatcgctctccctggctgacccgggcccgcagggcaccttcgtcggcgtctatgatggccatggcggtcctgagacgtcccggttcatcaatgaccacctcttcaaccatctcagaaggtttgcaactgagcacaagtttatgtcagcggacgtgatccggaaagctttccaagcaactgaggagggctttctttctctagtcagcaaggaatggtctttgaagcctcagattgcttcagtgggctcctgctgccttgttggtgtaatctgtgctgggactctctatgttgcaaacctgggtgactcacgtgcagttcttggaaggcttgttaaggcaactggagaggtcgtggccatgcagttgtcatcggagcacaatgcgtgctatgaggaagttagacaagaactgcagtcatcacatcctgacgatccacatattgtggttctcaaacacaatgtttggcgagtgaagggtctcatccaggtagacaaaaatatgtactctggatcagatctcaagatctattggagatgtatatctaaagaaaccagagtacaacagagaaccacttcacagcaagtttcggcttcgagaaaccttccagaggccgatccttagttctgaacctcaaattactgaacatcgaatacagccaaatgatcaatttgttatatttgcttctgatggtctatgggagcacctcagcaataaggaagcagttgaccttgtccaaagtagtccacacaatggaattgctcggagactagtgaaagcggcgatgcaagaagctgccaagaagagggagatgagatactcagacctcaagaagatcgaccgtggtgtgagaaggcatttccacgacgatataacggtcgtcgtggtattccttgatttgaatgccatgagcaaagctagctggagcaaaagcccctcggtttctctccgagggggcggtgtcaccgtccctgcgaagtccctcgcacctttctcagctccggcacggctgaacagcacctactgaagttgctaccactcttgaaaggaagaacacggtgcagatctgcagtggtgagagaaaaaaaaacagcaatcaagtgtagcgttacagttacacctgctgtgttgttgctctttgcaaaactactgtctagactccgcctggtaattagtgtactgatagcgaggtaaaaaaaagttagattatttgttagcagcggcagtgatttgacatctaaggaacaacaacacggtgtccaccgattctgctatcctgatggctcgcggcagcctggctggtcggcacacgacacgaagtgaagctgttttactggcggcatctggctttgttatctcatgggacagtgatccacaagagtaagggatcagctcaatccaaagtcaatagatgttccttataaaacatagaggtacagatgttctcatcggctatgtgtatttggggaaaaaatcaatataaggggtgtttggtttttagggactaatttttagttcttctattttattatatttattccttaaactaccaaatacataaactaaaattctaatttagagactaaaatagagctattaaaaattagtctctagaaaccaaacacccctcagaaaaaaaaacacaagaggctacgatattccagatctagagtattaatccaagaatttacattctgcaatggatacaagcttccttctgaaagattgggattgggattgagagaactagatacaattgaattgatctttgtaaggggcagagctgtgaatgtattgtttgctatacacgtctacttccatcttaagcatttccctgacccttcgaagtttgaacatgatccatctcagttaattacatgccaggatgacagcttgatttcagatcctacctaacaaacagtgatatcaacaattggaagacagaataaattcac

SEQ ID NO: 219875 - DNA, 2715 bp, Zea Mays
gtcacacacaaatcaggattggtagagcccatctctgcgccctgccttgctggctctgacctctccctcccttccccttcctcgattgttcctcccccttcttttattagggttttttttgtctccttagatttgcgcctgttctcacctgtgcgcatactagtctctgcatcagagagtagagacctcggagccgatcttcaacacgcagattgggcagagctgcctgccggagggagagtggagagagagagagagagagagagagagagagctcaaggggggcaaaaggagtttttttttatccagcttgttagcttgattctctttgatccgggagagcagccgccagtccaactaatcctagctattggtgtgccggggctttgattgttctccagatccgagccacctgctgggtggactccaggaatccgagcacgaagttgacaggggagttctcagggaaaaggggaggaaggaagagcctgaaagggcggtgcggagagaaagactataagagcgacctgggtcccttgaggatgccgtcaagaaaccgcgtggagaggagggcgatgagatgagggatgctggccgcggtgatggactatttcagctcctgctggggcccgcgatcgggtgacgggcacagggggaagggccccgacgccgccggccggcaggacggtctcctctggtacaaggacgccggtcagctcgtcactggggagttctccatggccgtggtgcaggccaaccagctgcttgaggaccagagccaagtggagtccggatcgctctccctggctgacccgggcccgcagggcaccttcgtcggcgtctatgatggccatggcggtcctgagacgtcccggttcatcaatgaccacctcttcaaccatctcagaaggtttgcaactgagcacaagtttatgtcagcggacgtgatccggaaagctttccaagcaactgaggagggctttctttctctagtcagcaaggaatggtctttgaagcctcagattgcttcagtgggctcctgctgccttgttggtgtaatctgtgctgggactctctatgttgcaaacctgggtgactcacgtgcagttcttggaaggcttgttaaggcaactggagaggtcgtggccatgcagttgtcatcggagcacaatgcgtgctatgaggaagttagacaagaactgcagtcatcacatcctgacgatccacatattgtggttctcaaacacaatgtttggcgagtgaagggtctcatccagatctcaagatctattggagatgtatatctaaagaaaccagagtacaacagagaaccacttcacagcaagtttcggcttcgagaaaccttccagaggccgatccttagttctgaacctcaaattactgaacatcgaatacagccaaatgatcaatttgttatatttgcttctgatggtctatgggagcacctcagcaataaggaagcagttgaccttgtccaaagtagtccacacaatggaattgctcggagactagtgaaagcggcgatgcaagaagctgccaagaagagggagatgagatactcagacctcaagaagatcgaccgtggtgtgagaaggcatttccacgacgatataacggtcgtcgtggtattccttgatttgaatgccatgagcaaagctagctggagcaaaagcccctcggtttctctccgagggggcggtgtcaccgtccctgcgaagtccctcgcacctttctcagctccggcacggctgaacagcacctactgaagttgctaccactcttgaaaggaagaacacggtgcagatctgcagtggtgagagaaaaaaaaacagcaatcaagtgtagcgttacagttacacctgctgtgttgttgctctttgcaaaactactgtctagactccgcctggtaattagtgtactgatagcgaggtaaaaaaaagttagattatttgttagcagcggcagtgatttgacatctaaggaacaacaacacggtgtccaccgattctgctatcctgatggctcgcggcagcctggctggtcggcacacgacacgaagtgaagctgttttactggcggcatctggctttgttatctcatgggacagtgatccacaagagtaagggatcagctcaatccaaagtcaatagatgttccttataaaacatagaggtacagatgttctcatcggctatgtgtatttggggaaaaaatcaatataaggggtgtttggtttttagggactaatttttagttcttctattttattatatttattccttaaactaccaaatacataaactaaaattctaatttagagactaaaatagagctattaaaaattagtctctagaaaccaaacacccctcagaaaaaaaaacacaagaggctacgatattccagatctagagtattaatccaagaatttacattctgcaatggatacaagcttccttctgaaagattgggattgggattgagagaactagatacaattgaattgatctttgtaaggggcagagctgtgaatgtattgtttgctatacacgtctacttccatcttaagcatttccctgacccttcgaagtttgaacatgatccatctcagttaattacatgccaggatgacagcttgatttcagatcctacctaacaaacagtgatatcaacaattggaagacagaataaattcac

SEQ ID NO: 219876 - DNA, 1574 bp, Zea Mays
gttttttttacagtactacacttcatgtcactaccaattatacattccagacacttttggattacatggttaaaagtaagagaccaccaaatcgtacttgcgctaccaacaagaagatgcgtgaaaaaatttaaaaaaatggcactacacaaagcgataaagagaaagagagagagagaaaacaaatcgttcaagcctcacactgcagaacagaatgcacacggcacgtcacttcctgccttgccgctcctccgacctctccttctccttccctccccgccgaatttggtaaaattcaattaaacacggaaaaaaatttacagcggccggcatttgattcgaattctgtttcccttgctttccctcctactggactgactggagaaacttcacccggtgttgcaaagcaaagcaaagcaaagcaacctttttccctttcacccgaaaaattttgcaatgcggcccctcggaggctggcgacgacgacgtggctagaaggtccacttccagatcttgacgcggaccctgacctggcacgcgcgagcgacggtggccgtggccgacgcggcgggcggcgccggcgcgtcgtcgacggccgcggcggcgggggctggggtgtcggccgcggccttcgccagcttcttcgtcttcttggccggcgcgggcgcgggcgcggccaccttgacgccgtcgcagtgcaccaggatgccgatcttcttggtcctgagcgcgccaacccggacgccggccctggtctccaggtccaggacgatggggaactcgccggacctcttgacgtcggagccggccgcggcggggtcgaccgcgagcgcggacgcggagacggtggcccggatgacggtgacgttgccggcctcgtgcgcgaacccgggcgcggtggccgcgcccagcggcacggcgttggcggccgtggcggccgtcacggcgaagtcgtcgtagacgtacaccagcttcttgttggggttcctggcggtcagcgtcacgtcgatggcgtcgctcagcgcgggcgcggtggcggacgacgacaggctcagcctcgtcacgcgcgccgcggtcagcgtgaaggccggccggtgcggccggtacagcaggtagaaggcgcccccggccacggggtgggcttgccgttggaggacattgtcgccgccgctcccgctcccgctccgcagcgcaggggacggccgagctccgcaggcaggcgggggtggttcttggaagcctcggtggcactgcgactccgtgagcttggctgtgaggtgtaacggaggagagagatctataggcgcgagggggagggaaggccggaagggaagacgaggagggaggtcaggtggagaaggtgagggaaaagggacagccggacagggcacctcacggatggttcggcctcaccaaatcatttgttgccggcttgctgttgctgacgcttttccctgtcctcccctccccttcttgcttcacctcctcaactgattggtggcgggtatttttcccgggaatttttttttctctgctgggagcctgggagtgggagcgacgctagtgctattttg

SEQ ID NO: 219877 - DNA, 1589 bp, Zea Mays
agagttaaaacatccgcggctagggtttaaggattttcttctccgctcccccggcccccattcgcacccagcacagctacagacggtctctatggccaagaaaggggcgaagagaaagcagcagccgccgccggcggctcccaccgcgaagaaggggagcaaggctgtgcccccaccgaaggctgcgaagagagcgcccaagaagcaggagcttctcgagtcctccgacgattctgatacggagcagcagctcctggaggaggcctcccacctcgacgtcccctctgattccgacgccgaagagctctctgggtcggacgctgaggctgacgagctctcgggctcggatgccgattccgacggaagctcgagcagcggcgacgacgtggaggatgaggaggaggaggaggaaggtgatggaagtgatgatgaccccctggcggacgacttcctcgctggtagcgacgaaggaagcgagggtggtgactctggactggagtcagacgagtctgatgacctcgaggcaaaatcacgagcaattgatgagcagaaaatcaaggcggaagaagatgcagaggaggaacttcaaaccaacataagatcagaatctgatgagttcagattacccacggcagaggagctggaggaagaggcacacagaccacctaacctaccaaatctcaaaaggaggatttcagaaattgttcgagtgctctcaaacttcagcaagctgaggcagaaagatgttccacgaaaagattatatcgaacaactgaaaactgatatcatttcatactatggatataatgattttctagttgaagcattaattgagatgttcccagctgttgagcttgttgagttactggaagcctttgagaaaaggccgcccgagtgcttgcggacgaatacactaaagacccggaggagggatcttgctgctgctcttataccaagaggatttaatttggacccgataggaaaatggtcaaagaaacaaggtgcaagttcgtttttaccagtgatggcacttgctccacaggagaaggaacgaattgttgatatggcggctgctccaggtggtaagactacttacattggcgctcttatgaagaataccggaatcatctatgcaaatgagttcaatgagaaaaggttgcatggacttttgggaaatatccatcgcatgggtgtgacaaataccatagtttgtaactatgatggtaaagagctacccaaagttcttgggatgaattcggttgacagagtattgcttgatgctccctgcacaggaactgggaccatttggaaggatctacaaattaaaacatcaaaggacattgaagacatcaggagctgcgcctttgtccaaaagcaattgctgctagctgctattgatttggttgatgccaactccaaaactggtggttacattgtttactcaacttgttcgataatgattccagagaacgaggcagtaattgactatgcacttaaaaagagaaatgtaaagcttgtgccttgcgggttggattttgggcgtccaggattcatccggtaccgggagcatcggtttcatacttctttag

SEQ ID NO: 219878 - DNA, 2854 bp, Zea Mays
agagttaaaacatccgcggctagggtttaaggattttcttctccgctcccccggcccccattcgcacccagcacagctacagacggtctctatggccaagaaaggggcgaagagaaagcagcagccgccgccggcggctcccaccgcgaagaaggggagcaaggctgtgcccccaccgaaggctgcgaagagagcgcccaagaagcaggagcttctcgagtcctccgacgattctgatacggagcagcagctcctggaggaggcctcccacctcgacgtcccctctgattccgacgccgaagagctctctgggtcggacgctgaggctgacgagctctcgggctcggatgccgattccgacggaagctcgagcagcggcgacgacgtggaggatgaggaggaggaggaggaaggtgatggaagtgatgatgaccccctggcggacgacttcctcgctggtagcgacgaaggaagcgagggtggtgactctggactggagtcagacgagtctgatgacctcgaggcaaaatcacgagcaattgatgagcagaaaatcaaggcggaagaagatgcagaggaggaacttcaaaccaacataagatcagaatctgatgagttcagattacccacggcagagctggaggaagaggcacacagaccacctaacctaccaaatctcaaaaggaggatttcagaaattgttcgagtgctctcaaacttcagcaagctgaggcagaaagatgttccacgaaaagattatatcgaacaactgaaaactgatatcatttcatactatggatataatgattttctagttgaagcattaattgagatgttcccagctgttgagcttgttgagttactggaagcctttgagaaaaggccgcccgagtgcttgcggacgaatacactaaagacccggaggagggatcttgctgctgctcttataccaagaggatttaatttggacccgataggaaaatggtcaaaggtaggattagttgtctatgactccaccatttcagctggtgctactactgaatatatggctggtcattacatgaaacaaggtgcaagttcgtttttaccagtgatggcacttgctccacaggagaaggaacgaattgttgatatggcggctgctccaggtggtaagactacttacattggcgctcttatgaagaataccggaatcatctatgcaaatgagttcaatgagaaaaggttgcatggacttttgggaaatatccatcgcatgggtgtgacaaataccatagtttgtaactatgatggtaaagagctacccaaagttcttgggatgaattcggttgacagagtattgcttgatgctccctgcacaggaactgggaccatttggaaggatctacaaattaaaacatcaaaggacattgaagacatcaggagctgcgcctttgtccaaaagcaattgctgctagctgctattgatttggttgatgccaactccaaaactggtggttacattgtttactcaacttgttcgataatgattccagagaacgaggcagtaattgactatgcacttaaaaagagaaatgtaaagcttgtgccttgcgggttggattttgggcgtccaggattcatccggtaccgggagcatcggtttcatacttctttagaaaaaacaagaagattttatcctcatgtcaataacatggatggattttttgtagctaagctgaaaaagttaagcaatacaattccggtgacgtctgagccgtctaaagcatctgaagaagcagctaaggctgatggtgaagatgagaaagctatttctaatgaacaagagactggtgttcctgataaagatgagaaaactgttgagataaaaaatcataaaaatgtgactaataaaagaacaagtgtcaccaaagagactggaagccataaacgtgaatccaataagccaggaaagcatctcaagataaataagaataatgctacaaaagaaattgatggccctgagagcagtgaaacaaatagagatgggaaagaagagcatcgcgtacaaaccaagaaaatgagtcacaagaggaagtttgcttctgatagatccaaaaaatctggccccgagagcttctcgggtgtcaaagagaagagacaggtcagtgacaagaagcggaaaaagaaatggcaattcaagctgaggcgtgactgggaagctgaaaagaaaggtgacaagaggaggaaggtatgaaggagtattcagatgtccacaggccccaatgaaatttgatgggtgtgtaagggcaaccgagaattttgagcaagcacgagtttgcagccaccgaaaattttgatgtatgaaatagcgattgtagtttattattttttattcagtgtacgtctcaagttttatctttaatgagtgacatatctggcagggaaactgaagcatattattatcttgctgaatgctatgtgaatcctgctgtacgtgttataaaaaaaaatcatatctgagatactagctgcaagaacctgacttctagatactgtgggttctgaatagtttcatcatgtggcttgtttggagatctagatcatgaaggcgcagtggcaactgattctgaagttcacgtttggtttggagtcttggagacaaggagtgatggaggcggagagaatgcatggttgtttgttttcagtaattattgttcacttttccaatagagggtgcgtttggtgcttgaacagccgtgtccctccaattttaagggatagctaagatagtcttattttaatcttgatcttgaatcaaataatcttatctgagagtatgttctgccttgccctgttgttattgcaacaaaac

SEQ ID NO: 219879 - DNA, 4225 bp, Zea Mays
agagttaaaacatccgcggctagggtttaaggattttcttctccgctcccccggcccccattcgcacccagcacagctacagacggtctctatggccaagaaaggggcgaagagaaagcagcagccgccgccggcggctcccaccgcgaagaaggggagcaaggctgtgcccccaccgaaggctgcgaagagagcgcccaagaagcaggagcttctcgagtcctccgacgattctgatacggagcagcagctcctggaggaggcctcccacctcgacgtcccctctgattccgacgccgaagagctctctgggtcggacgctgaggctgacgagctctcgggctcggatgccgattccgacggaagctcgagcagcggcgacgacgtggaggatgaggaggaggaggaggaaggtgatggaagtgatgatgaccccctggcggacgacttcctcgctggtagcgacgaaggaagcgagggtggtgactctggactggagtcagacgagtctgatgacctcgaggcaaaatcacgagcaattgatgagcagaaaatcaaggcggaagaagatgcagaggaggaacttcaaaccaacataagatcagaatctgatgagttcagattacccacggcagaggagctggaggaagaggcacacagaccacctaacctaccaaatctcaaaaggaggatttcagaaattgttcgagtgctctcaaacttcagcaagctgaggcagaaagatgttccacgaaaagattatatcgaacaactgaaaactgatatcatttcatactatggatataatgattttctagttgaagcattaattgagatgttcccagctgttgagcttgttgagttactggaagcctttgagaaaaggccgcccgagtgcttgcggacgaatacactaaagacccggaggagggatcttgctgctgctcttataccaagaggatttaatttggacccgataggaaaatggtcaaaggtaggattagttgtctatgactccaccatttcagctggtgctactactgaatatatggctggtcattacatgaaacaaggtgcaagttcgtttttaccagtgatggcacttgctccacaggagaaggaacgaattgttgatatggcggctgctccaggtggtaagactacttacattggcgctcttatgaagaataccggaatcatctatgcaaatgagttcaatgagaaaaggttgcatggacttttgggaaatatccatcgcatgggtgtgacaaataccatagtttgtaactatgatggtaaagagctacccaaagttcttgggatgaattcggttgacagagtattgcttgatgctccctgcacaggaactgggaccatttggaaggatctacaaattaaaacatcaaaggacattgaagacatcaggagctgcgcctttgtccaaaagcaattgctgctagctgctattgatttggttgatgccaactccaaaactggtggttacattgtttactcaacttgttcgataatgattccagagaacgaggcagtaattgactatgcacttaaaaagagaaatgtaaagcttgtgccttgcgggttggattttgggcgtccaggattcatccggtaccgggagcatcggtttcatacttctttagaaaaaacaagaagattttatcctcatgtcaataacatggatggattttttgtagctaagctgaaaaagttaagcaatacaattccggtgacgtctgagccgtctaaagcatctgaagaagcagctaaggctgatggtgaagatgagaaagctatttctaatgaacaagagactggtgttcctgataaagatgagaaaactgttgagataaaaaatcataaaaatgtgactaataaaagaacaagtgtcaccaaagagactggaagccataaacgtgaatccaataagccaggaaagcatctcaagataaataagaataatgctacaaaagaaattgatggccctgagagcagtgaaacaaatagagatgggaaagaagagcatcgcgtacaaaccaagaaaatgagtcacaagaggaagtttgcttctgatagatccaaaaaatctggccccgagagcttctcgggtgtcaaagagaagagacaggtcagtgacaagaagcggaaaaagaaatggcaattcaagctgaggcgtgactgggaagctgaaaagaaaggtgacaagaggaggaaggtatgaaggagtattcagatgtccacaggccccaatgaaatttgatgggtgtgtaagggcaaccgagaattttgagcaagcacgagtttgcagccaccgaaaattttgatggaaactgaagcatattattatcttgctgaatgctatgtgaatcctgctgtacgtgttataaaaaaaaatcatatctgagatactagctgcaagaacctgacttctagatactgtgggttctgaatagtttcatcatgtggcttgtttggagatctagatcatgaaggcgcagtggcaactgattctgaagttcacgtttggtttggagtcttggagacaagattgtgaatgaaacctgcaaaggaatagtccatcacaatgctaaggttgcttcccgactgaccacattgcgcttgttttagcctctggttatctcgtctggaaaaaaaaacccagacatctgaccgggtcagacgatacaacccatatacgtacgtcgagtcctcagagttcaattctacctggaccatcgcacccatcttggcccagagtacttccgcgccgcgctacgaacgaggccatccgccgccacacgccgtcggccatgccgcagaggtcggaggcgggcactgctggggagggcgacgaggagcagcggctgcgggctgctctgcgtcacctgcaggcggaggcgggggtgctggagcgcctggtatacaagcaccggaaccagcaccgcggcgccgcctatttccaatacctcctcaaggtgaggagggacctgaagcttctgctcggcgccggcctcgctgaggttctcaacgccgtgttcccagttctcgcatgccgcaagccggccaacacgatcctcgtccccaacaagcagtctaagaagaaacctgttgcaaaccacagccatcaccagaggcttttgggtgtagcccgcttgttatcccagatgtctgaacctgttatgaaggcagcaattcagataacatttttacttgctagatcattcttcgttgatctttgcacggctgtgctttctttgcttgcacgagtaagggtcctgatccaacagatgttacttgatgttgtgtctatatacaataaggtcactgatcttactgaaaggaagcaggctgttaagattagcatcagtggagtgcaggctttcagagagtactacccctctatgaatgatgcatgtacagttctggagtgtgtatggataaaagataaattcgttttgcatgaaaaggttaaagatatctctcaggaaacccaagttgagaatcagaagtgctgcggtcctgaatctacagtccagtatgaaacaattgcactgattagtgaaggttaaaatgctttatcttctatttgtcacaataaatgcatgatgatctattgatcttgatttttttgttgctttgtcagaattagctgacatgctcatgaatcatgagaatccttggtgctttgttgctgatttggtttgaaaaacaagcactttgtagtgtattgcattgttaagagcatagctcaatttttttttatggaatacgcaggagagctgcgcatctttgtattaatagaagaataagaaagggggagagaaccccattacagcacacacaccccaacactagagactaactaaggagcaccgactaacatggaaaaacacgacccacagcgctgttttaagccagcaactcatctacttggaggaaagacagagccttggctccagtcaaggaccagagcaccgcctcttccctagccaccctaagggctgtgaccaagctaggattacatccatcaaagacacatctattcctatgcttccatatggtccaagcacctaggattactaaagaattaaaaccctttctcataagatcagatgcccgagagctgttagacttccaccacgactcaaaggaatcctcgtgagctggacacagctcctgcagccccactgaactaaggaaatcaaac

SEQ ID NO: 219880 - DNA, 3297 bp, Zea Mays
cccgccctcacaccccaccgtggacgcgcccacgtcgcgcgtttctcggccacctccgcatgcacccgacctcctttatgagcccgcaccccactcactcactcccctcgcccagtagcgcccttctgcagacccctcgcacctctgcctcgcacagcgcgcgcccgtggagcaccatcgccgttcaccgtaacctcgggcccattccacggccgtcgtcgagcttccgtcatgctcattgctccggtaagctccgcctcctcgccagcaactcaagacatcccttggtttgcccctaccccctctattcccctctgctcacgctcaccggattctctccgtgcagccgtgtcgcccccgccgttgatccgggccctcgctgtgttctcaccatcgctcaagcgctccaaagctgtctctcaagaactggtggccatcgaatctgcttatccgcaactgcatttcccacgaggagcctaaagtccttgtgccggagtatgcattgagctatggtgattcagtagaagatgtatgtctttggtggaaaccataatggtcgttactttggcgacattcaggaggagttcttcagcgccttcaaggaggagatggagatcaagcgacaactcgagaaggtgcaggtggcatagagggatcattgttgcccattgaagaaccactactagaataagaaagtccaccaattttttcagcaccattatttccagcttcattgtaactgctagacaaaataaggccccctggtgctttgccatcatctctgcttggatatgaggcactgacaggttccctagatgattctagatttgaagattatcttcacagactgaaccaagattgtgagcacattgtattgctaagacaattttgtcgtacaactttctttcagatgtcaagaggtggatcttgtttctacagtgagttggtgatctggagacgatcgagtgtagagtgttgaaggcacatctccaatattcctacacaaaaacacaatgcacatcaactaacagaagtgcaataccctctcatgtaactgtattgcaaaagaatatggtacttatgcacctaaggagaaagggaagaagcatactttttttggctctgaggtattaattttaaaaaatgacgctgaaccttaaaatatattcaaaccattcatttacatcatgcaaaggtatgatattaattccatggatcgatgagttaaatggctattttaagctaaagcttgttttcctttacaagaggtggttttatctaaaagaatatctttggagtggttcttttacattctatgaaaccatcctttttatttgttgccacatgtcagacgtcatatttaaatgtgcatacacaaatatactaattgttttagctgacctagagtttatctaaaagactcggataggctgaatgtatgagttgtttcttgctgtaaatatggattggtaacgaatagagaaattaggtttgctttgtagtattacaaaaatatatgaatccttgagaagagttctttctagaattgataaaatgaattggaatgtggagctgtggattgatgaatctatcaaacctattctacaattgtagcctgcaaatagtaaatacgtacctctgtgtgttcttaagtcttaacttaatatcctaattcttggcaggcttcatgtgttgtatctttctataaatatgaacaaagaataaggttgatggaatttagttgattattaaatgatttgtaagtgctcaaaatggatgacattaacttaattgcagagcaacattgtatagtcgattaaccgtgtttgtaacatatttattctctcatctttgtgttggagtgcttgcaacatattttgtacttgcatcttcttttggtagttaagagtgtaaccagacaactcatccattttcttccatttgcacccaaactttcattgtcttattgttgtcaagcgcataatgtgatcatgttttgcttggggtggcatgaaactatagtgacaatatcagtgtggccatccagtttctgtacaattcttgactacaggtcccagttcaagttagtttgccaaatttctatggcttgtgcagctagcatcttagtgctctttgcaaaaaaagagtattattaagggtttagtctttgagctttctacatagaaggggctacttgaaatcaccataaattttcattgctttcattctctcttttggtatttcagtttggttatggtttaactcttcttttgctatttgtgtcgaccatttatgtcacaataacttcactcaatactctgtacataactgactggtcatgatatcatatttcgataaagtatttatgacaatctaagacacacaaatggtctgtggaaaacctttggatggcaagcttgtatcgtatgccttccaaattttatagtagtaccattttttatttttgtttggatacctcttctaacagagatcttggtaatttgaacttatatggtcatctggtgcctgagcttggaaaattggagcatcttcagtatttgttatgatcaccgtaggcaggttttctccacacagatgggtttgagcaaccaggacattgttgcactttttggtggtcacaccctagttggtggaatcagggaagatgccacaagaacaggtttgggtttgagggagcttagacgtccaaccctttgatctttgacaactcttcaaggagcttctgagtggagagaaggaaggccttttgcagctaccaagggacaaagctctcctctcttatccatccttctgcccacttattgacaaatatgtagcagtatatatatctttgatccttgtcatttgttcggggtcagtttatgttaacctgggtggctgtaataaatatttgtcggccttgtgttttgttatcttcttttctcttgaatggttcatttgaagatggggtgaactaaactgaatatgtagtctgtatgtttttatggttcatttttcttttttatttatctatcatatctatcggagaagctttgtcatatgaagcagagtatggtaggttggtggggcattgcagtgcagtggcagcgacactctgattaactatgccaacggattgatcattgcatttcctctgggtaactcagcaggcaaggggcctcgaaatgcaatggttgtcaacaaagaaattgtgacagattggagtcgatgatatatatgtcgtcactttcatgtaatcgttatacactaacattctgtcgaataaagactagagtc

SEQ ID NO: 219881 - DNA, 2977 bp, Zea Mays
ctgatatccaagacaaggatgtcactctctttttctgcattgagctatggtgattcagtagaagatgtatgtctttggtggaaaccataatggtcgttactttggcgacattcaggaggagttcttcagcgccttcaaggaggagatggagatcaagcgacaactcgagaaggtgcaggtggcatagagggatcattgttgcccattgaagaaccactactagaataagaaagtccaccaattttttcagcaccattatttccagcttcattgtaactgctagacaaaataaggccccctggtgctttgccatcatctctgcttggatatgaggcactgacaggttccctagatgattctagatttgaagattatcttcacagactgaaccaagattgtgagcacattgtattgctaagacaattttgtcgtacaactttctttcagatgtcaagaggtggatcttgtttctacagtgagttggtgatctggagacgatcgagtgtagagtgttgaaggcacatctccaatattcctacacaaaaacacaatgcacatcaactaacagaagtgcaataccctctcatttattagcctcatcaaactgaattgaaagacaacaaactgaactgaaagtcaacatacatgccaggtaactgtattgcaaaagaatatggtacttatgcacctaaggagaaagggaagaagcatactttttttggctctggtatgtgtagctcccattttagattttaccaagtatcaaatgtacatttcttattgtttgatgactaacatcatgcagaggtattaattttaaaaaatgacgctgaaccttaaaatatattcaaaccattcatttacatcatgcaaaggtatgatattaattccatggatcgatgagttaaatggctattttaagctaaagcttgttttcctttacaagaggtggttttatctaaaagaatatctttggagtggttcttttacattctatgaaaccatcctttttatttgttgccacatgtcagacgtcatatttaaatgtgcatacacaaatatactaattgttttagctgacctagagtttatctaaaagactcggataggctgaatgtatgagttgtttcttgctgtaaatatggattggtaacgaatagagaaattaggtttgctttgtagtattacaaaaatatatgaatccttgagaagagttctttctagaattgataaaatgaattggaatgtggagctgtggattgatgaatctatcaaacctattctacaattgtagcctgcaaatagtaaatacgtacctctgtgtgttcttaagtcttaacttaatatcctaattcttggcaggcttcatgtgttgtatctttctataaatatgaacaaagaataaggttgatggaatttagttgattattaaatgatttgtaagtgctcaaaatggatgacattaacttaattgcagagcaacattgtatagtcgattaaccgtgtttgtaacatatttattctctcatctttgtgttggagtgcttgcaacatattttgtacttgcatcttcttttggtagttaagagtgtaaccagacaactcatccattttcttccatttgcacccaaactttcattgtcttattgttgtcaagcgcataatgtgatcatgttttgcttggggtggcatgaaactatagtgacaatatcagtgtggccatccagtttctgtacaattcttgactacaggtcccagttcaagttagtttgccaaatttctatggcttgtgcagctagcatcttagtgctctttgcaaaaaaagagtattattaagggtttagtctttgagctttctacatagaaggggctacttgaaatcaccataaattttcattgctttcattctctcttttggtatttcagtttggttatggtttaactcttcttttgctatttgtgtcgaccatttatgtcacaataacttcactcaatactctgtacataactgactggtcatgatatcatatttcgataaagtatttatgacaatctaagacacacaaatggtctgtggaaaacctttggatggcaagcttgtatcgtatgccttccaaattttatagtagtaccattttttatttttgtttggatacctcttctaacagagatcttggtaatttgaacttatatggtcatctggtgcctgagcttggaaaattggagcatcttcagtatttgttatgatcaccgtaggcaggttttctccacacagatgggtttgagcaaccaggacattgttgcactttttggtggtcacaccctagttggtggaatcagggaagatgccacaagaacaggtttgggtttgagggagcttagacgtccaaccctttgatctttgacaactcttcaaggagcttctgagtggagagaaggaaggccttttgcagctaccaagggacaaagctctcctctcttatccatccttctgcccacttattgacaaatatgtagcagtatatatatctttgatccttgtcatttgttcggggtcagtttatgttaacctgggtggctgtaataaatatttgtcggccttgtgttttgttatcttcttttctcttgaatggttcatttgaagatggggtgaactaaactgaatatgtagtctgtatgtttttatggttcatttttcttttttatttatctatcatatctatcggagaagctttgtcatatgaagcagagtatggtaggttggtggggcattgcagtgcagtggcagcgacactctgattaactatgccaacggattgatcattgcatttcctctgggtaactcagcaggcaaggggcctcgaaatgcaatggttgtcaacaaagaaattgtgacagattggagtcgatgatatatatgtcgtcactttcatgtaatcgttatacactaacattctgtcgaataaagactagagtc

SEQ ID NO: 219882 - DNA, 482 bp, Zea Mays
gcggagatgttgtttgtcagcacagcagagcaggaaggaatgctcagctcaggtggtattgtatttatttaccttaccttacctagatcgatcccgtcggtgttgggggagtcgtgcggcgccaacacagtcaggtttgctatcactacgttgctgcagtaaaccgggtggatgttccagaacggcgagtcctggaagacgaggttggagacgacgacgtcggtggagtacatgagctccagcaggtgcggcctcgtgaagggcagcgtgcgcttcttccacatgtcccaccacacgccgccttggccgtcgatggtgccgttctcacctgtgatgaagacgtcctgcagaccgtggccgtggatcaagctcatgtatctcccgccaggcagctcgcgccctctcccgtacgacggcagcgggtcgatgagcggccagctcgacgtgtcctgggtggcgcggacgatggcgccgcgggcgag

SEQ ID NO: 219883 - DNA, 639 bp, Zea Mays
acacctctctcgctgcctttatttcctgttggcgacgctctcgccaggtcttcggcggcccgttcgtcggcgactagcgcctccgtttgccaggtcttcgtcgtccgttcgccgtcgactggtgcccagcagccaggtacatctggaagaatggtgatttaccttagcacaccaaaaaccgacaaggtatccgaagatggggaaaacgataaacttaaattcggactttcatctatgcaagggtggcgtgcaactatggaagacgctcactcggctttgctagatcttgacaatgacactgcatcctttggtgtttttgatggacatggaggaaaagtagttgccaaattctgtgcaaaatatctacacatagaagttctccataccgaagcctatgctgctggtgacctgggtgctgctgtccacagagcttacttaagaatggatgaaatgatgcggggtcaaagaggatggcaggaactccaagcacttggagataagataaatcagttcactggcataacagaaggcttgatttggtcccctaaagcaagtgattcaaatgatagacatgatgattgggctttcgaggaggtcgagctatgtgacgacgacgaattcattgttttagcatgtgat

SEQ ID NO: 219884 - DNA, 1726 bp, Zea Mays
caccccgcaaggccgcaacgcctccgctttcattcttctcttcccctcggcttcgagggttatttttatttctttctttccttttttcgtttttattttctttttattttcttttttcttccttttctcgttcccccgttggggttttgagctccgacgaaccctaataatcgccggggaccggcggccgatcgcccgccggcatgcaccatcagcagcggatgaagcaggcggcggcggccgcggccgcggcgcagcagcagcagctgatgcagcaggcactgctcctgcagcagcagcagcagtcgcaggcgcagccgcccttgttccccgggcaccacccgcaccccggcctcctcgccgcaccacagatagagcccatagtcagtggaaacctgcctcctgggtttgattcaagtacatgccgcagcgtgtatgttggcaatatccatcttcaagtgacggacacagtactgcaggaagtcttccaaagcattggtccagtagaagggtgcaagctcatcagaaaagaaaagtcatcctttggtttcattgactactatgaccgcagatatgctgcactagcaattttatctctcaatggcagacaactgtatggtcagccgattaaagtcaattgggcatatacaagtactccgagggaggacacatcaggtcattttaatatttttgttggggatctttgcccggaagtcactgatgctactttgtttgcatttttctctggatactctacttgctcagatgctagggttatgtgggaccagaaaacaggacgatccagagggtttggttttgtttctttcaggaaccagcaggatgctcaaagtgcgataaatgacttgaatgggaagtggcttgggaaccgtcaaattcgttgcaattgggcaacgaaaggtgctaatgctggtgaagagaaacagattctggacactaaggttgacctgtcaaatggttcatcagaatctggaaaagagaatccaaatgaagatggtcctgaaaataaccctcagtttactactgtttatgttggcaatcttcctcacgaggctaccatgaatgatgtgcacctgtttttccattcactgggggctggttcaattgaggaagtccgtgtaactcgtgataaaggctttggctttgtgaggtacagcacccatgaggaggctgcattggcaattcagatgggtaatggccaacttattggcgggaggcagataaaggtaccgcaagatcatgtctgggtgcagggtgacaatatctttgcttctaacgattcgaggcaatttggagctgtgccttatgggctgattacagggaagatcttttgccgggtttggccgccagagagttttggcgcaattgatgacgcaacgaagcagtcttaacgctgaggaggagccgaggaggtactgagagcacatggacccatattgtttgctcgcccccagagattctataatagccaactgcaggggggcccttccttgagctcgagagctttcgacgacctaccgcagcgcatttctacagcgaagcaaagagcgttgtgtgtcttgattgatgtcccgtgtttttacagttttggtgtgacaagttctgaaacccgtgtttttacaactacactacaacttcacatgcttattcgaaacatttgaactgatttgtcagtcctcgttttgcagaagggcgtgtctgtttgttt

SEQ ID NO: 219885 - DNA, 2038 bp, Zea Mays
gggcgtggtggtggtgggtgctttgactgcaggcctcggcacggtaggcacaaatcattttggccgctgcgtcgcgttgggagcagtattctactgtgcctgcgtcccgacaagcgaaaagaagagacgggggagggtgggagaacggataccgaaaggggtaggagagtgagcagccagagaacagggaggtagagaggaggaggaggtagaaggcgaaagaaggggaaccaaatcttggacgggaacacatagatttctttggtggaggaaggaggagggcaacaagaggaggttacaggtagcccaatagatctactgctgttgagggagttgatgcaaagctgagttgctgcgcgttggctttctttagagatggcttcagctggtgttgccccttctgggtacaagaacagcagcagcaccagcattggtgccgaaaagttgcaagatcacatgaacgagctaaagattagagatgataaggaagttgaagcaaccataattaatgggaaagggaccgaaactgggcacataattgtcaccactactggtggcaagaatggtcaaccaaaacagacagtgagctacatggctgagcgcattgtaggtcaaggttcttttgggattgtcttccaggccaagtgtttggaaacgggtgagactgttgccataaagaaggttcttcaagacaagcgttacaagaaccgcgaactgcagaccatgcgcctccttgaccaccctaatgttgttgctttgaagcattgcttcttttcaacaactgagaaggatgagctttatctaaatttggtccttgagtatgttccggagacagttcatcgagttgtgaaacatcacaacaagatgcaccaacgcatgccacttatttatgtgaagctttatatgtaccagatatgtagagcattggcttacattcatggtactatcggtgtctgccacagagatattaagccacaaaatcttctggtgaacccacacacccaccagcttaaaatatgtgactttggtagtgcaaaagttctggtcaagggggaaccaaacatatcatacatctgctcgcgatactatagggctccagagctcatatttggtgccactgagtataccacagcgattgacatttggtctgctggttgtgttcttgctgagcttatgctagggcagcctttgtttccaggtgaaagtggtgtggaccaactcgtcgaaatcatcaaggtccttggtactccaacaagggaagaaattaaatgcatgaacccgaattacacagagtttaagttcccacaaatcaaagctcacccatggcacaaggtattcaacaaaaggatgccgccagaagctgttgatctggtctctcggctactccagtactccccaaatctgagatgcactgctgtggaggcgcttgtccacccattctttgacgagcttcgagatcctaatactcgtcttccaaatggccgcttcctgccaccccttttcaacttcaagcctcacgaattgaaaggagtcccagcagacattgttgcgaaattggttccagaacatgcgaagaagcaatgctcttatgttggatcgtgagatgaccgtgccttgggactggaacctgaggtcgcaatcgtgcatttcccctgggatgttggatgatcttgaggcatgcgagcctgtcgttgaagatgcaaggttacctacttgtacgacgtacgccaatgcgacctgtgtagctcgtttgagacgactgaggaaatgtgacgcgcgcagatgctggttcgtaggacttcttttgctcctttgggagagggaggagtcataaactgaagccccggtttgtagaaaaatggcttctcgtgaaatgtttggtatagttcttcggtttcttaaaaactgctcttcgtgaaatggagtatggtgggctcttttatcgaagttggctgggcggctggggcacgtataacccaattaaatgagacattttttgagaggtctctaaagagttaagtgaaaaaaattaaggaac

SEQ ID NO: 219886 - DNA, 1982 bp, Zea Mays
gggcgtggtggtggtgggtgctttgactgcaggcctcggcacggtaggcacaaatcattttggccgctgcgtcgcgttgggagcagtattctactgtgcctgcgtcccgacaagcgaaaagaagagacgggggagggtgggagaacggataccgaaaggggtaggagagtgagcagccagagaacagggaggtagagaggaggaggaggtagaaggcgaaagaaggggaaccaaatcttggacgggaacacatagatttctttggtggaggaaggaggagggcaacaagaggaggttacaggtagcccaatagatctactgctgttgagggagttgatgcaaagctgagttgctgcgcgttggctttctttagagatggcttcagctggtgttgccccttctgggtacaagaacagcagcagcaccagcattggtgccgaaaagttgcaagatcacatgaacgagctaaagattagagatgataaggaagttgaagcaaccataattaatgggaaagggaccgaaactgggcacataattgtcaccactactggtggcaagaatggtcaaccaaaacagacagtgagctacatggctgagcgcattgtaggtcaaggttcttttgggattgtcttccaggccaagtgtttggaaacgggtgagactgttgccataaagaaggttcttcaagacaagcgttacaagaaccgcgaactgcagaccatgcgcctccttgaccaccctaatgttgttgctttgaagcattgcttcttttcaacaactgagaaggatgagctttatctaaatttggtccttgagtatgttccggagacagttcatcgagttgtgaaacatcacaacaagatgcaccaacgcatgccacttatttatgtgaagctttatatgtaccagatatgtagagcattggcttacattcatggtactatcggtgtctgccacagagatattaagccacaaaatcttctggtgaacccacacacccaccagcttaaaatatgtgactttggtagtgcaaaagttctggtcaagggggaaccaaacatatcatacatctgctcgcgatactatagggctccagagctcatatttggtgccactgagtataccacagcgattgacatttggtctgctggttgtgttcttgctgagcttatgctagggcaggtgaaagtggtgtggaccaactcgtcgaaatcatcaaggtccttggtactccaacaagggaagaaattaaatgcatgaacccgaattacacagagtttaagttcccacaaatcaaagctcacccatggcacaaggtattcaacaaaaggatgccgccagaagctgttgatctggtctctcggctactccagtactccccaaatctgagatgcactgctgtggaggcgcttgtccacccattctttgacgagcttcgagatcctaatactcgtcttccaaatggccgcttcctgccaccccttttcaacttcaagcctcacgaattgaaaggagtcccagcagacattgttgcgaaattggttccagaacatgcgaagaagcaatgctcttatgttggatcgtgagatgaccgtgccttgggactggaacctgaggtcgcaatcgtgcatttcccctgggatgttggatgatcttgaggcatgcgagcctgtcgttgaagatgcaagcgtttgagacgactgaggaaatgtgacgcgcgcagatgctggttcgtaggacttcttttgctcctttgggagagggaggagtcataaactgaagccccggtttgtagaaaaatggcttctcgtgaaatgtttggtatagttcttcggtttcttaaaaactgctcttcgtgaaatggagtatggtgggctcttttatcgaagttggctgggcggctggggcacgtataacccaattaaatgagacattttttgagaggtctctaaagagttaagtgaaaaaaattaaggaac

SEQ ID NO: 219887 - DNA, 2122 bp, Zea Mays
aaaataacaatttttttcggtggaacgtgacattgggcaagtcctttccttcaccgctaccgaagtctacttccattcctctccttcctaaccccgcgtcgcccacgagctcgccgtgccggcagaggcgaggacctcgccgaagcagaggccatggggcgaccgcagccagccagggctggcgccatcaacatcgaggcgtgcgcgcggccgatcgccgtcgaccaccgtatcagtctcccgtactacttccgcatcgcgggcagcctcctccgacaggctaatatatatcggaacgagagtaacttgctcgacctgtatgtcatccttctgagatactcgagcttgctgtgcgagacgattccgaagcatcgtgattaccatgccttcaaaaacttattgatattatcaaagagcttgagacattgaagccagttgtgcagcggcaggttgttgagcataacagaggaagtactgtggaatttaatactaatagtctaaatggaaactacggtacaactcgtaggatagagcagtgtactccaagctcttatactccacagacatttgtaggcagcagtaatggagcattgcaaaaacccttccatgctgggagacaagtggcatcattatcaagtgtacagaaacaatttatgaatctaccatatccaaaagaagaaacactagctagacactccatattaggacctaatggtcttaatggccggtggaatgggcctgttactggaatcaaggttcaatatccaagcaattttgaattaacacaaaatggtataacaagtttagtgccatccatcttgaaccaagatgatttgcatggttccaacactgcacctgcacctccacctccaagtagctcctcaaatgacaatgacaatatgaaatctgttctctctcttgatgatggtcgatggtctgtaccagcagaagaacacactccacttccttctgctaatttggaagaggagttgttccaattgaatatcaaacaaccttctcctccaccagttcttgcagaggtacaaagaccaatttctccatcaagagttgccgatccaacaccaggacttccgacctcaggaactgcccgatttcagaacttgcatgttccgatcaagttgatggagtgttttctaagggttgctgagtcaaacaccaaaagaagcttagaaacctgtggggttcttgctggtaccctgaaaaatagaactttttatgtgacaaccttaattattccaaagcagaaatcgacatctgatacgtgtgaagctacaaatgaagaagaactatttgaagttcaggacacatactcattgttcactcttggttggattcatacacatccaacacagtcctgcttcctttcttccattgacgtccacaatcattattcttatcaggtcatgctacctgaagcaattgcaatagttatggcacctactgacacaagaaaacatggtatatttcatctcacggatccaggtggcatgggcgtgatccatgattgtcaagagagaggtttccatcctcacaaggcaccacttgatgggtcgccaatatatgagcagtgctcccatgtgtacatggacaccgatataaagttcgatatgattgatctgcgacaaagatgacgaagctcacctttgggtttattttgcaacctatacttctcgcagttaaatcaattgctgccttatttttttcttagctcaagatttgtgaattcttatgtacgctgttgtacatagctattgcgttgtatagggaaaaccattgaggtaataatatcattggtaatgcttcgttgtaattcattccttcaacctcgcaaggcacgtttgtgcggtaagatgaggaagtggtgtctggattttatgccatgccaaatatttgacttaaaagggcatcaaatatcacaaattgttaaaggtctcatttcttagactatcttcattagactatcttcagtagacttcttatcccactctttattttaaacttcactctgcaaatagtgtaatctacagtacaaattttgcacggccgtttatatgacctgctagagatggacttagagacttatgatgcgtttggtttgttg

SEQ ID NO: 219888 - DNA, 2096 bp, Zea Mays
aaaataacaatttttttcggtggaacgtgacattgggcaagtcctttccttcaccgctaccgaagtctacttccattcctctccttcctaaccccgcgtcgcccacgagctcgccgtgccggcagaggcgaggacctcgccgaagcagaggccatggggcgaccgcagccagccagggctggcgccatcaacatcgaggcgtgcgcgcggccgatcgccgtcgaccaccgtatcagtctcccgtactacttccgcatcgcgggcagcctcctccgacaggctaatatatatcggaacgagagtaacttgctcgacctgtatgtcatccttctgagatactcgagcttgctgtgcgagacgattccgaagcatcgtgattaccatgccttcaagttaagagaaaaggcattttttgatcggcaggttgttgagcataacagaggaagtactgtggaatttaatactaatagtctaaatggaaactacggtacaactcgtaggatagagcagtgtactccaagctcttatactccacagacatttgtaggcagcagtaatggagcattgcaaaaacccttccatgctgggagacaagtggcatcattatcaagtgtacagaaacaatttatgaatctaccatatccaaaagaagaaacactagctagacactccatattaggacctaatggtcttaatggccggtggaatgggcctgttactggaatcaaggttcaatatccaagcaattttgaattaacacaaaatggtataacaagtttagtgccatccatcttgaaccaagatgatttgcatggttccaacactgcacctgcacctccacctccaagtagctcctcaaatgacaatgacaatatgaaatctgttctctctcttgatgatggtcgatggtctgtaccagcagaagaacacactccacttccttctgctaatttggaagaggagttgttccaattgaatatcaaacaaccttctcctccaccagttcttgcagaggtacaaagaccaatttctccatcaagagttgccgatccaacaccaggacttccgacctcaggaactgcccgatttcagaacttgcatgttccgatcaagttgatggagtgttttctaagggttgctgagtcaaacaccaaaagaagcttagaaacctgtggggttcttgctggtaccctgaaaaatagaactttttatgtgacaaccttaattattccaaagcagaaatcgacatctgatacgtgtgaagctacaaatgaagaagaactatttgaagttcaggacacatactcattgttcactcttggttggattcatacacatccaacacagtcctgcttcctttcttccattgacgtccacaatcattattcttatcaggtcatgctacctgaagcaattgcaatagttatggcacctactgacacaagaaaacatggtatatttcatctcacggatccaggtggcatgggcgtgatccatgattgtcaagagagaggtttccatcctcacaaggcaccacttgatgggtcgccaatatatgagcagtgctcccatgtgtacatggacaccgatataaagttcgatatgattgatctgcgacaaagatgacgaagctcacctttgggtttattttgcaacctatacttctcgcagttaaatcaattgctgccttatttttttcttagctcaagatttgtgaattcttatgtacgctgttgtacatagctattgcgttgtatagggaaaaccattgaggtaataatatcattggtaatgcttcgttgtaattcattccttcaacctcgcaaggcacgtttgtgcggtaagatgaggaagtggtgtctggattttatgccatgccaaatatttgacttaaaagggcatcaaatatcacaaattgttaaaggtctcatttcttagactatcttcattagactatcttcagtagacttcttatcccactctttattttaaacttcactctgcaaatagtgtaatctacagtacaaattttgcacggccgtttatatgacctgctagagatggacttagagacttatgatgcgtttggtttgttg

SEQ ID NO: 219889 - DNA, 1026 bp, Zea Mays
  misc_feature (1025)..(1026): n is a, c, g, or t
attagaggcagtttccaggaaccctaccagacggggtctaatcttttttaagagaataagccatcgcatctccagttgcagatgctcacttcggcttggcgcaaataattccggcacacaaaaaaaaaacgcaaggatttctcggttcctcttcctcctcgcgcagtcgcgctccccacttcaccgagcatcccgaaaaaaagctcggccactgcgccatctcgcccaccaagcaccagccaccagcagcggcgccatggccaccgcgccctacgcctcctccctcttcctggcttcctcccccatctcaactgcgccacgagccagcgccgggtccttccctccctccgcgcagccgttctccatgcgcctccggcctaggccgtcaccagccgtcgcggccgccgtccaggcggagcaccagcccgcggtggccgcgacgccgaagccgcccgcgctaccgttccgcgtgggccacggcttcgacctccaccgcctggagcccaacctcccgctcatcatcggcggcatcgacatcccccacgaccgcggctgcgaggctcactctgacggagacgtgctgctgcactgcgtggtggacgcgattctcggcgcgctggggctgccggacatcgggcagattttcccggattccgacccccgttggaagggcgccgattcttcggtgttcatgagggaagctgtgaaattgatgcatgaagcaggctacgagctgggcaaccttgatgctacgctgatcttgcaaaaaccaaaaattagcccgttcaaggagacaatcagattgaatctgtgcaacctacttggggcagatccatctgtggtcaatctcaaggccaaaacgcacgagaaagttgacagtctaggggaaaacaggagcatagctgctcataccgtagttctcctgatgcggaagtagaaaaaaaaacaaatagtacctaattgtatcgtgctacaagaaaaaggtcgttaagttatacttgcccttgttaaatgctctagccagnn

SEQ ID NO: 219890 - DNA, 1113 bp, Zea Mays
attaattacacaaaaggctgaatggttaggttgctttcagagattcgtcaccgaaacattgtaactctcattggttactgtcaagaagggggtctacaaatgctggtgtatgagtacctgcccaatggcagtgtctgtggccatctgtatgataacaggaaaggctctgcaacacggcttgagttcaaacaaaggctctcaatagctattggggcagctaaaggtttgaatcatctgcacagtcttgatcctcctttgatacacaaggacttcaagacaaacaatgtgctggttgatgaaaatttcattgcaaaggtggctgatgctggacttgttaggttaattagaggatctgacgatgccggcccatcgcgtgggttcagtaacagtgtttaccaagatccagaggtacagtcgatgactcagttctctgaaagcagtgatgtttacagctttggagtttttcttttggagctaattactggcagggaagcagcttccttgatacctacagagtccagagaatatttggcacactggatggaagcgcatttcagttcaaatgaactgattgacccaagattagccggcaacttcactgcagaaggtatgaaggagcttgttggtctggccttccaatgcttgaacccatcatcaagacgccgaccgaggatgaggcttgttgcgactgaactagaccggattctagagacggagatgtccatgacaacgttcatgggcgacggaaccaccattgtcacgctcgggagtcaattgttctcgtcgtgaagcgacgttgggattgatttcatgtctgctatttgatgacatgatgattgtgtgtgagagcctaacaacagctattgtttctgccatgctgttcaggctctgcattgttatgaaatgccatgtatggtcatttttaagcttgtcatggttgataggtaggagtgagaagaaatagagctgtatgtatgtctcttttttcttctttttgttgcatgggagaagaattgtatgtaaatcttttagattgttaactatccttcaatgtatttgcagattgttcttcctttcggtgttttaatttctgaaagggctaacttgtgctaa

SEQ ID NO: 219891 - DNA, 1024 bp, Zea Mays
cgacgaaagacgcggaggttggtggtgaaggaagaaagaaaacgaaaggcggcctcccactcgcagtcgcagtcgcaggttctagaccaccaaacccagcggctcccgctcatctcagttcggcttcggccttcgcattcctctacagatttcgcagttttgctgggggtaactacggaatggggggcggatccggatctttcctcaaggtcttggtcaacaacatggatgtcctcgcggggcctttggtttcacttgcgtatcctctgtatgcctctgttagagcaattgaaacaaaatctgctgtggatgatcagcaatggctcacgtactgggtgctgtactcatttatcactctattcgagctcacctttgctccggtactcgaatggcttcctttctggtcttatgcaaagctgttctttaattgctggttagtattgccacagttcaatggagctgcacatgtttatgagcattttgtgaggccaatgattgtaaatcagcaagttgtaaacatctggtatattccaaagaaggatgaatcaagtaggcctgatgatgtaatttcagctgcacagaggtacattgagcaaaatggatcaaaagcgtttgagaatcttgttaacaagcttaaaagactggtggagcagggctgtggagaaggttccccgagatctccaatcaggcttcaattctctagtaattcttggcgcttggagcctttggcgtcatcgcaacgactgtgtgttcaatgggaggtcgccgagcctagcaagtgttctcaccctcgctggtgatgagcttaggatgtggtgtcttgccggagctaaaaggttgaacctgctttcagctgtagtgtttgtgtttgaccccgggtgataatcttgtgccttgttcagagtgtttgtgtgtggtggctgtgctgtgtcttgttgtgtcgtgtggattgagttgtgtgtgttgtgttgtaccttcttctatctattaatggaaagatacgcagatttcctgcgtgttcgat

SEQ ID NO: 219892 - DNA, 1728 bp, Zea Mays
accgatagctggcttcaaccctggctttgatgatgatacacaggtttttcagcatatctcttcttgcattttttgtgctttggtatacctctacaccagggcagtccggacctacctcccagtcaagtgaaggaggttcagataaacctgcaggatggagaaaccagagctggttctacatagttgtgagaataagtttgttcctttgggttgctttgctaaatctcattaccatatcgtcaacttgggcaagggtaattgatgtcatggacagtgagtcaggttcaaggttatttggttttattggagctggtgctacgctagggcaactttttggttcattgttcgctgcgagtatggcatggctgggaccatttctgctcctattttcttcactcttgatggaacttgctgccctgtcatcaaaaggaatttgtcttgatggaaatcatgcttcggctgaattacatcaaacaggggcaggacaagctcctaataccatggctgatgatgaaatttcttcactagtcacttcacctagacaacctgtccaatctcaagaatccaaacctgaacttttcataatgtttgaaggtttctggctgatcttgcgatcaccctacctgatatacatatctctgtttctttggttaagtgcagttgtctcgtctgtattttactttcagaaagtgacgatagttgctactacaatatcaagcccaacagccagaaggagaacgtttgctctgataaacagctttatagcagtttttattcttgcgggacagctcactttgacgggtcatattcttacagtagctggtgtcacagttgctatctgtgcatctccctttgttgctgcctcaaatttggttgcccttgctgtatggccaacttgggttgccgtggctgtcactgaaacaattagaaaggtaacaacttatgttttgacaagacctggaagggagttattattcactgttgtctcacaggatgaaaaatacaaagcaaaggtctgtatagatgtgattgtccagaggcttggtgacgcaacagctgctggaatttacaggtggttgttcagtagccttgagaagaaaacatccaaggtcaccctgtttgcattgccgctctgcttcctgtggcttgtcattgcatttcacttgggccggctgcagactaatcttgccaggcttcaggctgcttctgctccgtcctactcctgaacaggaagctgctgcgagtgtctttggagatgtgcttccagaatgtttgaacaggcatggcgagaagtggttgtcatcaatagttagttacttagtttacacgtcttgcaggaatttcaggttttattgatggagaaaccttcagaatacagtagcaaccattactacactacagaagagtttagcatacacaaggggggagaaatagtacaccatagacatagactagcacactatatacaaattcaatatcccatttcgatgtgcactgcaggaaactgtagcatgcaatctgtgagtttattataaatgatgtagtagtagggccggatttgttgggcactgctctgcctttggaactactgctgtcctgacagacactgcatcattctgcatttcacctaccccagttcccagactaaatggctgtaaagacagattcataaaaatgtctgctttatggaacatgaacatttctttatagacaggaggagtaaagaga

SEQ ID NO: 219893 - DNA, 2213 bp, Zea Mays
gacaaatgcttttacttcgtaccctagatccatacaaatccaagtatatataaagatcttgtataagattagttacccttattcggagcctctcaccaaattttacataagcaatacgctgaccatcaccataaagaagcatcgttaggaatcaagatggccgaaagaatttctcacaaacacaagggcacctcttctcttagattgatgggttacccaagattaaactactgtcctcgcctttctttctactgaacttttcaccgcatgtgttgattcatcttcagatccgtcgaaatccgatgaccgtacccgcctctgatgttcaggtccagaagtagcaacccttcgtccgtagcgcacttgacatcgtccccgtcatgaactccatggtacggctgaaagtctagattgttcgctctgagaccgtcctcggacatggctttcaccagctcgccgttgttctgctcgcacgcctgggtcacgttgtccatgaagcctgagagcgcgaggttgaagtccgtcagctgcgacctggttgcttctaggtttgcggctccagtcgcgtggtacgagaggttgctctgggccttctcgagtatcgtctgcaagtatttgccttgcgcctcgatccgcatctgcagcttcttctgaacctgcacttggaaaacgaagagatggaatgctaggaggaggtactggtgtggagaaattgatgccctgcgccgcgaatgctgtgaggagagcagaaaggaaaaaaaaatgtaagatttgggaaaatgattttatgttatcccttccttactcaattctagcattttattactagtaaattcagtagtcgtatgtatttgcaattgcaaggtacataccccctctgccggcgtccaaacccgtgtctttcttggtctgctttccaagcctgtatttctgcgcgcaagagatcgtcaccagcaagacaacaagggcgagacatcgccagagaaagcgatacatgcgcagcatctgagatcgaagtagtagtagtcgtagtaggtgggtacctggaggtgactcttcaagtggtacaaggtgagccctttcattcccatcagccgcagcacggacttgggcgtcgcctctgtttgccgcgcacagcacaatcgaaacagaagttgtaatggcgaccagaattaaagaaaaaaaaggatctgatacaatacatgatcagtaaaaaaaaagcatgatcggtgaagctgttaatcggcggaacaccatgcgtggtcatcatgtagcagagacgcagttagatgttaatttgcgtgagcatgcatgctgctgttagcgtcgttactgttgcaacgaactgatgtgagctttgggctgtgtctaaagtctgaaaaatccatgcatggcatggtggtggtggtggtagtacaagaagagagcatgcaagcagcagatcgaggagggcatgcggtgtgcgggtactcactgtctgccccgccgagcttggtgacggcctcgacgaagcgctcgtgcaggtcgggcgtccaccgcagccgcggcttggggtcccgcgacagcaccaccccgcccatcggcccagcgccgccgccgtacccagccctctccatcccatcgaacatgttcatcgcgcgcgtggccttgtgtctctcgtactcctagctccgctcccgctgccggattgtcgatcaccgcgcgaaacagatagtagctcgagcagcaactagctagcaaccagcttccgcaggcacacgcacctaggctaggccaaggcagctgccgcacggcacggcgggcgcgttgtgaatctggtgctctcggggccgggggagagatcagagaggtagcgtaggatttcggcgaagcccgaggcggataccggcctgacgggaatgtgcgatgagtgtcgcgtctgaaagctgggcggaggagaacaaagatagagagaggaagaatatgtagcgagagaaagagagagagagaggagcgtcgcccgagcgcatccgcatcgggcatcgccatgccatcataatcatcatgtactcacctcacctcaccctcactcatgtgttcgtggaatctcggggagccttgtgccggggggcaagcccggccggaacaaaactaaaacaaacgccaaggacgcccaactgctgtgcgccgcgtcgtcaccgccgcccgggactcgtcgggaccgtgctcccgcg

SEQ ID NO: 219894 - DNA, 1539 bp, Zea Mays
cttttacttcgtaccctagatccatacaaatccaagtatatataaagatcttgtataagattagttacccttattcggagcctctcaccaaattttacataagcaatacgctgaccatcaccataaagaagcatcgttaggaatcaagatggccgaaagaatttctcacaaacacaagggcacctcttctcttagattgatgggttacccaagattaaactactgtcctcgcctttctttctactgaacttttcaccgcatgtgttgattcatcttcagatccgtcgaaatccgatgaccgtacccgcctctgatgttcaggtccagaagtagcaacccttcgtccgtagcgcacttgacatcgtccccgtcatgaactccatgcctgagagcgcgaggttgaagtccgtcagctgcgacctggttgcttctaggtttgcggctccagtcgcgtggtacgagaggttgctctgggccttctcgagtatcgtctgcaagtatttgccttgcgcctcgatccgcatctgcagcttcttctgaacctgcacttggaaaacgaagagcgcatctgcaagtggcgtttctctgatccacgttcagaaacgataaggcgaacggaaatgggagaaccgtgacagagatgaagaatgatgtaaatttacacaaatggaaaccatttgtaaacaattcctttttttttctctctaaaaacaagtagttcaaacatcacagtgagtgatctgtatattgtatgcagcctagcagacatggttgctccagttgggtgacagaaatactgaaacagtccgattctgaaatcctaacccagcatttaacttatatcatatatcacttcattacccgctgtttctgtgttgtttttgtagcattaaaaaaaatccttctgcagcttattaatcaagtaatcaacgccacaactccaggctttgacacattagggttagtttgagaactccgttttcccacgagattttcattttccaaaggaaaattagttcattttccctggaaaatagaaataccttagaaaaatgtagttcccaaactagtcccgtccctttctttttttttcgtgtgcgaggtcaacgtccctttcgtaagactccgtcttctaaatcattacccgaccagtacagtttaaataagcacgctttgattaagaattttgcaagacatttgtcttttgcaagaaaagaccacaaatagcaaatgtagattttatcgacagtatgatctataacttttggtttcaacaaaaaagaaaaaagcacgatctatagatgtctgatacacaaatcttatttcagagcatgccgactgcatgctgctgctatttcgttctattgtacttcatggccattggtcctttttagttttgctaatgcaacataatcgagcttctagattgttagtaaagaactattggtgtctcagggagaccgcgaatgcatgttcttttgtactgatgctaaaggaagcatgcaggatatgattttgggttttgacacctactcaccc

SEQ ID NO: 219895 - DNA, 325 bp, Zea Mays
atggcccgcgtgtatgttggcaacttggattcacgggtgacttctggggaactcgaagatgagtttcgtgtgtttggagttctgcgaaggtaagaatggatggagagttgaactatctcgtaattccagtggtcgtggtggtcgtgatcggtatggtggatctgagtcgaagtgctatgaatgtggtgagactggacactttgcacgtgaatgtcgcctgcgcattgcctctggaggtctaggcagtggaagacggcgcagtcgcagcaggagcaggagccgcagcggcagccctagataccgcaggagcaggagccgcagccgc

SEQ ID NO: 219896 - DNA, 1395 bp, Zea Mays
atctgtcgagcctgcaatttcaccttcatcaccaagccccactcattgtagttggtcttggtgagcacgggtgtgccactgctggactccttgacgacggtctagacgatggggcccatggcggccatgacgtcactctgggttattggtgatgagagtagtactggacagaagcaacctcctgttcttgtcatagtgttgcagtttataactgcaatggttgttatggacacatggcagtacttcatgcacagatacatgcacattaacaagtttctgtataaacacatccattctaagcaccatactcttgtagtcccttattcctttggagctctatacaaccatcctcttgagggccttattttggacaccattggtggtgcactctcattcctcgtctctggtatgactccacggacatccatattctttttctcctttgcaaccatcaaaactgtggatgatcattgtgggctgtggcttcctggtaatatcctccaggcgctgttcagcaataacagtgcttatcatgacattcaccatcagctctatggaaacaagtacaacttttcacaacccttctttgtgatgtgggacaagattctcggaacttacatgccctactctattgaacaacgaaaaggaggggggatcgaatcaaaaccagctaaactcgactgagctgaggataccaagactgattagtacatgcatgcatagtttctatttttttttttttgacttgtccaatactcatgccttgtggtactgctgactgcgcaaatgatgtacacaccctgtgtcataacttcatatagtgaggctgcttttgctctctacatttcttgttttgttttttagggtgttctatcttgtaacaagatacagtgagtaaagtattgtaatgtaccaaagaatactcaacaccacttggatttgtgttctgttgaattttctgttcttccatccgtcattttgttcggaagttgatattggcaatggccctctactcgtgcgtcctgttgttaaacaaagaaagttgatattggcacatggcacttcatatagcctttgctcattccttctttacttgtggtacaattaatagttgatttgctcattaacctacaaattattgagttctattggtttgctttaatttggtcatctgaagttcttgtcaggttacatcgcttggttcgctttaatttagtcttctgaagttttttttatcaggttatatcgcggccggaagtttgatacacactgaattttccattaaaagcaacagataagaattttgtgggggcaatgtattaatattagagcagagctagtgttggaggtttttatgagtggggtctagggaaaggacggatcatgatgttcatg

SEQ ID NO: 219897 - DNA, 723 bp, Zea Mays
gagatatgcgccggtgtcttccactccgtccctgggccaaccgggtggtggtgtcagcgccggtgtcttcctctccgtccctgggcttgggtttccatggcggtggcgagggtaacgccgacctcagccctattactcggaggtccaaccagattaatggttaagccatctgaggctgaaaagaacttagctcaggcaaatgtgacatcaggtggtgccgcttcaggtggagcaagaaagttgtatgttggcaatcttcactcaaatattaccgaagaccaattgagatagatgtgggtccgacccatgctccaatgtcgttgcctcctatgagctcttggtcccatgagctgcatgtgggccatcctcgtcgtatcagcactatgcccctgctggccggctgcgtagcgaacacacagaggaacgctaaatgtagcacgtgtagacagcgtccggtattttaccgaaggctttaccgtctgttgctggaccagcaatagagctcggcgtcctgtaaatttggcggacaggaccacatacaggtccttgttggacacagtcttagtcctgtgagttccaggttttcgcttgtggtacctatgaacatgaaacctgtttactttgaggaatgtactttatttccatcttaagttagtctattcaaacggaatatggatatattaaccgaaattttctgcagtagcatagatcaatgacttggac

SEQ ID NO: 219898 - DNA, 1288 bp, Zea Mays
caccgcccgcccccctcccccgagatatgcgccggtgtcttccactccgtccctgggccaaccgggtggtggtgtcagcgccggtgtcttcctctccgtccctgggcttgggtttccatggcggtggcgagggtaacgccgacctcagccctattactcggaggtccaaccagatagccttttgtacttctacagtgctgcgagagcaaggagagtaggagcccaaagccccaaacgctctttgtttcgctctgcgtgcatgcacgcgtgttcgatgcattaggacggactttgaagaggctagagcaacagttaccgtgtagttaatctagctgttgtatctaacttagatatcaggctgctgaaattgcttaaagaccattaatatctctgatatcatggactgttatttcctttccattctgaagatgcaaggtcaattccctcactccatcaagcaaatgtgtttacttatgagattgagatgcgagcttaagttgctcacagtattcaaataaaatcacctacttattttgctcctgaagtaaaccatgggcgattctcttcattagttcaaacaaacacatctactcatgtacccttttctggtggagctagagaacaacaagttcactttactcctcaaccaaaccaacactttccatcgctgcattatattttatccgccagcttatatctttcactgccctttctcttggtaatggttaagccatctgaggctgaaaagaacttagctcaggcaaatgtgacatcaggtggtgccgcttcaggtggagcaagaaagttgtatgttggcaatcttcactcaaatattaccgaagaccaattgagatagatgtgggtccgacccatgctccaatgtcgttgcctcctatgagctcttggtcccatgagctgcatgtgggccatcctcgtcgtatcagcactatgcccctgctggccggctgcgtagcgaacacacagaggaacgctaaatgtagcacgtgtagacagcgtccggtattttaccgaaggctttaccgtctgttgctggaccagcaatagagctcggcgtcctgtaaatttggcggacaggaccacatacaggtccttgttggacacagtcttagtcctgtgagttccaggttttcgcttgtggtacctatgaacatgaaacctgtttactttgaggaatgtactttatttccatcttaagttagtctattcaaacggaatatggatatattaaccgaaattttctgcagtagcatagatcaatgacttggac

SEQ ID NO: 219899 - DNA, 1615 bp, Zea Mays
caccgcccgcccccctcccccgagatatgcgccggtgtcttccactccgtccctgggccaaccgggtggtggtgtcagcgccggtgtcttcctctccgtccctgggcttgggtttccatggcggtggcgagggtaacgccgacctcagccctattactcggaggtccaaccagatagccttttgtacttctacagtgctgcgagagcaaggagagtaggagcccaaagccccaaacgctctttgtttcgctctgcgtgcatgcacgcgtgttcgatgcattaggacggactttgaagaggctagagcaacagttaccgtgtaggtgagctgaatgaaattggccaggagaggaaacaatcggtctataaaaaagtttatagctaatttagataagatcatactttcttatgattgaataattctctgtctgtgttctaactgcgtcctttctcagtgttatactgtcccaatttacagaacaacagatgaaccgtaatgagtcattccgaagatagttgaagtccagtgttattaccgcaattaatatctacctctccacattatgccccttatcttactccatcagtacgaatggctgatattaatgtgtctcattttcagttaatctagctgttgtatctaacttagatatcaggctgctgaaattgcttaaagaccattaatatctctgatatgtaagtgcctgtgaattgccctatatgcttaattacttcagtatgataaatgactcatttttgtgacaatgcttttcgatgatgtatggaagcatggactgttatttcctttccattctgaagatgcaaggtcaattccctcactccatcaagcaaatgtgtttacttatgagattgagatgcgagcttaagttgctcacagtattcaaataaaatcacctacttattttgctcctgaagtaaaccatgggcgattctcttcattagttcaaacaaacacatctactcatgtacccttttctggtggagctagagaacaacaagttcactttactcctcaaccaaaccaataatggttaagccatctgaggctgaaaagaacttagctcaggcaaatgtgacatcaggtggtgccgcttcaggtggagcaagaaagttgtatgttggcaatcttcactcaaatattaccgaagaccaattgagatagatgtgggtccgacccatgctccaatgtcgttgcctcctatgagctcttggtcccatgagctgcatgtgggccatcctcgtcgtatcagcactatgcccctgctggccggctgcgtagcgaacacacagaggaacgctaaatgtagcacgtgtagacagcgtccggtattttaccgaaggctttaccgtctgttgctggaccagcaatagagctcggcgtcctgtaaatttggcggacaggaccacatacaggtccttgttggacacagtcttagtcctgtgagttccaggttttcgcttgtggtacctatgaacatgaaacctgtttactttgaggaatgtactttatttccatcttaagttagtctattcaaacggaatatggatatattaaccgaaattttctgcagtagcatagatcaatgacttggac

SEQ ID NO: 219900 - DNA, 1345 bp, Zea Mays
gcatccgcgaccaccgcccgcccccctcccccgagatatgcgccggtgtcttccactccgtccctgggccaaccgggtggtggtgtcagcgccggtgtcttcctctccgtccctgggcttgggtttccatggcggtggcgagggtaacgccgacctcagccctattactcggaggtccaaccagatagccttttgtacttctacagtgctgcgagagcaaggagagtaggagcccaaagccccaaacgctctttgtttcgctctgcgtgcatgcacgcgtgttcgatgcattaggacggactttgaagaggctagagcaacagttaccgtgtagtgttatactgtcccaatttacagaacaacagatgaaccgtaatgagtcattccgaagatagttgaagtccagtgttattaccgcaattaatatctacctctccacattatgccccttatcttactccatcagtacgaatggctgatattaatgtgtctcattttcagttaatctagctgttgtatctaacttagatatcaggctgctgaaattgcttaaagaccattaatatctctgatatcatggactgttatttcctttccattctgaagatgcaaggtcaattccctcactccatcaagcaaatgtgtttacttatgagattgagatgcgagcttaagttgctcacagtattcaaataaaatcacctacttattttgctcctgaagtaaaccatgggcgattctcttcattagttcaaacaaacacatctactcatgtacccttttctggtggagctagagaacaacaagttcactttactcctcaaccaaaccaagtggtgccgcttcaggtggagcaagaaagttgtatgttggcaatcttcactcaaatattaccgaagaccaattgagatagatgtgggtccgacccatgctccaatgtcgttgcctcctatgagctcttggtcccatgagctgcatgtgggccatcctcgtcgtatcagcactatgcccctgctggccggctgcgtagcgaacacacagaggaacgctaaatgtagcacgtgtagacagcgtccggtattttaccgaaggctttaccgtctgttgctggaccagcaatagagctcggcgtcctgtaaatttggcggacaggaccacatacaggtccttgttggacacagtcttagtcctgtgagttccaggttttcgcttgtggtacctatgaacatgaaacctgtttactttgaggaatgtactttatttccatcttaagttagtctattcaaacggaatatggatatattaaccgaaattttctgcagtagcatagatcaatgacttggac

SEQ ID NO: 219901 - DNA, 1515 bp, Zea Mays
cgggcccctcccccggcaacagcttctgcatccgcgaccaccgcccgcccccctcccccgagatatgcgccggtgtcttccactccgtccctgggccaaccgggtggtggtgtcagcgccggtgtcttcctctccgtccctgggcttgggtttccatggcggtggcgagggtaacgccgacctcagccctattactcggaggtccaaccagatagccttttgtacttctacagtgctgcgagagcaaggagagtaggagcccaaagccccaaacgctctttgtttcgctctgcgtgcatgcacgcgtgttcgatgcattaggacggactttgaagaggctagagcaacagttaccgtgtaggtgagctgaatgaaattggccaggagaggaaacaatcggtctataaaaaagtttatagctaatttagataagatcatactttcttatgattgaataattctctgtctgtgttctaactgcgtcctttctcagtgttatactgtcccaatttacagaacaacagatgaaccgtaatgagtcattccgaagatagttgaagtccagtgttattaccgcaattaatatctacctctccacattatgccccttatcttactccatcagtacgaatggctgatattaatgtgtctcattttcagttaatctagctgttgtatctaacttagatatcaggctgctgaaattgcttaaagaccattaatatctctgatatcatggactgttatttcctttccattctgaagatgcaagtaaaccatgggcgattctcttcattagttcaaacaaacacatctactcatgtacccttttctggtggagctagagaacaacaagttcactttactcctcaaccaaaccaacactttccatcgctgcattatattttatccgccagcttatatctttcactgccctttctcttggtaatggttaagccatctgaggctgaaaagaacttagctcaggcaaatgtgacatcaggtggtgccgcttcaggtggagcaagaaagttgtatgttggcaatcttcactcaaatattaccgaagaccaattgagatagatgtgggtccgacccatgctccaatgtcgttgcctcctatgagctcttggtcccatgagctgcatgtgggccatcctcgtcgtatcagcactatgcccctgctggccggctgcgtagcgaacacacagaggaacgctaaatgtagcacgtgtagacagcgtccggtattttaccgaaggctttaccgtctgttgctggaccagcaatagagctcggcgtcctgtaaatttggcggacaggaccacatacaggtccttgttggacacagtcttagtcctgtgagttccaggttttcgcttgtggtacctatgaacatgaaacctgtttactttgaggaatgtactttatttccatcttaagttagtctattcaaacggaatatggatatattaaccgaaattttctgcagtagcatagatcaatgacttggac

SEQ ID NO: 219902 - DNA, 2824 bp, Zea Mays
aagaaacgggaaagggcccggcccaccgtctacctacggccgccctcgagtatttggagccgctccgcttccgccagcgcccagcagagcagcctgagccagcagcccgagttcgattacctcttcaagctgctgcttatcggcgactccggcgtcggcaagagcagcctcctcctccgtttcaccgccgactcctttgaggacctttcccccaccataggtgttgacttcaaggtgaagatggttaccattggtggcaaaaaactcaagcttgccatctgggacacagcatgactccttttcctcttgggtggctgtgtgtgacacacaggcgagatggctggtggtacgagcagcatggcaacgtggcggccggcatggcttgtgcgcggggcgataacgcgggagaccagtgtgggctccatcctctcctggctggctcaacttccaggcatctggggaggagcattagggctgcagtggcgcgtggtgagggctgtggcggtgcggtgcgggacagcaagaagcctcgttgtgcagcatgaatggatgttgcactttcttttctaagcaataggatggtgttggatggtgcatagaggcacgaaagttacatggggacttaccagagggcagaggcaggttaccgaatccgagatcaataataccataaaagaatcgttttggtctgtccttttcccccacaattatttcgaagagctaaccattccactggacagtgtcattctcgttctgattttgcccagctttatcctatctatttatacatcttccattctttgagtatgatcgtgtatttgttatcgctgatgattacctgttatgcagccggacaagagagatttaggaccttgaccagctcttactacagaggggcacagggggttattatggtgtatgatgtcactcggcgggaaacgtttactaatctttctgatatatgggcgaaggaaattgacctgtattcaaccaaccaggactgtataaagatgcttgttggaaataaagtagataaggaaagtgagagagctgtgacaaaaaaggaggggattgaatttgctagggaatacggttgtttgtttctagaatgcagtgcgaaaacaaaagtaaatgtagaacagtgctttgaggaacttgtgctaaagatattagacacgccaagcctcctcgctgatgcttcgtctggggccaagaagaacatcttcaagcagaagcctccggaagccgatgccgctgcaagcagctgctgttaacatgcttttgccatgctaattccgcgtcctcccgtggatgatgacgatgatatctttgtttggtgtgtcggtttattgtttcttcttcttttggtcctgtatatgctgaatttattacacccacacataactgtacgttggcagcagctatataatatatcgttttttgttgtttctttttgttttgtttaaaagagagagagagagaatagtatatgttttgttttgtttccgtgctccagttgagagagagagagagagagaaatgaagatatttgagaggagtatggatggattcacgggtgggcaagggcaagggaagaggccaggccatcgcaggcaacacccgtgccgtgtgtcgtgtcgtgcgaggtcacgggtcactccagccaaaaaacagatgatgatgatgatgatgtgccatgctgcggggcaacaagaaactgaacaccacggaaatccaaggaccagccagcgcccgccctcgtcccttttgtatgtatgtgctccctctctccctccctccctttgccatttgccgatttgggcagcagcaatgacacttccctgcgccggcggctgcgagatccaagccagcggcattaactaccgcatcgccgtctccacccgacctctcaaggtctggagcagatcagacgacgacgtccattcccaagaccaccacagcgtcgtccgccaggtgctccgggacgtctcctgccgcgcgcgccccggcgagctgctcgccatcgtcggccccagcggcgccggcaagtccaccctgctcgagatcctcgcggggcgcctctccccgtccccgccgccccacctgctacgcatcgacggcgccgccgcccacagcgccgacctccgccgcgtctccgcctacgtcacccagcaggacgtcctcttcccgctgctcaccgtgcgcgagacgctgctcttcagcgcgcgcctccgcctaggcgcgcgcctgccctccaaggacatgcacgcccgcgtcgaggcgctcctcgacgacctcaccctgcgccgcgtcgccgccaccaggatcaaggacctctccggcggagagcgcaggcgcgtctccatcggcgtcgaggccgtgcgtgacccgcccgtgctcatcctcgacgagcccacctccggcctcgacagcgcctccgcgctccacatcgtcggcgcgctccgcgccatggccgaggcgcgtggacgcaccgtgctgctcagcatccaccagccgggagcgcgcatcgtcaagatgttcgactccgtcctcctgctagccgccggctccgtcctccaccatggcaccgtcgaccagctccgcgccctgctcggggacgcgggccttcacctgcccccgcacgtcgatgacgtcgagttcgccatcgactccgtggacgcgcttcgccgccacgccagcagcagcctgcaggcgccgtcctccggagaccgagagggccggtgcacgctgcagcgtctgttccagctgcacggcaagcaggtggcggacgcccccgtggccgtgaccatgatggctagccgct

SEQ ID NO: 219903 - DNA, 4006 bp, Zea Mays
caccatttcaccaaccgttcactccctcgccggcgcacctcgccggcgtcgtgtcctggcacaccaccaccagtgcacggcacttctatcttcgtctccttctgccctcccatccttcattctgccgctcggaacgttggatgtgtgctgctccagatcacgcgggagggcaataagccctagctcggccatcccgggatggaggcggccgcctccagcctctcgacgctgctctccaccttgcgcgtggacgggccctggacgcctccgggaacctgggagtcggccatccctgagagtggcgccgctcgcgttacagacctcggaggacgcctgcagccgatctacgagctcgcatcggttactgatgatgctttgattcatctggccttgcatgcgctgtatggtgtcaaatcatcgttagatgagattgaggagctttcagtgctgttctcctcaaatccagctgacagaacctctaaccgtgttacaaatgtgtggttacgttcctcgagcaccatatctgtggggagtattctcaaatctttacgctctacaggtcttgtggtcttcttcctttgcaagtttgtgcacttttatcttgtccaaagtcgagaaatgaattgtgcaagtagagaagttcatgaacatgaacatcctggtgataaagacactgaacagcatcggccttacagtctagtaaaccaagcatttgcagctgcagttagtaaggtcctcgaaggctatttctgttccttgaatactttaccagcatcaattaggcttaggcgttcagttggccaatctggtataccttccaagacttcagatggaatgagttgtaattccactgcagaagtcactcttctggaagtttatctacacactgaagagttaagaaggcatgttaaatcccttggaaatatttgtttccctaagtttgcaggtgctacattgtgccatgatggtttggatactgaagcaagtgtggagtttgagaatttcccacggggcactgatttgctttcgtatttgtatgtctatattcgtgatgccgatccagttcactatggtcttctgaagtatctttttattcgttcctgtgagccatactttaacttcattaagtcatggatttaccgagcttctgttgatgacccttatgaggaatttctcattacacaaactgaaaataagggtgttcaaggagtctcttctgacataacagatgagttcacccttttcccgttaaagcaagaatactttatttctcagaagtcaaccatgaagcttctttcttcccaatccagttcagtttaccatggaataaattgggcagtccctattgatgagtgcgagaaagatgacagcctaagttgcaaacatgttcctgtgcactcacagaatgctgaacatactgcggtgcttgatggtttagaactggattatcagtatagtcagttttcgccatttgacaggtttatgaagagaaccagttgttcatctgaagacatgaattcagttgagttcttatatactgatcataaaaggtcagtagagaaagtatcacatggtaatgcagttaatgcattacattctgaatcagggcctactaaactatcaaacggcaaaaactatgagaagtttggtaatataaatcagccatggtataccagtattccttacaatctcagtctgaaccccatactgaagaatgcagcttgttactgcacggagagtgatgtgcaacagaaaagcaagaaccaatcacttgccagctttgattttgagtcagtcatggatccatgtgaagtatattgtgcaaggagcacatcctgccttgttgagtttgtaaatggagcaacaattatacagcccagtactcatccttgtgaacggcttgattgttctcccaagcttcttcaagctcagacaagaagtcaggcatcccttacttcctcaggagagatgtcaacaagagacagtcttcagaaaaatgtttatggtggggcattctgggagagatcgttactatataatgataaatcaaaagaaaaaccagctgtggactttagttcacagtttgatatgccccttgatatagttatcaacaagtgcatcatggaagaagttttgcttcagtataaatatgttagcagcttcacaatgaagttgcttgaggaaggttttgatctttgtgcacatctgctagccctgcggcggtaccatttcatggaaatagctgactgggcagattcctttattgctctaatttataataagaaatggtcatttgttaaatctgagcagaaaagatcggagattcaagggcttatggactttgctttgcagagatcttcatgtgattctgatccttataaggaaaggttatttatatacatcagggagccacctgttgattcttttgatgcatctgcatgtgatcttgatttgctggatgatatcttgttgggttataaagctgaatggccagtgaatattgttattacagaagacacacttaaaatatatgctgaaatattctgttatcttcttcaagtcaggtttgcagtgttttcactgactgaagtatggagatttctaaaggtatcttttctccattgatgttgcagccacaacatttcgttcatttagaggagttgacacagttcatcagtcgctccagccatagaggatctgacgtgttgaagaaattgaatgttgtaatgaaagtgaggcataaacttcatcactttctatcaacactacagcagtatctccactgccatttatctgatatttcgtggcgccgttttcaacattcccttaaaaatcagatgtttcttatctgatgagtcaaaacaagttgccacgataatcaaaagcatgctgcaactggctttggagttacgatcatgctttcaaagtattggtgacacttgtgatttaccagtaaatcaactcagtaatctgcaataccttataaacttctctcaggtggacgtaattagaacaaagttcgagggtaacatcaaagatttgtatgttttgcattcgaaatcttcaaaatatggggagctcggtctttcccgtttctgggggtatcagaactacaatgagtaccattctatgaaagttagcaaagatatgggcagcttctgtttttgatacgacatcttaagaccgaaggtttgcctttatctggtggggaatagctcaccttttaaaccattggtgggatcattgtgtgcatttgtttgtttcatggtagtgcagagaggtgcatcatctagttccgggtcttctggaatcactacagctttttgagccacccatgagtcatgacagaaattattgcttgtttgtgctggttgtagtgccacttgcggcgcatgtgcaagtcatgaggcatacacgctgatttgatgaaattgccccttgtattggttttggcgaactaaagagaactgcggttcagacatgccatatacttggagatgcattggtggttgattgtaaggttgcaagtgcatctcaaatttacaacaaaaatgggaaatcacgtgacttgattatcctccattcagccctatacatacgctatataatgtatatgccattgtacaacacgggctttgacagacaccagctaggctccaaaagggcatcccatgtagtagcttcacagtgtgttgctggatcacaaggaagtttagttatgtttcccaagcacagctggagaaagttagtttggcgtcagatgtattatgtatatttagttctgactaagctgtacaaagctagcagaagtgcgcaaatgtcctttctggatcgatctgcctgtaattttgaatctgcacatcgaagtaagcaggaatgtttcgtatatgtgccttcttaattttatagtttgttattgcaactgcaaccaagctgcatgggactacgcatgtacagcactagcttgcatggtaggatcacaaaactagtttgaacttcaacttcc

SEQ ID NO: 219904 - DNA, 4068 bp, Zea Mays
caccatttcaccaaccgttcactccctcgccggcgcacctcgccggcgtcgtgtcctggcacaccaccaccagtgcacggcacttctatcttcgtctccttctgccctcccatccttcattctgccgctcggaacgttggatgtgtgctgctccagatcacgcgggagggcaataagccctagctcggccatcccgggatggaggcggccgcctccagcctctcgacgctgctctccaccttgcgcgtggacgggccctggacgcctccgggaacctgggagtcggccatccctgagagtggcgccgctcgcgttacagacctcggaggacgcctgcagccgatctacgagctcgcatcggttactgatgatgctttgattcatctggccttgcatgcgctgtatggtgtcaaatcatcgttagatgagattgaggagctttcagtgctgttctcctcaaatccagctgacagaacctctaaccgtgttacaaatgtgtggttacgttcctcgagcaccatatctgtggggagtattctcaaatctttacgctctacaggtcttgtggtcttcttcctttgcaagtttgtgcacttttatcttgtccaaagtcgagaaatgaattgtgcaagtagagaagttcatgaacatgaacatcctggtgataaagacactgaacagcatcggccttacagtctagtaaaccaagcatttgcagctgcagttagtaaggtcctcgaaggctatttctgttccttgaatactttaccagcatcaattaggcttaggcgttcagttggccaatctggtataccttccaagacttcagatggaatgagttgtaattccactgcagaagtcactcttctggaagtttatctacacactgaagagttaagaaggcatgttaaatcccttggaaatatttgtttccctaagtttgcaggtgctacattgtgccatgatggtttggatactgaagcaagtgtggagtttgagaatttcccacggggcactgatttgctttcgtatttgtatgtctatattcgtgatgccgatccagttcactatggtcttctgaagtatctttttattcgttcctgtgagccatactttaacttcattaagtcatggatttaccgagcttctgttgatgacccttatgaggaatttctcattacacaaactgaaaataagggtgttcaaggagtctcttctgacataacagatgagttcacccttttcccgttaaagcaagaatactttatttctcagaagtcaaccatgaagcttctttcttcccaatccagttcagtttaccatggaataaattgggcagtccctattgatgagtgcgagaaagatgacagcctaagttgcaaacatgttcctgtgcactcacagaatgctgaacatactgcggtgcttgatggtttagaactggattatcagtatagtcagttttcgccatttgacaggtttatgaagagaaccagttgttcatctgaagacatgaattcagttgagttcttatatactgatcataaaaggtcagtagagaaagtatcacatggtaatgcagttaatgcattacattctgaatcagggcctactaaactatcaaacggcaaaaactatgagaagtttggtaatataaatcagccatggtataccagtattccttacaatctcagtctgaaccccatactgaagaatgcagcttgttactgcacggagagtgatgtgcaacagaaaagcaagaaccaatcacttgccagctttgattttgagtcagtcatggatccatgtgaagtatattgtgcaaggagcacatcctgccttgttgagtttgtaaatggagcaacaattatacagcccagtactcatccttgtgaacggcttgattgttctcccaagcttcttcaagctcagacaagaagtcaggcatcccttacttcctcaggagagatgtcaacaagagacagtcttcagaaaaatgtttatggtggggcattctgggagagatcgttactatataatgataaatcaaaagaaaaaccagctgtggactttagttcacagtttgatatgccccttgatatagttatcaacaagtgcatcatggaagaagttttgcttcagtataaatatgttagcagcttcacaatgaagttgcttgaggaaggttttgatctttgtgcacatctgctagccctgcggcggtaccatttcatggaaatagctgactgggcagattcctttattgctctaatttataataagaaatggtcatttgttaaatctgagcagaaaagatcggagattcaagggcttatggactttgctttgcagagatcttcatgtgattctgatccttataaggaaaggttatttatatacatcagggagccacctgttgattcttttgatgcatctgcatgtgatcttgatttgctggatgatatcttgttgggttataaagctgaatggccagtgaatattgttattacagaagacacacttaaaatatatgctgaaatattctgttatcttcttcaagtcaggtttgcagtgttttcactgactgaagtatggagatttctaaaggtatcttttctccattgatgttgcagccacaacatttcgttcatttagaggagttgacacagttcatcagtcgctccagccatagaggatctgacgtgttgaagaaattgaatgttgtaatgaaagtgaggcataaacttcatcactttctatcaacactacagcagtatctccactgccatttatctgatatttcgtggcgccgttttcaacattcccttaaaaatcaggtcagggatatactggatttggagtatgtgcatatgtgttatattactgatgcacttgacatatgtttcttatctgatgagtcaaaacaagttgccacgataatcaaaagcatgctgcaactggctttggagttacgatcatgctttcaaagtattggtgacacttgtgatttaccagtaaatcaactcagtaatctgcaataccttataaacttctctcaggtggacgtaattagaacaaagttcgagggtaacatcaaagatttgtatgttttgcattcgaaatcttcaaaatatggggagctcggtctttcccgtttctgggggtatcagaactacaatgagtaccattctatgaaagttagcaaagatatgggcagcttctgtttttgatacgacatcttaagaccgaaggtttgcctttatctggtggggaatagctcaccttttaaaccattggtgggatcattgtgtgcatttgtttgtttcatggtagtgcagagaggtgcatcatctagttccgggtcttctggaatcactacagctttttgagccacccatgagtcatgacagaaattattgcttgtttgtgctggttgtagtgccacttgcggcgcatgtgcaagtcatgaggcatacacgctgatttgatgaaattgccccttgtattggttttggcgaactaaagagaactgcggttcagacatgccatatacttggagatgcattggtggttgattgtaaggttgcaagtgcatctcaaatttacaacaaaaatgggaaatcacgtgacttgattatcctccattcagccctatacatacgctatataatgtatatgccattgtacaacacgggctttgacagacaccagctaggctccaaaagggcatcccatgtagtagcttcacagtgtgttgctggatcacaaggaagtttagttatgtttcccaagcacagctggagaaagttagtttggcgtcagatgtattatgtatatttagttctgactaagctgtacaaagctagcagaagtgcgcaaatgtcctttctggatcgatctgcctgtaattttgaatctgcacatcgaagtaagcaggaatgtttcgtatatgtgccttcttaattttatagtttgttattgcaactgcaaccaagctgcatgggactacgcatgtacagcactagcttgcatggtaggatcacaaaactagtttgaacttcaacttcc

SEQ ID NO: 219905 - DNA, 2272 bp, Zea Mays
cctctctccgctgcccctcctatctcctcgcgagcaccgctggcctcgcttaacggcctgatctcccagccgccgcttccgcctcgcgtcccaccggtctccatctacatgcagccgcgctcgccaccgccgtcggaggcgcctgcgccctccgacgccatcatgatgcccggcgtgggcggcgtggagccggccgtcacgttgggccaggtgccgcgctggagcgaccccgaccagcgcatcttcctcgcctccacgtccgaagaggcgtccgcggaggacgacggatccggcacgacctctgcgtctggcttcatctctttctccgacccgctcacggtcgacgacggcgccgtcgggggtggccacgccgggggtgcctcgcgcttccccgtcgaccaggagatcaactctaggatctatctctggcgtggccagccctggaacctcgaggtcgacgcggtcgtcaattctaccaacgagagcttggacgaggcgcacagtagcccggggttgcatgctgctgccgggtcagggctcgccgaggagtgcgccaccttgggaggttgccgaactgggatggccaagatgaccaatgcctacgatctgcctgcaaggaaggtcatccataccgtgggccccaaatatgctgtcaagtatcacacagctgcagagaatgcacttagtcactgctatcggtcctgcttggaactgctcattgagaatggtcttgaaagcatcgcaatgggttgtatatacacagaagctaaaaactaccctcgtgaaccagctgctcatgtggcaataagaactgttagacgtttcctggagaagcaaaaagacaaaatagctggtgttgttttttgtactacatcatcatctgacacagagatatacaaacgattgctcccactatatttccctcgggacaagcaggaggaatatattgcgatagtaaagctcccagctgatgttggggatgagaatggtgagacggcaatagatgaaaggaaaataagaataagacctttgcctgctggtgtgctagacagaacagtgtctgcaaatcttgttgatcttcctctttccaattctggatcggcattgaagaggggttctttcaagttggattcatacttggatccttcatttatgtcaataattaaagatccagatctgcggcgcaaggagcagtgggaaaaatccgctcaagctcaaaagggatttaattatgctaggttatttggatatggggatctaggttgcccttcattatctgcagcagaggaatactcacttcattcacgatacctcactaaagcaaattctcttaatctttcagagattgctgaaatgaaaataatttatcgtggtggagttgatattgaaggacgcccggttatggtggttgttggtgcacactttcttcttcgatgccttgaccttgaacggtttgttcttcatgtagtgaaggagtttgaacctttgattcagaagccatatacaattgtatatttccactccgcagcatcattacaaccgcaaccagatttaggatttatgaagcggttacaacaaatactaggacggaaacatcagcgcaaccttcatgcaatttatgtactccacccaacgttgggtttgagaacagctgttttggcaatgcaaatgtttgtagatggagaggtctggaagaaagttgtatatgtggataggcttgtgcagctgttcagatatgtaccacgcgagcaacttacaattcctgactttgtttttcagcacgatctggaggtgaatggtgggaggggcctaattgtagacccaagaacaaagcacatataccagaggacgtccagttgatatatgccagttctgaggcctgaagtttgttagttcttgcacttgcttgagcttacaaaacaacaaaaaactttggaaagtacaagtcaccctgggactgaagagttgaagctcctgtcaactggcttctcaacctagttccgcaaagttgaatcctcaaagcttgcacattttattgcagggtaaattttcttgtatattgtttctaagcaaataatttctgttgtgcaggctaagcattttggattcacatttatatttcaataaaaaacaaaaagaatgtaaaaatgcacaatataaaaacaagaggtcaatgggcatctctcatgcgcatccaagggaatctagaacttgagatgaacttgagatgctttgattctccaatttaagataggtatataaacaatcagtg

SEQ ID NO: 219906 - DNA, 2253 bp, Zea Mays
gccacctacgcgcacccgcgccgtgatcccacgagacctcgcgaccccacatgtcatgaacgtcaagcacattaattcgtcctctctccgctgcccctcctatctcctcgcgagcaccgctggcctcgcttaacggcctgatctcccagccgccgcttccgcctcgcgtcccaccggtctccatctacatgcagccgcgctcgccaccgccgtcggaggcgcctgcgccctccgacgccatcatgatgcccggcgtgggcggcgtggagccggccgtcacgttgggccaggtgccgcgctggagcgaccccgaccagcgcatcttcctcgcctccacgtccgaagaggcgtccgcggaggacgacggatccggcacgacctctgcgtctggcttcatctctttctccgacccgctcacggtcgacgacggcgccgtcgggggtggccacgccgggggtgcctcgcgcttccccgtcgaccaggagatcaactctaggatctatctctggcgtggccagccctggaacctcgaggtcgacgcggtcgtcaattctaccaacgagagcttggacgaggcgcacagtagcccggggttgcatgctgctgccgggtcagggctcgccgaggagtgcgccaccttgggaggttgccgaactgggatggccaagatgaccaatgcctacgatctgcctgcaaggaaggtcatccataccgtgggccccaaatatgctgtcaagtatcacacagctgcagagaatgcacttagtcactgctatcggtcctgcttggaactgctcattgagaatggtcttgaaagcatcgcaatgggttgtatatacacagaagctaaaaactaccctcgtgaaccagctgctcatgtggcaataagaactgttagacgtttcctggagaagcaaaaagacaaaatagctggtgttgttttttgtactacatcatcatctgacacagagatatacaaacgattgctcccactatatttccctcgggacaagcaggaggaatatattgcgatagtaaagctcccagctgatgttggggatgagaatggtgagacggcaatagatgaaaggaaaataagaataagacctttgcctgctggtgtgctagacagaacagtgtctgcaaatcttgttgatcttcctctttccaattctggatcggcattgaagaggggttctttcaagttggattcatacttggatccttcatttatgtcaataattaaagatccagatctgcggcgcaaggagcagtgggaaaaatccgctcaagctcaaaagggatttaattatgctaggttatttggatatggggatctaggttgcccttcattatctgcagcagaggaatactcacttcattcacgatacctcactaaagcaaattctcttaatctttcagagattgctgaaatgaaaataatttatcgtggtggagttgatattgaaggacgcccggttatggtggttgttggtgcacactttcttcttcgatgccttgaccttgaacggtttgttcttcatgtagtgaaggagtttgaacctttgattcagaagccatatacaattgtatatttccactccgcagcatcattacaaccgcaaccagatttaggatttatgaagcggttacaacaaatactaggacggaaacatcagcgcaaccttcatgcaatttatgtactccacccaacgttgggtttgagaacagctgttttggcaatgcaaatgtttgtagatggagaggtctggaagaaagttgtatatgtggataggcttgtgcagctgttcagatatgtaccacgcgagcaacttacaattcctgactttgtttttcagcacgatctggaggtgaatggtgggaggggcctaattgtagacccaagaacaaagcacatataccagaggacgtccagttgatatatgccagttctgaggcctgaagttttgcttgagcttacaaaacaacaaaaaactttggaaagtacaagtcaccctgggactgaagagttgaagctcctgtcaactggcttctcaacctagttccgcaaagctaagcattttggattcacatttatatttcaataaaaaacaaaaagaatgtaaaaatgcacaatataaaaacaagaggtcaatgggcatctctcatgcgcatccaagggaatctagaacttgagatgaacttgagatgctttgattctccaatttaagataggtatataaacaatcagtg

SEQ ID NO: 219907 - DNA, 1183 bp, Zea Mays
cttcttctgaggacctaacccaagacggtaggtaagtgccagcttaaagtctatctaaaggcggaccaccactgtccacctgggcggcgatggcgaccgccgcgagggagaggcgcctgccgccggcgctgcccctggcgactctcatcggccgggagctccgcgcggggggctccgagcgcccggccctgcgctacggccacgccggctttgccaagcgtggcgaggactacttcctcgtcaagcccgactgcctccgcgtccccggggaccccgcatccgcgttctccgtctttgccgtgttcgacggccacaacggcgtgtcggcggcggtctacagcaaggagcatctgctcgagcacgtcatgagcgcgctgtcgccggacatcggccgcgaagactggctgcaggcgctgccgcgcgcgctcgtcgccggcttcgtcaaggccgacatcgatttccagcgcaagggggaggtgtccggaaccacggcgacactggtggtcatcgatgggttcacggtcacggtggcgtcggtgggtgactcgcgctgcatcctggacacgcagggcggcgagttgcagctgctaaccgtggaccaccgcctggaggagaatgcagaggagcgggagcgcgtcacggccagcggtggggaagtaggccggctcaatctctttggcggccaggaggtcggccctctccggtgctggcctggtggcttgtgcctctcaagatccatcggggacatggatgttggagagttcattgtgcccattccacatgtcaagcaagtcaagctatcaaacaccggaggaagactgataatagcatctgatggcatatgggacgcgttgtccaatgaagcagctgcaaaagcatgcagaggattgcctgcagaactggcagcgaagcttgtcgttaagcaagctctgaaaacaagcgggctaaaggatgacaccacctgtgtcgtagttgacattatcccgtccgatcatctgacatcgccacaattgtctccaaagaaaaatcagaacaagttgaagtcactttttcgtagaaggtcgcatagttcagttagaaagcttggaggcaagtctgcctccattggttccgtggaggagttatttgaagaagggtctgcaatgctagaagaaagagctatttttgtggaaaaagaaggcgg

SEQ ID NO: 219908 - DNA, 2117 bp, Zea Mays
ggaaacaggtaggtatacgagccaaacaaaccaccaccaaaaccctcctcccgtcctcgctcggtccctccccctcgctccggccgccacaccacgcgggcacgtcaatggcgcgcatcgtgtcacgagcgctcccgttcgcctcgcgctcgtccctccgcctcccgctcccaccgcccttccccggcgcggcgctggtccgttccgccgctgcgggttcgcccctgcccccagctgccgaggctgcactcgcggcctcgctgctctcctggcgcgggcacacggccacccccgagtcctcgatagcggcgccgccgccgttcgcagggtttctcgctggaatccgcaggttccgcaagggacggcgcggacaggcgtcggcgaagcggtcgcagcctcaggacgccccgccgcccccgcccccgcccccgcctccaccgaaggagagagagatcgaactcgtcgctcgcatcggcatcgaggaggacatgcctgacgacccagaagtgctgaacattgtagaaatccttaagttaaatgtcccaatggcaatgaagattgcacttgatggacttctggattccagttacagcacccgagatacctcaataagtgatgttgggaagtatgataaggttgaggtttctgtattgctatgcaatgataacttcatccaagatcttaacaaagaatggagagatgtggactgcgctactgatatactctcaatgtcccagtacattccagatcttgatgttcccatcctaatgttaggtgatatagtaatatctgttgaggcagctgaaaggcaagctggggagaaaggtgttacacttcttgatgaagtgcgggtcctagtggttcgtggcatattgcatcttcttggttttcaacacgagtcgagcaatgaggctgcagcagaattggagaaggaggagcagctcattttaaaaagtctaaggtggaaaggaaaaggtctagctaaaagtgttctggattcaagcaagcctcaaacagattcattggatgaatgtttacaggacaagtgacaaatgacctgaagaaagctggcagccttagattttacaaaccaaaattcaaatatattttttgtgatatggatggtacgctgctcaacagtaaaagtcaagtttcagcaaggaatgcagaagctctaagggaagctaggtcaagaggagtaaacatagttattgccactggaaaggcacgtcctgctgtaatcgacgctcttagtatggtggacttatctggaaggactggtattgtttcagaatcatcacctggtgtattccttcaggggctgttggtttatggtttggaagggagacggatttataaaagaaatttggaccaagaagtatgtagagaggcactctcatattctatagagaacaagataccatttgtagcatttagtcaggatcattgttattcgatgtttgaccaccctttggtcgattctctccattacatataccatgaacctaaggctaaaatagtgccatctattggtcagcttttagaaacagctgagatacagaaagtattgttccttgaaactcctgagaggatttcgtctgcactgagaccgtactgggcaaaggcgatagagggaagggcccatgttgttcaggcacagcctgatatgcttgaacttgtaccacctgcaacttcgaaaggcaatggtgtgaaggttctgttgaaccacctttccattagtccagatgaggtaatggcaattggtgacggagaaaatgacattgaaatgttgcaactagcttcgtttggggttgctcttgcaaatggatctgacaagacaaaagcagcggcaaatgtaattggcgccacgaatgatgaagatggagttgcacaggctatttatgaatatgccttctaagagcaacgaatcattttggactgggttaatttcttctgatttcccatttttcgtggactcaacacagaacaattgtagtggttccaacttgcaagtacacaccgctccaccggagcgcaatctcgctctggtgttacagtttctgaactgtttgcaactggactgggggaggtctgtacagcatgtttttgccgttgtt

SEQ ID NO: 219909 - DNA, 2160 bp, Zea Mays
ggaaacaggtaggtatacgagccaaacaaaccaccaccaaaaccctcctcccgtcctcgctcggtccctccccctcgctccggccgccacaccacgcgggcacgtcaatggcgcgcatcgtgtcacgagcgctcccgttcgcctcgcgctcgtccctccgcctcccgctcccaccgcccttccccggcgcggcgctggtccgttccgccgctgcgggttcgcccctgcccccagctgccgaggctgcactcgcggcctcgctgctctcctggcgcgggcacacggccacccccgagtcctcgatagcggcgccgccgccgttcgcagggtttctcgctggaatccgcaggttccgcaagggacggcgcggacaggcgtcggcgaagcggtcgcagcctcaggacgccccgccgcccccgcccccgcccccgcctccaccgaaggagagagagatcgaactcgtcgctcgcatcggcatcgaggaggacatgcctgacgacccagaagtgctgaacattgtagaaatccttaagttaaatgtcccaatggcaatgaagattgcacttgatggacttctggattccagttacagcacccgagatacctcaataagtgatgttgggaagtatgataaggttgaggtttctgtattgctatgcaatgataacttcatccaagatcttaacaaagaatggagagatgtggactgcgctactgatatactctcaatgtcccagtacattccagatcttgatgttcccatcctaatgttaggtgatatagtaatatctgttgaggcagctgaaaggcaagctggggagaaaggtgttacacttcttgatgaagtgcgggtcctagtggttcgtggcatattgcatcttcttggttttcaacacgagtcgagcaatgaggctgcagcagaattggagaaggaggagcagctcattttaaaaagtctaaggtggaaaggaaaaggtctagctaaaagtgttctggattcaagcaagcctcaaacagattcattggatggacaagtgacaaatgacctgaagaaagctggcagccttagattttacaaaccaaaattcaaatatattttttgtgatatggatggtacgctgctcaacagtaaaagtcaagtttcagcaaggaatgcagaagctctaagggaagctaggtcaagaggagtaaacatagttattgccactggaaaggcacgtcctgctgtaatcgacgctcttagtatggtggacttatctggaaggactggggctgttggtttatggtttggaagggagacggatttataaaagaaatttggaccaagaagtatgtagagaggcactctcatattctatagagaacaagataccatttgtagcatttagtcaggatcattgttattcgatgtttgaccaccctttggtcgattctctccattacatataccatgaacctaaggctaaaatagtgccatctattggtcagcttttagaaacagctgagatacagaaagtattgttccttgaaactcctgagaggatttcgtctgcactgagaccgtactgggcaaaggcgatagagggaagggcccatgttgttcaggcacagcctgatatgcttgaacttgtaccacctgcaacttcgaaaggcaatggtgtgaaggttctgttgaaccacctttccattagtccagatgaggtaatggcaattggtgacggagaaaatgacattgaaatgttgcaactagcttcgtttggggttgctcttgcaaatggatctgacaagacaaaagcagcggcaaatgtaattggcgccacgaatgatgaagatggagttgcacaggctatttatgaatatgccttctaagagcaacgaatcattttggactgggttaatttcttctgatttcccatttttcgtggactcaacacagaacaattgtagtggttccaacttgcaagtacacaccgctccaccggagcgcaatctcgctctggtgttacagtttctgaactgtttgcaactgtaagacattttttagttggcatgaaccgaaatccagctaccagctcgacatactcttggctggatatgtaaccgctaaccgaattactatttttttctcatttttttatgcaaaagctttcctttttttta

SEQ ID NO: 219910 - DNA, 2198 bp, Zea Mays
ggaaacaggtaggtatacgagccaaacaaaccaccaccaaaaccctcctcccgtcctcgctcggtccctccccctcgctccggccgccacaccacgcgggcacgtcaatggcgcgcatcgtgtcacgagcgctcccgttcgcctcgcgctcgtccctccgcctcccgctcccaccgcccttccccggcgcggcgctggtccgttccgccgctgcgggttcgcccctgcccccagctgccgaggctgcactcgcggcctcgctgctctcctggcgcgggcacacggccacccccgagtcctcgatagcggcgccgccgccgttcgcagggtttctcgctggaatccgcaggttccgcaagggacggcgcggacaggcgtcggcgaagcggtcgcagcctcaggacgccccgccgcccccgcccccgcccccgcctccaccgaaggagagagagatcgaactcgtcgctcgcatcggcatcgaggaggacatgcctgacgacccagaagtgctgaacattgtagaaatccttaagttaaatgtcccaatggcaatgaagattgcacttgatggacttctggattccagttacagcacccgagatacctcaataagtgatgttgggaagtatgataaggttgaggtttctgtattgctatgcaatgataacttcatccaagatcttaacaaagaatggagagatgtggactgcgctactgatatactctcaatgtcccagtacattccagatcttgatgttcccatcctaatgttaggtgatatagtaatatctgttgaggcagctgaaaggcaagctggggagaaaggtgttacacttcttgatgaagtgcgggtcctagtggttcgtggcatattgcatcttcttggttttcaacacgagtcgagcaatgaggctgcagcagaattggagaaggaggagcagctcattttaaaaagtctaaggtggaaaggaaaaggtctagctaaaagtgttctggattcaagcaagcctcaaacagattcattggatggacaagtgacaaatgacctgaagaaagctggcagccttagattttacaaaccaaaattcaaatatattttttgtgatatggatggtacgctgctcaacagtaaaagtcaagtttcagcaaggaatgcagaagctctaagggaagctaggtcaagaggagtaaacatagttattgccactggaaaggcacgtcctgctgtaatcgacgctcttagtatggtggacttatctggaaggactggtattgtttcagaatcatcacctggtgtattccttcaggggctgttggtttatggtttggaagggagacggatttataaaagaaatttggaccaagaagtatgtagagaggcactctcatattctatagagaacaagataccatttgtagcatttagtcaggatcattgttattcgatgtttgaccaccctttggtcgattctctccattacatataccatgaacctaaggctaaaatagtgccatctattggtcagcttttagaaacagctgagatacagaaagtattgttccttgaaactcctgagaggatttcgtctgcactgagaccgtactgggcaaaggcgatagagggaagggcccatgttgttcaggcacagcctgatatgcttgaacttgtaccacctgcaacttcgaaaggcaatggtgtgaaggttctgttgaaccacctttccattagtccagatgaggtaatggcaattggtgacggagaaaatgacattgaaatgttgcaactagcttcgtttggggttgctcttgcaaatggatctgacaagacaaaagcagcggcaaatgtaattggcgccacgaatgatgaagatggagttgcacaggctatttatgaatatgccttctaagagcaacgaatcattttggactgggttaatttcttctgatttcccatttttcgtggactcaacacagaacaattgtagtggttccaacttgcaagtacacaccgctccaccggagcgcaatctcgctctggtgttacagtttctgaactgtttgcaactgtaagacattttttagttggcatgaaccgaaatccagctaccagctcgacatactcttggctggatatgtaaccgctaaccgaattactatttttttctcatttttttatgcaaaagctttcctttttttta

SEQ ID NO: 219911 - DNA, 1727 bp, Zea Mays
aaaagctgctccgggaagaacaaggctttgcagtgtcttgttttggagagcaaaggatcatcgtcaagtgatggccaagtcaggggcgctagaacttgctcggagcaccggagggtcgcttagcaaggaccaagtcaaatccgccgttgatcagtatgtcaaataccacgacctccatggaggcaaacaagaatcaaggaagtcaaattacaccgatttggcaaacaagtactatgatcttgtcactggcttttacgaatatggatggggcgactcattccatcttgctggcgggtcagctacatatacataccttgctctagttattactatctatcgacgaaacaacatccgttgtatctcagttgagatgtcgagttgctctagatcaaagttttggtaattttacagcttcagtcccatactcccatgcttgtatttcagatatccgggtgagacttcccgtgaagccattaagcggcaccagcattttttggcactacaattggggctcaagaagggtatgaaggttttggatgtgggatgtggaattgggggacctttaatagaaatcgccagattcagctcaacatcgataactggactgaacaacaatgactaccacatctcaaggggcaaggttttcattttagcattttcctttttggaataaataaaactttatagcatatgtatatgaaacatttaatttttggttgcaggagctcattttttcagcaggtttgagtgagcaatgctgcttcttgaagggggacttcatggacatgccaatatctgataacacctttgatgcggcctatgcaatacaggctacatgtcatgcaccagatgcagtatgtctcgtgtcatacttgtgtccgagtcaaagttaaggtttcacaggaataccatagattcagtgtttgtttacgttttttttcttctaatccctggttaccgcagcaaggcgtctatagtgaggtctaccgtgtgctgaaacctgggcagtattttgcactggatgaatggtgcttgaccgaccgatttgatcccaacaacgccaagcatttggccatcaaggctgagattgagctcggtgatggcctacctgacatccgtaccactcgccaatgtgtccaagctatgaaagatgcaggatttgaggtcgtttttgcaaaggatcttgctcaagtttttccttgcccgtggtaccgggtgatggatcccacctacttttcatgggctcacttccaatgcacacgcccaggacggatcgtcacccgtgcaattgtcaatacactagagttcctccgtattgccccagcaggcagcatgggagcctacaacgtcctgatgagtgcctctgatggccttctaaaaggtggccgggaaggtatcttcacagcgaccttcttcgtcctgggccgcaagcctctcaaggaagttgatatagtaagcctctcaaggaagttgatatagtgaacggcggcgtcctttgagctgcaagattagtatggggctgtactcataagagctatgaatcatggccaacgtgttctgtgctgaggtgtgtttactggattgtcttatgggttatggcccttgcgctgtgtgctggcctgctgggtcatgttcccgcagtagcctgtatctgcttgtcagcttgtgtgctgtgtactatgcactatctgaataaaaatgcagttttacgcattgttattaatcgc

SEQ ID NO: 219912 - DNA, 1838 bp, Zea Mays
ttcttgcttccagcaaccgttcgtctagccggcctgacgtcgcggcgcccaacacggcaacgcgcctttttcttccgcacgctgcgctggcccccttctcttggtaacttagccgtattgatatatgcactgatgactggccagaggcgacgatggagacggtctgctagttcaagttctacttccttccgcggccgcacgcgcgtcgttcgacgaattgccggagccagctgaaaatcgccggaggtgctctcggcggtcctggcctgattctctaccgacgcgagctgtggtcagtagccacgtctgtatatccacgtctagctggccatctttgcaccctccccacgtccatggaccctccaagaggtggagcttccacctccagtgaattagaagaacacagcagtggtagggtgccctggtgagcgctcatcatcctctgtgatgacgatgatgatgacaaaagagaggtcatttgttgctaagtcgagacggatgagtattgagtaggcggccttataggagcactaagatgttccgggcaaatttgtggcatttacacacatgctgttactgctgattcttctttaaaagccatggatgtatgtcaaataccacgacctccatggaggcaaacaagaatcaaggaagtcaaattacaccgatttggcaaacaagtactatgatcttgtcactggcttttacgaatatggatggggcgactcattccatcttgctggcggatatccgggtgagacttcccgtgaagccattaagcggcaccagcattttttggcactacaattggggctcaagaagggtatgaaggttttggatgtgggatgtggaattgggggacctttaatagaaatcgccagattcagctcaacatcgataactggactgaacaacaatgactaccacatctcaaggggcaaggagctcattttttcagcaggtttgagtgagcaatgctgcttcttgaagggggacttcatggacatgccaatatctgataacacctttgatgcggcctatgcaatacaggctacatgtcatgcaccagatgcacaaggcgtctatagtgaggtctaccgtgtgctgaaacctgggcagtattttgcactggatgaatggtgcttgaccgaccgatttgatcccaacaacgccaagcatttggccatcaaggctgagattgagctcggtgatggcctacctgacatccgtaccactcgccaatgtgtccaagctatgaaagatgcaggatttgaggtcgtttttgcaaaggatcttgctcaagtttttccttgcccgtggtaccgggtgatggatcccacctacttttcatgggctcacttccaatgcacacgcccaggacggatcgtcacccgtgcaattgtcaatacactagagttcctccgtattgccccagcaggcagcatgggagcctacaacgtcctgatgagtgcctctgatggccttctaaaaggtggccgggaaggtatcttcacagcgaccttcttcgtcctgggccgcaagcctctcaaggaagttgatatagtaagcctctcaaggaagttgatatagtgaacggcggcgtcctttgagctgcaagattagtatggggctgtactcataagagctatgaatcatggccaacgtgttctgtgctgaggtgtgtttactggattgtcttatgggttatggcccttgcgctgtgtgctggcctgctgggtcatgttcccgcagtagcctgtatctgcttgtcagcttgtgtgctgtgtactatgcactatctgaataaaaatgcagttttacgcattgttattaatcgc

SEQ ID NO: 219913 - DNA, 2555 bp, Zea Mays
ctctgtcctgtcttcctctccttcctcctcgtcgtcctccgccatagtggcgagcacgacaacagccacgcctcacgccctcacctccaatcattggcctccccaacccaacctctccccgccccgtcctgttgagccgggtgattgacggattattagttaatccgggggcttcacctcgttttagcggcctcgttcgttcgcctccgcaaaaggctaacgccagcccgggcgcgcgctaacggcagcaacgacagcaacccgctggctagctagtcctccccacgattcgactccgccaccgtccccggcccagtggattggaaatatggcggattgaaaagttacaggctgttcctgttcccaaggaatcatatgggaaatttttcacaggagattcctacatagtactgaagacaactgcccttaagaatggttcttttcgtcatgatatccattattggcttggcaaagataccagtcaggatgaagctggtacagctgcaattaagactgtggaactcgatgctgcccttggtggaagagctgtccaataccgtgaaatacagggaaatgagactgagaaatttctttcatactttaagccgtgtattataccagaggaaggtggtgttgcatctggtttcaggcatactgaagtaaatgagcgggagcataaaacacgattatttgtctgcagaggaaagcatactgttcatgttaaagaggttccttttgcacgagcatcactcaaccatgatgacatatttattttagatacaaaatctaagatattccaattcaatggatcaaattcaagtattcaggagagggctaaagcacttgaggttgtgcaacatcttaaagatacaaaccatgaaggaaaatgtgaagttgcggcagttgaggatggaaagttgatggcagatgctgatgctggtgaattctggggtctctttggcggatttgctcctttaccaagaaagacattttctgaactcaacgggaaagattctacttccacttcaaaattgctttgtgtaaacaagggccaatttgcccctattgattgcgaaattctaaaaagggagctattagattcaacaaaatgttacctactagactgtggttctgaaatttatgtctggatgggtagagaaacaactcttgaagaaaggaaacgaggcggctcagctgctgaggaattactacgtgaaggaaaccggcaaaaatctcatattattcggctcatggaaggatttgagactgtcacattcaaatcaaagtttgataaatggcccaagaaagctgatgcagttgtgtcggatgaaagcagaggaaaagtggcagctcttcttaagcgacaaggatttaatttcaaggatccagcaaaagctgctcctgtaaagcaagagcctcaacctcagattgattgcactggcaacttacaggtttggcgcgtaaatggcagtgataagactttcctttcgttttctgagcaatgcaagttttatagtggagactgctatatctttcaatacacctaccctggatatattggagatgaatgtcttattggtacctggtttgggaagaagagtgtccaggtaactgtttaatgcattttctatttgctgtattgcacatatgattgatacattgccatgaatcttactcaacgtctcattatttagtgcatgtttgtactttatcaacaatgtgctttgtgttgttagatgcctatgtatgtgtccttgttatattcggtctcatatatagagtacttttttctcgaatacgcaggagggttgcatatcattatattaaagtaattatattaaagtagagggaaaaaggcctgaggcctgggacaatcagaacacaacacaaaaaaaaacacacgagactcacaaaaaaaacacacacacacacaccaaacacacacaacacagacacataccagtcacacgacacaccaccaccccagcctaccaagaggctacaagactttcctttctctaaccagggtaaaaaaagggagcgcatgttcctgtctccaacagaaaaccacagtctcatctcatctttgaatccatcctctaaggtagaaaggcagggtcgagctccgtaaaaaacacacctatttctctgtttccaaagactccaagccccaagaattaccatactattaaacccctttcttttgcttttaggaatcctagttgaagcctttctccaccgttcaacaaaatctgaatctcttctcttaggacccacaaaagagagaccaattggagttaaaattgttagaatatgtggattaggcccatgaggcccatgtataaaccctatatagccaccccctagggttggcccaggtaatctaacagtcattcttccaacatggtatcaaattaggttttcgctcctccctcatccctcagccggctgcggctagggtttccttccctgccgccaggccgccgcccttctgctccctctaggcgtcgccaggccgccgcccctgcttggccgcgccaccaggaggacgcgac

SEQ ID NO: 219914 - DNA, 2078 bp, Zea Mays
ccggtggctccacaccaaaagcatcaaggattaaagcaaaaggaaaagaaactcccagtttgtgcctctcaaaaaaggaaaaggaaacggaaaaactcccagttcgtgacggagacaccgagtgcagcagcaggccagcggcacgccacccgcctcactcccgcctccgatccgctgcttactcgccacccggagatggccaccgccgccgccttctctgtctcctcgccggcggcctccgccgtcgccgcgcgatccaaggtgtttggaggagttaaccaggcgagaactagaactggctgccgcgtcggcatcacgcggaagaactttggccgtgtcatgatggcccttgcagtggatgtttctcgttttgaaggagtgccaatggctcctccagacccaattcttggggtttctgaggcctttaaagcagataaaagcgagctgaagctcaatcttggtgttggtgcctataggacagaagagctgcagccctacgtgctcaatgtagtcaagaaggctgaaaatcttatgttggagaaaggagaaaacaaagagtatcttcccattgaaggtttagccgcgtttaacaaagcaacagcagagctattgcttggagctgataaccctgttattaatcaaggactggttgctacacttcagtctctctcgggcactggatcactgcgtctcgctgcagcattcatacaaagatactttcctgaagctaaagtgctgatatcgtcgcctacctggggtaaccacaagaatatcttcaatgatgctagggtaccttggtcagagtaccggtattatgaccccaagactgttgggttggattttgagggaatgatagctgacattgaggctgctcctgaaggttcttttgttctgctacatggttgtgctcacaacccaactggaatagacccaactcctgaacagtgggagaaaattgcagatgtcattcaagagaaaaagcatatgccattctttgatgttgcatatcagggttttgccagtggaagccttgatgaagatgcattttctgtcaggctttttgttaagcgtggcatggaagtgtttgttgcacaatcttacagcaagaaccttggtttatattctgaaagggttggtgcaataaatgtcgtgtgctcagcaccagaagttgcagatagggtaaagagccagctgaaacgattggcacgtcccatgtactcgaacccccctattcacggtgccaagatagttgccaacgttgttggtgatccaaccatgtttggtgaatggaaacaagagatggagctaatggctggacggatcaagaatgtaagacagaagctctacgacagtttgtctgccaaggacaagagcggcaaggactggtctttcattctgaggcagattggcatgttctcctacaccggcttgaacaaagcgcagagtgacaacatgacggataaatggcatatttacatgaccaaggatgggcggatctcgttagctgggctgtccctggctaagtgtgattatcttgccgacgccatcatcgattccttccataatgtgaactaggctgaggtacgatagttgagggtcaagctattgatgtttagttccgtggacgctaggctgggatttttgggtccttccagctatacagctcttccgttgtgctccatctggtgtaacttggataaataaaaattttgtcgctgaactaaaactcgtgtgcttttttacctgtaactgtaaggtcagcgcgtggctacagacttgtaaacacttgaatggaaaaaaaacaatgacattaccggatattaatggccaactggccggtatgcgcttaagaagtctgatcttggagatctcgattacttcgactatgtttgcttttttctttcttttcttttggtgtaaactgacaggaaccgcaaatatgattcaaggcacaggcgcagtgcttgcacgtggctggaggctgtagcaggaggatatccttcaagccttcaggtggtagtggtactggcagtcgtagtcgtgacagcctcacatggaactactgattggaaactgat

SEQ ID NO: 219915 - DNA, 1383 bp, Zea Mays
cgcgccgtcccctgccgtcattcagtgtttggaggagttaaccaggcgagaactagaactggctgccgcgtcggcatcacgcggaagaactttggccgtgtcatgatggcccttgcagtggatgtttctcgttttgaaggagtgccaatggctcctccagacccaattcttggggtttctgaggcctttaaagcagataaaagcgagctgaagctcaatcttggtgttggtgcctataggacagaagagctgcagccctacgtgctcaatgtagtcaagaaggctgaaaatcttatgttggagaaaggagaaaacaaagaggttgctacacttcagtctctctcgggcactggatcactgcgtctcgctgcagcattcatacaaagatactttcctgaagctaaagtgctgatatcgtcgcctacctggggtaaccacaagaatatcttcaatgatgctagggtaccttggtcagagtaccggtattatgaccccaagactgttgggttggattttgagggaatgatagctgacattgaggctgctcctgaaggttcttttgttctgctacatggttgtgctcacaacccaactggaatagacccaactcctgaacagtgggagaaaattgcagatgtcattcaagagaaaaagcatatgccattctttgatgttgcatatcagggttttgccagtggaagccttgatgaagatgcattttctgtcaggctttttgttaagcgtggcatggaagtgtttgttgcacaatcttacagcaagaaccttggtttatattctgaaagggttggtgcaataaatgtcgtgtgctcagcaccagaagttgcagatagggtaaagagccagctgaaacgattggcacgtcccatgtactcgaacccccctattcacggtgccaagatagttgccaacgttgttggtgatccaaccatgtttggtgaatggaaacaagagatggagctaatggctggacggatcaagaatgtaagacagaagctctacgacagtttgtctgccaaggacaagagcggcaaggactggtctttcattctgaggcagattggcatgttctcctacaccggcttgaacaaagcgcagagtgacaacatgacggataaatggcatatttacatgaccaaggatgggcggatctcgttagctgggctgtccctggctaagtgtgattatcttgccgacgccatcatcgattccttccataatgtgaactaggctgaggcacaggcgcagtgcttgcacgtggctggaggctgtagcaggaggatatccttcaagccttcaggtggtagtggtactggcagtcgtagtcgtgacagcctcacatggaactactgattggaaactgat

SEQ ID NO: 219916 - DNA, 1738 bp, Zea Mays
gccgtcattcagtgtttggaggagttaaccaggcgagaactagaactggctgccgcgtcggcatcacgcggaagaactttggccgtgtcatgatggcccttgcagtggatgtttctcgttttgaaggagtgccaatggctcctccagacccaattcttggggtttctgaggcctttaaagcagataaaagcgagctgaagctcaatcttggtgttggtgcctataggacagaagagctgcagccctacgtgctcaatgtagtcaagaaggctgaaaatcttatgttggagaaaggagaaaacaaagaggttgctacacttcagtctctctcgggcactggatcactgcgtctcgctgcagcattcatacaaagatactttcctgaagctaaagtgctgatatcgtcgcctacctggggtaaccacaagaatatcttcaatgatgctagggtaccttggtcagagtaccggtattatgaccccaagactgttgggttggattttgagggaatgatagctgacattgaggctgctcctgaaggttcttttgttctgctacatggttgtgctcacaacccaactggaatagacccaactcctgaacagtgggagaaaattgcagatgtcattcaagagaaaaagcatatgccattctttgatgttgcatatcagggttttgccagtggaagccttgatgaagatgcattttctgtcaggctttttgttaagcgtggcatggaagtgtttgttgcacaatcttacagcaagaaccttggtttatattctgaaagggttggtgcaataaatgtcgtgtgctcagcaccagaagttgcagatagggtaaagagccagctgaaacgattggcacgtcccatgtactcgaacccccctattcacggtgccaagatagttgccaacgttgttggtgatccaaccatgtttggtgaatggaaacaagagatggagctaatggctggacggatcaagaatgtaagacagaagctctacgacagtttgtctgccaaggacaagagcggcaaggactggtctttcattctgaggcagattggcatgttctcctacaccggcttgaacaaagcgcagagtgacaacatgacggataaatggcatatttacatgaccaaggatgggcggatctcgttagctgggctgtccctggctaagtgtgattatcttgccgacgccatcatcgattccttccataatgtgaactaggctgaggtacgatagttgagggtcaagctattgatgtttagttccgtggacgctaggctgggatttttgggtccttccagctatacagctcttccgttgtgctccatctggtgtaacttggataaataaaaattttgtcgctgaactaaaactcgtgtgcttttttacctgtaactgtaaggtcagcgcgtggctacagacttgtaaacacttgaatggaaaaaaaacaatgacattaccggatattaatggccaactggccggtatgcgcttaagaagtctgatcttggagatctcgattacttcgactatgtttgcttttttctttcttttcttttggtgtaaactgacaggaaccgcaaatatgattcaaggcacaggcgcagtgcttgcacgtggctggaggctgtagcaggaggatatccttcaagccttcaggtggtagtggtactggcagtcgtagtcgtgacagcctcacatggaactactgattggaaactgat

SEQ ID NO: 219917 - DNA, 4906 bp, Zea Mays
ccgctcttaaccggcaaacaaacaaaacggaaaacaagccacggaaaaaagaggaaaaaaagctcgagaagagcaaaccctaggttcccgtggcaccgacgaaatcctaattcgcccgcattggatcgcccaggcaaggggcttttggcacagatcggcgctcccccgtcctcggattcgattcctctgctcaatttggggccgatccgtggctcggaccttctcgccgctcggcgactctctcatcttttttccccgatccgtctgtgagacactaagcgctttgccgcggtcgcccctgctgacgccaccggcacaaggaggcttgtcgcccactctggtccgccaccgacgcttgacgcctccagggcttcaaggattgctgatgagaggatgattgaaattgtttctgttaacttgattcaactgaatccgtatgctccacgcttccgctcctgatctggggtcgggactctatgtatgatgggaggtgaaattctgcagaaatctgttctcttgacctgtgggctcgtgaatggaatccagtggcggtgataaacccactgcaacagatgctaccgaatcagtggtgggtttagatggcgaggagactttgtctgagagggaatctgttggagcaagacatggccctgccttgtctaatgggggtggaaaggaggctccttcgagcagttcatctgcagggaataagaggaagcacggcatcttgggttctaatcaaatggaactcaatgaaccagggatgccaagttccagctcaggtgattccacatggagtttagatagtctggatgaccgtcaccagatctcattgttgagaagtaagaatgaacactctgaacattcagttacttcagctggagttacagtgatcaggcagcctcgtggcgtcttgaggttaaggaagcgggatcagaatgtcagtactgagagttggactggtggtcataatattccacaagctaatggagttcctaggtcttcccaactcctgaggcggaacaagaaggggaaatcaactgtgttcgagcagaatagaattggtggtgatgaacctgtcagttgcttgagaactgagaatggtacttgtgatcaggataccggctccaagttctgttctgaaactgagttctcagctgaaaagctgtcacatctttcaggtgaagccccaaaagctgttcatgttgacaagggtgggtgtgaccatgtcaaagatgatgatggtgttagtctggaagaaaatgctgctatgatgctttgttctttatcagataacatatgtgctggatcaccaaggaagggaatgaaatcatctgatacgtcatcaaagagatgtattcctcagcattcaaatcattttaagagttcaaacaaaaaaatcaaggatgtacctagtcctgctagattgctgcggaagcgtgatggtaaagttccattcaggaagcgtcgtccgcgtcggcatttttatgaagttagccctagcgacgtggatccattttgcattgtaaaagagaggatcagagttttttggcctcttgatgagacttggtactttggcttggtcaaggaatataatccggacacaaggttacatcatgtcaggtatgatgataaagatgaagaatggatcaatcttcaaaatgagaggattaaactcctgttcttaccagcggaagctcgcaatagatctaaatgcaccaactcaaggtcagtgtttgacctgaagcatgaacagggtgacagagaagacatggatggaagcgaaggcaatacagaaagttctgagtcaggtcccattggctcatggttagctcgatcaaaccaagcaaaatctgctgcactttgtaacatcagcaagcaagatcacagtcattccaatattgttccaatttcatttgaccaaaagcagtgccgtggttctgatgctaaggagtctaatgattatataccatgtgattcatttggaaatgggagtgcaaaagttctcaaggatagaaccacacctgaggacaggaggtttcgctttgtttattctaggaaacggttttgcagaaaaacgaatggttttcttagcatttccgaacagcattctaattgtcagataagagcaagatttgctatggttcttgctgcatgtcctggtatggaatctagttctgcaactggtgcttcagtcacatatgtcatacctgcattgagcctcccactgaaacctgtttacaagttgctttgtgaagcctgttgtgtttcgttttccaataccttctttctccattgtggtacaatggttgctttatggcctgttgtacatctggacatactttttgataatgctttaggcttgaaacattttcttctcgacacatgcttgatatcggcagtatcacttctctgtttacttgctggaagcttcaagcagtgttctaggcagagaactaccaaggaagctagaataccttgtacttcgatcagatttcagatatctggtgggcatggtagaagcgaagtagtatttatgttattcaactttgttggtgtagagaaatcgaaatgggaacaccttcaaggaaagcttcaatatcactgttctaaatcggagttgtctaaagattccacaaaatgtactggtcgaagagccctttcttcaatggatctcttctccaagggttttgatgttcaggactttcttccagagtctaattattcagatcgcgaacctatcatttgttgtttggatgaacattgtagatttactcaaagtgttctggacatgacaactgcaccttcactactgccttggcaccataaaaaaatgttaacagaaagcaatttgactaatggttctcagcaatccatgtcatgtactttggatgaggatcagcagcagttggtaacagaacatgcatctgacacagtttttcatgctccacctcaagtttgttcacttaatctcggttcatcacctgatagtccattggatatggcttctgctagttgtgcaaatccatctagctctgctagtagggaatccaatattgctgaaaggaatgtaagcacagaatgtaatggcagcagtattggtgatgcaaatataattcacaggaagtgtgaagatcaaaatgggccttgtgctggtcctgacaagtcattttcctccaaccttagtgttatttgctcttcacagaagtctgcagagagtcgtctttccataaatattgacaaagcaaatgataaacctcttgacaacgatgaaaaagaaaagcaacctatatctaacttggttcaggaattgaatgaacatccaattggctgtgttacacctactgcccctagaactacttcccataggaaccggtttacatctatatcacgtgcttttggagatggttcaaaattactgccagaagaccacgtgttgactggctttgctggtggttctaagaaaccacgaagtcaagtttcatactcagtttctcctaaaagtgaggaacttggcataaaaaacaaaggtcatttccgcaagatacaatctcatgttagtgcaaagataaatgatgcaaagaaacttcctgatagttctagaagtgggcatagcagcccggagtcattgacttgcgttgcaaatgttcttgttacagtgggtgatagaggttggagggagtatgatacccagatcacaatggattccgatggtcagagtgaaaggaggatatgcgtgaaacttgctgaagggaccaagtatgctcacaaggtctgtcaagttttgcagcctggggccacaaaccgctatacacatgccatgatgtggaaaggtggtgctgaatggtgcctggaatttcctgacagaagccagtggttgattttcaagcaaatgcacgatgagtgctatagccataacatcagagctgcttctgtgagaaacattccaatccctggtgtccatttggttgaaatccatgatgataatgatgtggtatcctttgtgcaatctgaagcttatcttgttcacatcggaacagatgttgaaattgctcttgatcaatcccgtgtgttatatgacatggacagcgatgatgaagagtggatatcaagctggcggaaatccttagtaagagacaacaccaccacacttcagtttgcagaagatttgtttgagagggttatggacaaactagagaagtttgcatatagccacaactgtaatggactcagcattgatcagatgaaggaactggagactgatgatgtacctctgcacactattgaagtgatacatgcatattggcaagacaagaggcagaaaaggggaatgccacttattcgacattttcagtcggctatgtggaagatctacgagcagcagctgcatgaatgggaatcaaaagtatgcagaatgcagagttcgtcaaatgggtaccaagaaaagaaattgcctcccaagcctgcattgtttgccttctgtttgaggcctcgtggactccatgtaccatacaaggggccaaagcagcgttctcataagaagcttatgtccacaggctgccatagcttttcaagagagcatgatggcttttaccggcaaggcaggagatacaatgaatgcactggggatgggaggataagcgaatcgtatgacactggttctctttactccccaacagggtactctcccaggttctctacaagaacagattctcctcgggcattcgagtcctcagaacgaagctccacaccaagattttccaggaacaacagtagcaccaaaaggagcgcagcccttgctttctccgacgaccaccagccatcaccttcctgccgcccccagagagcgaaacggagcgcgcacgaccactggaacgctgctatccacgactggcagaactcgaag

SEQ ID NO: 219918 - DNA, 2603 bp, Zea Mays
ccgctcttaaccggcaaacaaacaaaacggaaaacaagccacggaaaaaagaggaaaaaaagctcgagaagagcaaaccctaggttcccgtggcaccgacgaaatcctaattcgcccgcattggatcgcccaggcaaggggcttttggcacagatcggcgctcccccgtcctcggattcgattcctctgctcaatttggggccgatccgtggctcggaccttctcgccgctcggcgactctctcatcttttttccccgatccgtctgtgagacactaagcgctttgccgcggtcgcccctgctgacgccaccggcacaaggaggcttgtcgcccactctggtccgccaccgacgcttgacgcctccagggcttcaagggttttgatgttcaggactttcttccagagtctaattattcagatcgcgaacctatcatttgttgtttggatgaacattgtagatttactcaaagtgttctggacatgacaactgcaccttcactactgccttggcaccataaaaaaatgttaacagaaagcaatttgactaatggttctcagcaatccatgtcatgtactttggatgaggatcagcagcagttggtaacagaacatgcatctgacacagtttttcatgctccacctcaagtttgttcacttaatctcggttcatcacctgatagtccattggatatggcttctgctagttgtgcaaatccatctagctctgctagtagggaatccaatattgctgaaaggaatgtaagcacagaatgtaatggcagcagtattggtgatgcaaatataattcacaggaagtgtgaagatcaaaatgggccttgtgctggtcctgacaagtcattttcctccaaccttagtgttatttgctcttcacagaagtctgcagagagtcgtctttccataaatattgacaaagcaaatgataaacctcttgacaacgatgaaaaagaaaagcaacctatatctaacttggttcaggaattgaatgaacatccaattggctgtgttacacctactgcccctagaactacttcccataggaaccggtttacatctatatcacgtgcttttggagatggttcaaaattactgccagaagaccacgtgttgactggctttgctggtggttctaagaaaccacgaagtcaagtttcatactcagtttctcctaaaagtgaggaacttggcataaaaaacaaaggtcatttccgcaagatacaatctcatgttagtgcaaagataaatgatgcaaagaaacttcctgatagttctagaagtgggcatagcagcccggagtcattgacttgcgttgcaaatgttcttgttacagtgggtgatagaggttggagggagtatgatacccagatcacaatggattccgatggtcagagtgaaaggaggatatgcgtgaaacttgctgaagggaccaagtatgctcacaaggtctgtcaagttttgcagcctggggccacaaaccgctatacacatgccatgatgtggaaaggtggtgctgaatggtgcctggaatttcctgacagaagccagtggttgattttcaagcaaatgcacgatgagtgctatagccataacatcagagctgcttctgtgagaaacattccaatccctggtgtccatttggttgaaatccatgatgataatgatgtggtatcctttgtgcaatctgaagcttatcttgttcacatcggaacagatgttgaaattgctcttgatcaatcccgtgtgttatatgacatggacagcgatgatgaagagtggatatcaagctggcggaaatccttagtaagagacaacaccaccacacttcagtttgcagaagatttgtttgagagggttatggacaaactagagaagtttgcatatagccacaactgtaatggactcagcattgatcagatgaaggaactggagactgatgatgtacctctgcacactattgaagtgatacatgcatattggcaagacaagaggcagaaaaggggaatgccacttattcgacattttcagtcggctatgtggaagatctacgagcagcagctgcatgaatgggaatcaaaagtatgcagaatgcagagttcgtcaaatgggtaccaagaaaagaaattgcctcccaagcctgcattgtttgccttctgtttgaggcctcgtggactccatgtaccatacaaggggccaaagcagcgttctcataagaagcttatgtccacaggctgccatagcttttcaagagagcatgatggcttttaccggcaagtatcaggcaggagatacaatgaatgcactggggatgggaggataagcgaatcgtatgacactggttctctttactccccaacagggtactctcccaggttctctacaagaacagattctcctcgggcattcgagtcctcagaacgaagctccacaccaagattttccaggaacaacagtagcaccaaaaggagcgcagcccttgctttctccgacgaccaccagccatcaccttcctgccgcccccagagagcgaaacggagcgcgcacgaccactggaacgctgctatccacgactggcagaactcgaag

SEQ ID NO: 219919 - DNA, 4912 bp, Zea Mays
ccgctcttaaccggcaaacaaacaaaacggaaaacaagccacggaaaaaagaggaaaaaaagctcgagaagagcaaaccctaggttcccgtggcaccgacgaaatcctaattcgcccgcattggatcgcccaggcaaggggcttttggcacagatcggcgctcccccgtcctcggattcgattcctctgctcaatttggggccgatccgtggctcggaccttctcgccgctcggcgactctctcatcttttttccccgatccgtctgtgagacactaagcgctttgccgcggtcgcccctgctgacgccaccggcacaaggaggcttgtcgcccactctggtccgccaccgacgcttgacgcctccagggcttcaaggattgctgatgagaggatgattgaaattgtttctgttaacttgattcaactgaatccgtatgctccacgcttccgctcctgatctggggtcgggactctatgtatgatgggaggtgaaattctgcagaaatctgttctcttgacctgtgggctcgtgaatggaatccagtggcggtgataaacccactgcaacagatgctaccgaatcagtggtgggtttagatggcgaggagactttgtctgagagggaatctgttggagcaagacatggccctgccttgtctaatgggggtggaaaggaggctccttcgagcagttcatctgcagggaataagaggaagcacggcatcttgggttctaatcaaatggaactcaatgaaccagggatgccaagttccagctcaggtgattccacatggagtttagatagtctggatgaccgtcaccagatctcattgttgagaagtaagaatgaacactctgaacattcagttacttcagctggagttacagtgatcaggcagcctcgtggcgtcttgaggttaaggaagcgggatcagaatgtcagtactgagagttggactggtggtcataatattccacaagctaatggagttcctaggtcttcccaactcctgaggcggaacaagaaggggaaatcaactgtgttcgagcagaatagaattggtggtgatgaacctgtcagttgcttgagaactgagaatggtacttgtgatcaggataccggctccaagttctgttctgaaactgagttctcagctgaaaagctgtcacatctttcaggtgaagccccaaaagctgttcatgttgacaagggtgggtgtgaccatgtcaaagatgatgatggtgttagtctggaagaaaatgctgctatgatgctttgttctttatcagataacatatgtgctggatcaccaaggaagggaatgaaatcatctgatacgtcatcaaagagatgtattcctcagcattcaaatcattttaagagttcaaacaaaaaaatcaaggatgtacctagtcctgctagattgctgcggaagcgtgatggtaaagttccattcaggaagcgtcgtccgcgtcggcatttttatgaagttagccctagcgacgtggatccattttgcattgtaaaagagaggatcagagttttttggcctcttgatgagacttggtactttggcttggtcaaggaatataatccggacacaaggttacatcatgtcaggtatgatgataaagatgaagaatggatcaatcttcaaaatgagaggattaaactcctgttcttaccagcggaagctcgcaatagatctaaatgcaccaactcaaggtcagtgtttgacctgaagcatgaacagggtgacagagaagacatggatggaagcgaaggcaatacagaaagttctgagtcaggtcccattggctcatggttagctcgatcaaaccaagcaaaatctgctgcactttgtaacatcagcaagcaagatcacagtcattccaatattgttccaatttcatttgaccaaaagcagtgccgtggttctgatgctaaggagtctaatgattatataccatgtgattcatttggaaatgggagtgcaaaagttctcaaggatagaaccacacctgaggacaggaggtttcgctttgtttattctaggaaacggttttgcagaaaaacgaatggttttcttagcatttccgaacagcattctaattgtcagataagagcaagatttgctatggttcttgctgcatgtcctggtatggaatctagttctgcaactggtgcttcagtcacatatgtcatacctgcattgagcctcccactgaaacctgtttacaagttgctttgtgaagcctgttgtgtttcgttttccaataccttctttctccattgtggtacaatggttgctttatggcctgttgtacatctggacatactttttgataatgctttaggcttgaaacattttcttctcgacacatgcttgatatcggcagtatcacttctctgtttacttgctggaagcttcaagcagtgttctaggcagagaactaccaaggaagctagaataccttgtacttcgatcagatttcagatatctggtgggcatggtagaagcgaagtagtatttatgttattcaactttgttggtgtagagaaatcgaaatgggaacaccttcaaggaaagcttcaatatcactgttctaaatcggagttgtctaaagattccacaaaatgtactggtcgaagagccctttcttcaatggatctcttctccaagggttttgatgttcaggactttcttccagagtctaattattcagatcgcgaacctatcatttgttgtttggatgaacattgtagatttactcaaagtgttctggacatgacaactgcaccttcactactgccttggcaccataaaaaaatgttaacagaaagcaatttgactaatggttctcagcaatccatgtcatgtactttggatgaggatcagcagcagttggtaacagaacatgcatctgacacagtttttcatgctccacctcaagtttgttcacttaatctcggttcatcacctgatagtccattggatatggcttctgctagttgtgcaaatccatctagctctgctagtagggaatccaatattgctgaaaggaatgtaagcacagaatgtaatggcagcagtattggtgatgcaaatataattcacaggaagtgtgaagatcaaaatgggccttgtgctggtcctgacaagtcattttcctccaaccttagtgttatttgctcttcacagaagtctgcagagagtcgtctttccataaatattgacaaagcaaatgataaacctcttgacaacgatgaaaaagaaaagcaacctatatctaacttggttcaggaattgaatgaacatccaattggctgtgttacacctactgcccctagaactacttcccataggaaccggtttacatctatatcacgtgcttttggagatggttcaaaattactgccagaagaccacgtgttgactggctttgctggtggttctaagaaaccacgaagtcaagtttcatactcagtttctcctaaaagtgaggaacttggcataaaaaacaaaggtcatttccgcaagatacaatctcatgttagtgcaaagataaatgatgcaaagaaacttcctgatagttctagaagtgggcatagcagcccggagtcattgacttgcgttgcaaatgttcttgttacagtgggtgatagaggttggagggagtatgatacccagatcacaatggattccgatggtcagagtgaaaggaggatatgcgtgaaacttgctgaagggaccaagtatgctcacaaggtctgtcaagttttgcagcctggggccacaaaccgctatacacatgccatgatgtggaaaggtggtgctgaatggtgcctggaatttcctgacagaagccagtggttgattttcaagcaaatgcacgatgagtgctatagccataacatcagagctgcttctgtgagaaacattccaatccctggtgtccatttggttgaaatccatgatgataatgatgtggtatcctttgtgcaatctgaagcttatcttgttcacatcggaacagatgttgaaattgctcttgatcaatcccgtgtgttatatgacatggacagcgatgatgaagagtggatatcaagctggcggaaatccttagtaagagacaacaccaccacacttcagtttgcagaagatttgtttgagagggttatggacaaactagagaagtttgcatatagccacaactgtaatggactcagcattgatcagatgaaggaactggagactgatgatgtacctctgcacactattgaagtgatacatgcatattggcaagacaagaggcagaaaaggggaatgccacttattcgacattttcagtcggctatgtggaagatctacgagcagcagctgcatgaatgggaatcaaaagtatgcagaatgcagagttcgtcaaatgggtaccaagaaaagaaattgcctcccaagcctgcattgtttgccttctgtttgaggcctcgtggactccatgtaccatacaaggggccaaagcagcgttctcataagaagcttatgtccacaggctgccatagcttttcaagagagcatgatggcttttaccggcaagtatcaggcaggagatacaatgaatgcactggggatgggaggataagcgaatcgtatgacactggttctctttactccccaacagggtactctcccaggttctctacaagaacagattctcctcgggcattcgagtcctcagaacgaagctccacaccaagattttccaggaacaacagtagcaccaaaaggagcgcagcccttgctttctccgacgaccaccagccatcaccttcctgccgcccccagagagcgaaacggagcgcgcacgaccactggaacgctgctatccacgactggcagaactcgaag

SEQ ID NO: 219920 - DNA, 2394 bp, Zea Mays
atttttatgacttacagggctgtagttcctactatccagggctatgaggacgcaggagacttcactgttaaagaaaggctgaaaactagcattcatatgaacctacttttttattcaattgtgggagccattggccttattggtctcatactactcttaatcatgcataaagcttgggatggtggtattgtgggatttgcaatggcatgctcaaatacctttggattggtgactggtgcttttcttcttggttttgggttaagcgaaattccaagaaacatttggaaaaatgcagactggtctcaccgccaaaaagttgctcaagctacatcaaatcaaatgtcaaaacgtgacattttgaggccttacatggatattattgataacatgttgtctcaaatgctgcgggaggatccagcctttaaaccttctggtggtagattaggtgaaaatgatatggactatgataccgatgataaatcgatggccacacttcgtcgccaactcaggagggctcatgaggagtactataggtgcaaaagtgagtatatgacttgtgtcatggaagccctcaaactagaggacacaataaaaaattatgaacgccgtgatgctaatggatggaaatatgtatcaagttttagtgaaagtcgctcgggcacacttggatcaattttggacactatcgagttcatttggtgctgtatactgagaaagcagcttcaaaaagcatttgctgttatccttggctgcatgtcagctgctatactgctggctgaagctactttacttccaagtggtgttgatctatctctcttttctattcttataaaagctgtaggaaaacaagaggttttagttcaggttgctgcttttgtccccttgatgtatatgtgcatttgcacatattattcattattcaagattggcatgttgatgttctattctctgactccaagacaaaccagctctgtcagcttgcttatgatctgttcaatggttgcaagatatgcacctcctatttcttataactttctgaatctcatccgccttggtggcaatgctaaaactacatttgagaagagaatggggaacattgatgatgcagttcctttctttggcagaggcttcaacaagatctatccactgattatggttgtttatacactattggttgctagtaatttctttgttcgtgtgattgactttttgggaagatggaaaaggttcaagttccaacgtgaagaagagaatatagatggtttagatccatctggaatgattattctacaaaaagagagatcttggatcgaacaagggtgcaaagtgggcgagcaggttattccattggcaaggaatttcaatggtgtgaacgctgatattgaatcacaaaatgtgccattggttgaaaacactgtggagatgaaagtaggggcaacttcttccagaaatgacgggagagctggccagttgaagtatgcaaacaacagggagactatcgccagcaaatacacttctattagagaacagaaccggcagtcagggaaggtagtgagaaaggaaatttcaccgaactctatatctttgctcgaagaaagaaattcagagcaggggtccaatgctggtgtaccaccaactggtgtgtctgcaacatgggcctcgatgaagattggttttcaaaatttcaaagcaaatatgggttctaagaagtttcttcctttgcgccaagatccaggatttgttccaaatttgaatgtctcttcaccagaatctcttgatgacatattccaaaggttgaaacggcggcctgcaaatgtgcctgtggattaccttgacgatgacgatgatgacaacataggagatacagatcttcatttccaagatcaatgaaataggttgtgatattcttttaggtttagaatatgcatacacagaaaaactaaaagaattggtagcaatagatgttcaaaggaagatacaggatgtatagatctgatgatggtttggtgtgcttcctggaagctcatgacgcctgtccatctggaaaactgcaaaatgtaagtacgatatgatgacagcctttacagaaaggtttggaattctcccgccgaaaagggttgggactaatctactacgtaccactatattcaggtaaccttgttggtttctctcaccttttttttggaactgtattggagatgctgatatgtgatggaagccaaaaattgtaaatgtgtacctacaataccatatgaaaattaacgtgcttgagttgtaaccagtaaaaacatactattgaatctatacttgatcgggaggatacaacccaaagtgtttgtgtgtgacgtcagacatgtatttgatggtataacttgtggacacttattgtctgat

SEQ ID NO: 219921 - DNA, 2503 bp, Zea Mays
atggctgtaaagcttgataatgcccatcaagagtattcaaatgcaattgttgttgctcaagctacatcaaatcaaatgtcaaaacgtgacattttgaggccttacatggatattattgataacatgttgtctcaaatgctgcgggaggatccagcctttaaaccttctggtggtagattaggtgaaaatgatatggactatgataccgatgataaatcgatggccacacttcgtcgccaactcaggagggctcatgaggagtactataggtgcaaaagtgagtatatgacttgtgtcatggaagccctcaaactagaggacacaataaaaaattatgaacgccgtgatgctaatggatgtgctgcatttgtcaaacaagttatgccaagtgatgtatgttcatcatgagggaggatttaatgtgtaaaaagagcaaattttgtgctgcctgtaccgttattagttcaacaaaagttttatactgcaagcaatactgctgaccaagaatacttgaatgttggcgaattgtgcaattgctattgatgcttgtgcttgtcaacttcaggaacttcgcatatatcaattatattcttagtaactgcttggaaaactttgagcaatttgtactgcaaacaagttgtgctcatccaggaactttacagacatcaatattgtgtgcacctagcacttcaatcttatagtatgtagtattggtttacttcttttaaacaggaaatatgtatcaagttttagtgaaagtcgctcgggcacacttggatcaattttggacactatcgagttcatttggtgctgtatactgagaaagcagcttcaaaaagcatttgctgttatccttggctgcatgtcagctgctatactgctggctgaagctactttacttccaagtggtgttgatctatctctcttttctattcttataaaagctgtaggaaaacaagaggttttagttcaggttgctgcttttgtccccttgatgtatatgtgcatttgcacatattattcattattcaagattggcatgttgatgttctattctctgactccaagacaaaccagctctgtcagcttgcttatgatctgttcaatggttgcaagatatgcacctcctatttcttataactttctgaatctcatccgccttggtggcaatgctaaaactacatttgagaagagaatggggaacattgatgatgcagttcctttctttggcagaggcttcaacaagatctatccactgattatggttgtttatacactattggttgctagtaatttctttgttcgtgtgattgactttttgggaagatggaaaaggttcaagttccaacgtgaagaagagaatatagatggtttagatccatctggaatgattattctacaaaaagagagatcttggatcgaacaagggtgcaaagtgggcgagcaggttattccattggcaaggaatttcaatggtgtgaacgctgatattgaatcacaaaatgtgccattggttgaaaacactgtggagatgaaagtaggggcaacttcttccagaaatgacgggagagctggccagttgaagtatgcaaacaacagggagactatcgccagcaaatacacttctattagagaacagaaccggcagtcagggaaggtagtgagaaaggaaatttcaccgaactctatatctttgctcgaagaaagaaattcagagcaggggtccaatgctggtgtaccaccaactggtgtgtctgcaacatgggcctcgatgaagattggttttcaaaatttcaaagcaaatatgggttctaagaagtttcttcctttgcgccaagatccaggatttgttccaaatttgaatgtctcttcaccagaatctcttgatgacatattccaaaggttgaaacggcggcctgcaaatgtgcctgtggattaccttgacgatgacgatgatgacaacataggagatacagatcttcatttccaagatcaatgaaataggttgtgatattcttttaggtttagaatatgcatacacagaaaaactaaaagaattggtagcaatagatgttcaaaggaagatacaggatgtatagatctgatgatggtttggtgtgcttcctggaagctcatgacgcctgtccatctggaaaactgcaaaatgtaagtacgatatgatgacagcctttacagaaaggtttggaattctcccgccgaaaagggttgggactaatctactacgtaccactatattcaggtaaccttgttggtttctctcaccttttttttggaactgtattggagatgctgatatgtgatggaagccaaaaattgtaaatgtgtacctacaataccatatgaaaattaacgtgcttgagttgtaaccagtaaaaacatactattgaatctatacttgatcgggaggatacaacccaaagtgtttgtgtgtgacgtcagacatgtatttgatggtataacttgtggacacttattgtctgat

SEQ ID NO: 219922 - DNA, 1823 bp, Zea Mays
cacggcatcacccatcagcccatcaccacctcaaccgacagctcgtcactctcctactcccgtcccacctcccatcatccgcgagccccgccaggccccagctgcagcagcggctatggcgtcgtctccgcccgacgtggacctgggcaagctgagctacgagatcttctccctactcgagagcaagttcctcttcggcggcggctccgtgccgggcacgccagcgcgggcggcggctccgggccccggggaggaccgcggcagggtgcgggtgctggcgatcgacgggtgcgggccgggccccggcgacgcgctgctggcggcggccgcgctcgcgaggctggaggcggcgctgcgggcgcgcgcgggggaccccggcgcgcgcgtggccgacttcttcgacgcggcggcgggggccggcgccggcggcgtgctggccgcgatgctgttcgtgcggggcgacgacgggcgggcgcggtacacggcggcggacgcgctggcgttcgtggcggccagcctcgggagaggcggcgggtggggcagcggcggcggcgggggcgtacggggcaagtgggccgcgctgttccggcgcggggggaggcggggtgcgccctcgccgccgctgcggcgggtgttcggggacgccacgctcagggacaccgtggcgccgctgctggtgccctgctacgacctggccacggccgcgcccttcctcttctcccgcgccgacgccgtcgggagcggcagcctcgacttccgcctccgcgacgtgtgcgccgccacctgcgccgccgccgggggcgccgcgcccgccgtgcggtccgtggacggccgcacggccatcgccgccgcgtccggcggcgtcgccgccatgggcaaccccgccgcggccgccatcacgcacgtgctccacaacaagcgggagttcccgctcgccgccggcgtcgacgacctcctcgtcgtgtccatcggctcgggatcgtccttcgcctccgccgccgccgcttctgctccttccaccggctggcggacgcccgtcccgccgcgctcgccgtcgcccgccgagatggtccgcctcacctccgagggtgtcgccgacatggtcgaccaagcagtggccatggcgttcgggcacacgtgcgggcgcaactacgttcgcatccaggcgtcgtgcgtcgggacggcgctgaggtcgctggacgcgaagaaggcggtggccttggcggacggcatgctggcgcagcggaacgtggaggcggagctgttccgggggcggcggctgtcggccaagtcgaaccgggagaagctggacgcgttcgcggcggagctggtgaaggagcaggagcggcgggaccgccaccgtgccgttcccggcatcgcagggctcgtaccagccctagccccagccattggcgatcgagtggatccgaggacgagctggtcaaagtaagttatactatacgatgcggtatgtccgccgtggctcgagaagaagggcggtagcgtggagagcaatgattagaggttacttttgcatggaaaaagtggatttggatgctaatggcgaggttagataggatgttaatgcctttttaatggagtacgtgcacttggattcgtatgtgcgagatgcaaagctcccgtttactgctctgccatgccatcttccctttctgccaacagtactctgcgctcctcatggccggccgtacatgtcatccttcctttctgtttacttcgcctgcgcgcggcttgctttcgatgcagggcagggaaagagagacttgaaggctgtgtaaagcgcatggcagtacctggctgga

SEQ ID NO: 219923 - DNA, 2444 bp, Zea Mays
aaacagcaaaccacctcccctgcccctggaccctgtagttggaacctgtattcgcgtgctccgggagccgtacgtgcgagaatagcaagcaggttgccaggttggttggctcttgcattggaggcaggcaggcgtcggggggcccgggccgcggggaccggaggtctcatcgtcccaactgaggccgccgccgtcaccgtggatgcgccgccatagtcgtcgtcgtcgtcgttgttgtcgtgacggacgtgcccggcaacattcctcctcctcgtcatcgtcgtggtcatccgcttcgttctccatccagattacatgcatgtgcctacagcagcagacgcggagagatgcgagcatccgtccatcgcaggtaattagctgcgacgacccaattccagaccggccaatccgcaccatgtcctccgatggccccacgccgtcgccaccgtcgtcgcacgctgcgagccgccgcctgtcgaccacgcacagcttcggcagccatggcaagctcctgccttctcccggacacggcgcgacggcgtcgcagatcgccgtcgcggcggccgccgcggcgctgctcctcgccgtcctcgctgcctgctgttgctgctgctgctgcaggagaaggaggaggaagggggacgcggcgcagcgtcagcatcggccgccgcctcacggcggcatgaggttctacgccgactcctccggcttcaaagggaacacctcggggtactactggccgagcggcgcgaggccgccgcagtggcagaccggcggccaggcggtcaccgcggcgatctcgaccatgcagcacggcgcggtgctcccgccgccaccgctgccgccgccgccgccgccgccgatgcccgcggacacggcgacgttcagctacgaggagctggcggcggcgacgggcgggttctcggaggcgaacctgctggggcagggcgggttcgggtacgtgcaccgcggcgtgctcccggggcccggcggccgcgtgaaggaggtggcggtgaagcagctcaaggccgggagcgggcagggcgagcgcgagttccaggcggaggtggacaccatcagccgcgtgcagcaccgccacctggtggcgctcgtcggctactgcatcgacggcgcgcgccgcctgctcgtctacgagttcgtgcccaaccagaccctcgagcatcacctccacgggaaagggctgccggtgatgggctgggcgacgcggctgcgcatcgcgctcggcgccgccaaggggctcgcctacctgcacgaggaatgcgacccacggatcatccaccgcgacatcaagtcggccaacatcctgctggacaacgacttcgaggccatggtcgccgacttcgggctggccaagctcacgaacgtgaaccacacgcacgtgtccacccgcgtcatgggcaccttcggctacctggcgccggagtacgcgtccagcggcaagctcacggagaagtcggacgtcttctcgtacggcgtcatgctgttggagctgctcaccggccgccgacccggcgaccgctcctcctacggccaggacggcctcgtcgactgggcgaggcaggccctgccgcgcgccctggccgacggcaactacgacgcgctggtagaccccaggctgcggggcgactacgacccgacggaggcggcgcgcgtcgtggccagcgccgcggcctccgtccgccacgcggcgcgccgccgccccaagatgagccagatcgtcctggcgctgcaggggggcatgccgctggaggacctcagcgacggggcgccaccgggccgcggcgcatcgttcggccccggctccggctcgctctccggctccgacgacggcgggtccgggtcgtcgtacacggcgcagatggagcggatcaggcgggccgcgcagcccagcccggattacagcaccgactaccccgtatccatcccggagttcggccacccgtcgcccgcgagcagcgccagctcagtcgagcgggatgaccggcggcatcgtggagggcgccggtgagtacgtgatcgacaggtgtaagcgtgatgtgctgacgactaattgactcctgcgcatccctgtcacgtgtgtatagcatatagtcgtcttgctgtaaaagtttatggcatactcccctgtttaaaatgtacaggttaaatttggcttacttcaacaaagattatataataaatttgacttacatctgcattagtggccggagctagctagggggttggatgatttcatggctgccacctgccgaacttaaaaataggaatagcaaggggttgccatggcatgcagatgcaggagcgcggttgtggtaaataaagcaggaaactttgtcctagctttcttgaagaaaaaccttgcttatcattaagtaattcacacgtatagaaactgtaatatgtcaaagttttggtgtttataa

SEQ ID NO: 219924 - DNA, 2915 bp, Zea Mays
cctcctcctcacctcgacccccttctcgttccgtgtcgccttctccgccgtggccgcgacagctgccgcgaattaattattcgcccaccattaaaacacctccgcccccttcgcgacctcctccagtcctccccaactcctctccatatctccacccttcctcagttcctctctcgtctctcatctcatccactcccgtcccagaatctccgtacacgcttcctcctcgccgtcgtgccaccccaccaaaccacgcctgaactgccatttcccccgttttttcccctctcgcgcaaggcgtaaccggtgcgtcgtggggggtagtttcggccgagggaagcgcggcgcgggaccgggcgcgtttcagaattcagaccggccggccggccgcggggagggcgccgcgagatcgcattgtggcggacgcggccgggtcaccgcggcattccgctccgggggtgtccgtggctgctcgaggcttttgcttgtttgtctcttacctcttgcgttgcgtcgggcggcggggctcgaggttggtggccggccaggcgcagcgtctccttttcgcggtcgcctttccggagcggctgccgccgctgctggtgcctggtggggacgcgcttcgcctttccgccgcctcggcgtggcgtgattccgaagcgttgccggggttgtactggttgctggtagatagaaaaacaccgcatcttttttggagggctcgtctcggctggcacgaaggttcctcgcggacaatgccgagcatccgagctccggcgtccaagcagacggccacgctacaggtggctgtcaagtgcaggccattgaccgacaccgagcagcggcgttcgcggcatattatacaggtcattgatgacaagactgtggtcgtgctggaccctgatctgtcaaaggattatctggacctcatccagaaccggaccaaggaaaggagctataccttcgatcatgtgtacgcgcctgggtgctccaattcggacgtgtataagaatatatcctctacaattgctggtgtagtccaaggccttaacgcgacagtctttgcttatggttctactggaagtggcaaaacttacactatggttggaacccatagcgatcctggtctgatggttcttagcttccgtacaatttttgagctgataaaaaaggacgacagtaaggatacgtttgaagtttcatgttcatatctggaagtgtacaatgaggttatctatgatttgcttgagagatcctctggacacctggagcttcgagaagatcctgagcatggcataatagttgctggattgagaagcattaaggttcattccgcagataggattcttgagctgttgaacataggcaacagtaggcgcaagacagagagtacagaagcaaatgctacttcttcacggtcacatgctgtacttgagattaccgtaaagcgaaagcagaaaggccaatatggtaaccaagttcttcgtggaaagcttgccttggttgatcttgcgggcagtgagagggcctctgaaacaaacaacttcggtcaaaagcttagagatggagccaacatcaaccgatcactcctagcattagcaaactgcatcaatgccctaggcaagcaaaataagaaaggtcttgcctatgttccctatcgcaacagtaaattaactcgtattcttaaggatgggctctctggcaattctcgaaccgttatggttgctacaatatcaccagctgatgatcagtatcatcacacaacgaatacactcaagtacgcagaccgtgctaaagagataaaaacacatgtccataaaaatattggaacacttgacactcatgttgaagactatcagaggatgatcgacaatcttcaggttgaggtttctcagttgaaaaaggaattagctgagaaggagcatcagttaagtgtaaagcctactgaaaaaactgcagatagtgagctatcttggttaaatgtcttgagccaggaaactggtgagaatgttcaagaacgcataaatcttcagaaggctctgtttgaactcgaagaaaccaataagcgaaaccgcatggaactccagcatcttgatgattctattgcaaggcatcaggtgaaagaaatggactctaccattctccaagctttaacatcaaggagacaagttattcttgacaacatccgtgataatgacgaagctggttctggatatagaaaggacatcgaaatgaatgagagtcgcaggcgacaactccaggatatgattgaagaggccatcagtaacaatggcaataaaacctacctgcacattctcagccagtacagactacttggaatgactaacgctgagcttcaaattgagatggctatgcgggatcaagttatacataatcagagggaagctctaaggagcctgtggaacattctctatggaacagggctaaaccagaagcagattcttaaattggctgcaaagcaagggttaaccgtagaaggctgtcctttgcctagctcaagcccagacgttaccacgccaccttcctgtcaacctcataggtttccatcgtttatgccatttcctggtccgcagtcagagccttattctccatctgcttgctttttccaacatggtttcagcactatgtctttgctgaaaaatcagcatgagacgcccacaatatgtaggcaggagcacctcagttcttactacatgatgtctggctgctcgccttactctggtgatggaaaacagtggtcaagtggaagacctacggcattcttttctactccagaaaaacctaaggaggctcagtcccaacacaacaaggaacattctggcagccatgatttcagtctgcacagaaaggggtcctcagaatacacatactgaattaatcttgctcctagttaa

SEQ ID NO: 219925 - DNA, 937 bp, Zea Mays
ccgctgacagaagccgtaagcatcttgctgctgcgcgactgcgcgagtgctcgtctctccttgtcctcctactacagtcgtcgtcgtctctctccagggacacacatccgccatcacctttgcttcttcgattcgcaaggagcacgagtactcatggagggacaggggtggaggaggcggcagatcccggcgttcgggaggtggaaccagcataccgacgaggcggggtacttggagtcggcggtgcaggctggcctcgtcaggcccggccactgctaccacgacgacggcggcaacgaggttgtgctgttcaggtcctccgcctcgccgcctccgcacaagccagccaagaaggtgcgaagcacgatggagggtcacggtcaccaccatcaggttcaggttgaggcggggagcaggaagcagcggccgttcgtggcgggcgacgggtcccgctcccgcgcggccaagccgaggccgagggtcgttagggcggcggtggacgaggacctgtacattgtcccttccgatatgtcgcgcaagaagaaagggaggaaacacgtgaggagcatgtggatggggtgcgtgggcctcaactgcgtcgcctgaccagacatgaccggaccttccgagcctttcttccagctttttcgggtcgcatggaaaaaagagagtccacgagacagacaacccagactatctgtttcatcccatccaatggatgatcgtcaatcaccacgtcggacacgggctcgatgcctgccgtccatccggatgtcgcatatgtatattgcctggtgctgtcattgtgcatgggtatatcaccaggcggcgtgagttgtctgtggtccatgtctacgtctacattgcatgcacttttttttacgataataataatggatagatatttggcttcaatatcttaaagagaggatctttt

SEQ ID NO: 219926 - DNA, 1009 bp, Zea Mays
gctaggtggatacccatctccattgaattaccatttcttccccaagtcatgttgcacgtctgtcaatgaagtcatttgccatggaattccagatgccaggaaacttgaggatggtgacattgtaaatgttgatgtaactgtatactataaaggtgttcatggtgatttaaatgagacatattttgttggaaatgtcgatgaagcttccaaacagcttgtacgttgtacctatgagtgcttggagaaagctattgcaatagttaaacctggagttcggttccgagaggtcggggaaatcataaatagacatgcttcgatgtcaggtttatctgtggtgaaatcctattgtggccatggcataggggaactgtttcactgtgccccaaacattcctcattattcaagaaacaaggctgttggtatcatgaaagctgggcagacatttacaattgaaccaatgataaatgcaggggtttggaatgatcggctctggcctgatgattggactgcagtcaccacagatggtaaacggagtgctcaatttgaacatacacttttggtgacagacacaggatgcgaagttttgacggcacggttaccctcatcaccagacgtttttccatggttgaaaccgtgatcgggcaccccaacagcaacaagaaagtgatactgacaaaccggggctgcaaaatttttgttctactctttatcagtcagtcaagctgaatattttgaaaattttcagaccaaacagtgataagcatgctactgctggacagtcgccctaattgtctgtcctgcggaattgtttctgggagtgtattgttaagtcggttttctccgagttatacgagacatatggcttgagttgtgtcaccaatatgattatgccataggactatcagagtttacttttaatttcagagaacataatttccatcaatttcagtaggttcatttttaatgaattcaaaccccacaaccgccgcagaccccgatgaatgatgag

SEQ ID NO: 219927 - DNA, 1521 bp, Zea Mays
ctttttcccgccgccctttccttcgcttcctgtctccaccgatgccccaaatgtgctgaacttaagctaccgcgtgagaacgcagctttctgcacacaggactgttttagggcagcatggagctctcacaaatctgttcacccaaagcctggtgcactggcatcccagcagtctccggaaggttggaaatattgtttgagaaaagggcggggacgtgcattgcaacttcctcgttttgaatggacaggtccattgagaccatatccgatatcaaagatgcgtgtggtgccagatgaaattgagaagcctgattgggcgcttgatggaattcccaagatagaaccagatagtgacttgcagaaaagagtagagattaagacccctgaactaatagaaaggatgagagaaacatgtcgaattgcaagagaggttttagatgcagctgctcgtgtaattaaaccaggaattacaacagatgaaattgatagagttgtccatgaagagacaattgctagaggtggatacccatctccattgaattaccatttcttccccaagtcatgttgcacgtctgtcaatgaagtcatttgccatggaattccagatgccaggaaacttgaggatggtgacattgtaaatgttgatgtaactgtatactataaaggtgttcatggtgatttaaatgagacatattttgttggaaatgtcgatgaagcttccaaacagcttgtacgttgtacctatgagtgcttggagaaagctattgcaatagttaaacctggagttcggttccgagaggtcggggaaatcataaatagacatgcttcgatgtcaggtttatctgtggtgaaatcctattgtggccatggcataggggaactgtttcactgtgccccaaacattcctcattattcaagaaacaaggctgttggtatcatgaaagctgggcagacatttacaattgaaccaatgataaatgcaggggtttggaatgatcggctctggcctgatgattggactgcagtcaccacagatggtaaacggagtgctcaatttgaacatacacttttggtgacagacacaggatgcgaagttttgacggcacggttaccctcatcaccagacgtttttccatggttgaaaccgtgatcgggcaccccaacagcaacaagaaagtgatactgacaaaccggggctgcaaaatttttgttctactctttatcagtcagtcaagctgaatattttgaaaattttcagaccaaacagtgataagcatgctactgctggacagtcgccctaattgtctgtcctgcggaattgtttctgggagtgtattgttaagtcggttttctccgagttatacgagacatatggcttgagttgtgtcaccaatatgattatgccataggactatcagagtttacttttaatttcagagaacataatttccatcaatttcagtaggttcatttttaatgaattcaaaccccacaaccgccgcagaccccgatgaatgatgag

SEQ ID NO: 219928 - DNA, 1650 bp, Zea Mays
attgcggaatcgactccgccgtcagcacggtagcgagcgcccccgcgcgcacgacttcgcttcccctccccggctacccgtccccgcggctgactcgtccacctcctgtccatattttcccctcgtgtccgccgcacgcaccgccggaaccctagcctcagccgccacagatgccccaaatgtgctgaacttaagctaccgcgtgagaacgcagctttctgcacacaggactgttttagggcagcatggagctctcacaaatctgttcacccaaagcctggtgcactggcatcccagcagtctccggaaggttggaaatattgtttgagaaaagggcggggacgtgcattgcaacttcctcgttttgaatggacaggtccattgagaccatatccgatatcaaagatgcgtgtggtgccagatgaaattgagaagcctgattgggcgcttgatggaattcccaagatagaaccagatagtgacttgcagaaaagagtagagattaagacccctgaactaatagaaaggatgagagaaacatgtcgaattgcaagagaggttttagatgcagctgctcgtgtaattaaaccaggaattacaacagatgaaattgatagagttgtccatgaagagacaattgctagaggtggatacccatctccattgaattaccatttcttccccaagtcatgttgcacgtctgtcaatgaagtcatttgccatggaattccagatgccaggaaacttgaggatggtgacattgtaaatgttgatgtaactgtatactataaaggtgttcatggtgatttaaatgagacatattttgttggaaatgtcgatgaagcttccaaacagcttgtacgttgtacctatgagtgcttggagaaagctattgcaatagttaaacctggagttcggttccgagaggtcggggaaatcataaatagacatgcttcgatgtcaggtttatctgtggtgaaatcctattgtggccatggcataggggaactgtttcactgtgccccaaacattcctcattattcaagaaacaaggctgttggtatcatgaaagctgggcagacatttacaattgaaccaatgataaatgcaggggtttggaatgatcggctctggcctgatgattggactgcagtcaccacagatggtaaacggagtgctcaatttgaacatacacttttggtgacagacacaggatgcgaagttttgacggcacggttaccctcatcaccagacgtttttccatggttgaaaccgtgatcgggcaccccaacagcaacaagaaagtgatactgacaaaccggggctgcaaaatttttgttctactctttatcagtcagtcaagctgaatattttgaaaattttcagaccaaacagtgataagcatgctactgctggacagtcgccctaattgtctgtcctgcggaattgtttctgggagtgtattgttaagtcggttttctccgagttatacgagacatatggcttgagttgtgtcaccaatatgattatgccataggactatcagagtttacttttaatttcagagaacataatttccatcaatttcagtaggttcatttttaatgaattcaaaccccacaaccgccgcagaccccgatgaatgatgag

SEQ ID NO: 219929 - DNA, 1631 bp, Zea Mays
gcggaaattgcggaatcgactccgccgtcagcacggtagcgagcgcccccgcgcgcacgacttcgcttcccctccccggctacccgtccccgcggctgactcgtccacctcctgtccatattttcccctcgtgtccgccgcacgcaccgccggaaccctagcctcagccgccacaggcagccgggatggagaaaggagcctcggaggcgtcggccccctgcgctcgctgcggcaagcccgcgcagctccaatgccccaaatgtgctgaacttaagctaccgcgtgagaacgcagctttctgcacacaggactgttttagggcagcatggagctctcacaaatctgttcacccaaagcctggtgcactggcatcccagcagtctccggaaggttggaaatattgtttgagaaaagggcggggacgtgcattgcaacttcctcgttttgaatggacaggtccattgagaccatatccgatatcaaagatgcgtgtggtgccagatgaaattgagaagcctgattgggcgcttgatggaattcccaagatagaaccagatagtgacttgcagaaaagagtagagattaagacccctgaactaatagaaaggatgagagaaacatgtcgaattgcaagagaggttttagatgcagctgctcgtgtaattaaaccaggaattacaacagatgaaattgatagagttgtccatgaagagacaattgctagaggtggatacccatctccattgaattaccatttcttccccaagtcatgttgcacgtctgtcaatgaagtcatttgccatggaattccagatgccaggaaacttgaggatggtgacattgtaaatgttgatgtaactgtatactataaaggtgttcatgttaaacctggagttcggttccgagaggtcggggaaatcataaatagacatgcttcgatgtcaggtttatctgtggtgaaatcctattgtggccatggcataggggaactgtttcactgtgccccaaacattcctcattattcaagaaacaaggctgttggtatcatgaaagctgggcagacatttacaattgaaccaatgataaatgcaggggtttggaatgatcggctctggcctgatgattggactgcagtcaccacagatggtaaacggagtgctcaatttgaacatacacttttggtgacagacacaggatgcgaagttttgacggcacggttaccctcatcaccagacgtttttccatggttgaaaccgtgatcgggcaccccaacagcaacaagaaagtgatactgacaaaccggggctgcaaaatttttgttctactctttatcagtcagtcaagctgaatattttgaaaattttcagaccaaacagtgataagcatgctactgctggacagtcgccctaattgtctgtcctgcggaattgtttctgggagtgtattgttaagtcggttttctccgagttatacgagacatatggcttgagttgtgtcaccaatatgattatgccataggactatcagagtttacttttaatttcagagaacataatttccatcaatttcagtaggttcatttttaatgaattcaaaccccacaaccgccgcagaccccgatgaatgatgag

SEQ ID NO: 219930 - DNA, 1749 bp, Zea Mays
tcagttcaaaaccgcgcggaaattgcggaatcgactccgccgtcagcacggtagcgagcgcccccgcgcgcacgacttcgcttcccctccccggctacccgtccccgcggctgactcgtccacctcctgtccatattttcccctcgtgtccgccgcacgcaccgccggaaccctagcctcagccgccacaggcagccgggatggagaaaggagcctcggaggcgtcggccccctgcgctcgctgcggcaagcccgcgcagctccaatgccccaaatgtgctgaacttaagctaccgcgtgagaacgcagctttctgcacacaggactgttttagggcagcatggagctctcacaaatctgttcacccaaagcctggtgcactggcatcccagcagtctccggaaggttggaaatattgtttgagaaaagggcggggacgtgcattgcaacttcctcgttttgaatggacaggtccattgagaccatatccgatatcaaagatgcgtgtggtgccagatgaaattgagaagcctgattgggcgcttgatggaattcccaagatagaaccagatagtgacttgcagaaaagagtagagattaagacccctgaactaatagaaaggatgagagaaacatgtcgaattgcaagagaggttttagatgcagctgctcgtgtaattaaaccaggaattacaacagatgaaattgatagagttgtccatgaagagacaattgctagaggtggatacccatctccattgaattaccatttcttccccaagtcatgttgcacgtaggtctgtcaatgaagtcatttgccatggaattccagatgccaggaaacttgaggatggtgacattgtaaatgttgatgtaactgtatactataaaggtgttcatggtgatttaaatgagacatattttgttggaaatgtcgatgaagcttccaaacagcttgtacgttgtacctatgagtgcttggagaaagctattgcaatagttaaacctggagttcggttccgagaggtcggggaaatcataaatagacatgcttcgatgtcaggtttatctgtggtgaaatcctattgtggccatggcataggggaactgtttcactgtgccccaaacattcctcattattcaagaaacaaggctgttggtatcatgaaagctgggcagacatttacaattgaaccaatgataaatgcaggggtttggaatgatcggctctggcctgatgattggactgcagtcaccacagatggtaaacggagtgctcaatttgaacatacacttttggtgacagacacaggatgcgaagttttgacggcacggttaccctcatcaccagacgtttttccatggttgaaaccgtgatcgggcaccccaacagcaacaagaaagtgatactgacaaaccggggctgcaaaatttttgttctactctttatcagtcagtcaagctgaatattttgaaaattttcagaccaaacagtgataagcatgctactgctggacagtcgccctaattgtctgtcctgcggaattgtttctgggagtgtattgttaagtcggttttctccgagttatacgagacatatggcttgagttgtgtcaccaatatgattatgccataggactatcagagtttacttttaatttcagagaacataatttccatcaatttcagtaggttcatttttaatgaattcaaaccccacaaccgccgcagaccccgatgaatgatgag

SEQ ID NO: 219931 - DNA, 1656 bp, Zea Mays
cgggcactcacctagtcctaaatagatttgagtttgcaaaccaccacatttccaaactacccacagttcagttcaaaaccgcgcggaaattgcggaatcgactccgccgtcagcacggtagcgagcgcccccgcgcgcacgacttcgcttcccctccccggctacccgtccccgcggctgactcgtccacctcctgtccatattttcccctcgtgtccgccgcacgcaccgccggaaccctagcctcagccgccacaggcagccgggatggagaaaggagcctcggaggcgtcggccccctgcgctcgctgcggcaagcccgcgcagctccaatgccccaaatgtgctgaacttaagctaccgcgtgagaacgcagctttctgtccattgagaccatatccgatatcaaagatgcgtgtggtgccagatgaaattgagaagcctgattgggcgcttgatggaattcccaagatagaaccagatagtgacttgcagaaaagagtagagattaagacccctgaactaatagaaaggatgagagaaacatgtcgaattgcaagagaggttttagatgcagctgctcgtgtaattaaaccaggaattacaacagatgaaattgatagagttgtccatgaagagacaattgctagaggtggatacccatctccattgaattaccatttcttccccaagtcatgttgcacgtctgtcaatgaagtcatttgccatggaattccagatgccaggaaacttgaggatggtgacattgtaaatgttgatgtaactgtatactataaaggtgttcatggtgatttaaatgagacatattttgttggaaatgtcgatgaagcttccaaacagcttgtacgttgtacctatgagtgcttggagaaagctattgcaatagttaaacctggagttcggttccgagaggtcggggaaatcataaatagacatgcttcgatgtcaggtttatctgtggtgaaatcctattgtggccatggcataggggaactgtttcactgtgccccaaacattcctcattattcaagaaacaaggctgttggtatcatgaaagctgggcagacatttacaattgaaccaatgataaatgcaggggtttggaatgatcggctctggcctgatgattggactgcagtcaccacagatggtaaacggagtgctcaatttgaacatacacttttggtgacagacacaggatgcgaagttttgacggcacggttaccctcatcaccagacgtttttccatggttgaaaccgtgatcgggcaccccaacagcaacaagaaagtgatactgacaaaccggggctgcaaaatttttgttctactctttatcagtcagtcaagctgaatattttgaaaattttcagaccaaacagtgataagcatgctactgctggacagtcgccctaattgtctgtcctgcggaattgtttctgggagtgtattgttaagtcggttttctccgagttatacgagacatatggcttgagttgtgtcaccaatatgattatgccataggactatcagagtttacttttaatttcagagaacataatttccatcaatttcagtaggttcatttttaatgaattcaaaccccacaaccgccgcagaccccgatgaatgatgag

SEQ ID NO: 219932 - DNA, 3672 bp, Zea Mays
ctcttctctctcccagtctcccccaaaccgccttgcctccgttgccctccccactcccctctcacctcctaaaacccctcttgctctcccttgcccgcgcgcacgagcacgcgcatcgacaccttcagctcgtgtgtccgtgcgagcgggcggtttcctcgccaagaactgtcgcgcgggtcgggggattgaggaagagagtgtcggcggcggcggcggcgacgacgacggatttttctggcccgagattcctggtcaaggcaatatgaagtacgtccttgtcaccggcggggtggtgagcggcctgggcaagggcgtcacggccagcagcatcggcgtcgtcctcaaggcgtgcggcttccgcattacgtccattaagatcgatccttaccttaacaccgatgctgggactatgtctccattcgaacatggtgaagtgtttgtgctggatgatggtggcgaggtggacttggatcttggtaattacgagaggtttctggacattaaacttactcgggacaataacataaccaccggaaagatctatcagtctgtaattgacaaggagaggaaaggggaatacttgggaaagactgtccaggttgtgccacacatcacaaatgccatacaggagtggattgagcgtgttgctatgataccagttgatggcatggagggacctgctgatgtctgtgtgatagaattggggggcactataggtgatattgaatccatgccatttatagaagctttgggtcagttctcttatcgtgttggtcctggcaacttctgcctggtgcacgtcagtctagttccagttttgaatgttgttggtgaacagaaaacaaagccaacccagcatagtgtacgtggtttgaggggactcgggctcactccaaatattttagcttgccgcagtactaaggaattagaggatagtgtgaaggagaaactctcccagttttgccatgtgccggcagcaaatattatcactttgtatgatgtttccaatatctggcgcattcctttgttgctttgtgaccaaaaggctcatgaggctatccttaaagttctgaatctggaaagggtggatagcattgcccgagagccgaagttagacgaatgggttgcaagagctgctatatttgatacccttcatgacactgtgaggattgctatggttgggaagtacactggcttatcagattcatacctctctgtgttgaaagccctcttgcatgcatctgttgattgccgtaggaaacttgttgttgattgggttgcttcgacggatcttgaggattccacagcaattgaggcacccgatgcatataaaacatcatggaatttattgaagggggcagatggaattttggtacctggtggctttggtgacagaggtgttgaagggaaaattttggctgctaagtatgcccgggaaaagaatgtcccatatcttggtatatgtcttgggatgcagattgctgtcgtggagtatgcccgtcatgttatgaatttcactgatgccaacagcactgaatttgatccaaataccaagaccccttgtgttatttttatgcctgagggttccaaaacacatatgggtgcaacaatgcgcttaggatcaaggaggacatttttcaagattgctgattgcaagtcttctaaattgtatggcaatgtcacttatgttgatgaaaggcaccggcacagatatgaggtgaaccctgatatggttccagagttcgaaaaagctgggcttcagtttgttggcaaagatgatactggaaggaggatggagatgattgaaatacccaaccaccgatattttgttggcgcacaattccatcctgagttcaagtcaagaccttcaaaaccttctcccctatttgtgggactaattgcagctgcatctgggcagttggatagggtgctgcaagaccgctgcaatggtcatgttggttcagctaaacatgttctgagcaatggctcatatacatccgcagtacaccaaaatgggaacccaaagaagctcaccaatggtctctcaaacggaacatactatgccaatggcaatggtgtgcatgcttagaccatcagatggatggatcaaggattttgcaactctttacttcaattatgcggttcctaatgcatcagttttgtccgttcgaggaagaaaaagttcttgcgctcgatgcagactgtctgctgggaatagtgctcgttcggtggtttttagttaaagaactaagctggatctctttggaaggcacgagactggtttctgtgttcgtctctaccctattgtgtaagctaaaggagcagatttgggacggaagagtttacaagttgtatatcctcaaagaaaagctgaatatttttattaacttaaattaggtcttcagtgaggtcgagagctgatgcttaaaagtgggcagcagtgcaagtgcaagagagagtatttcgaaatcaggcaactctgtattttgattttggacattttttttgtttcttgtgcgcaaataagttgatgcactgttgcatgatcatatatcagttttgactttagaatccatcttgagcgcttgcttctcataattcctgcgacttgcattgtggcaatctaaaacctatttaaaccgtgataaataagctagtttatttttaactaagctgtgatataaattaaaaagaacgaaaggggagggagtgtctgatacgcaaaatcatcctatatcacaacaatttcgagttttttttgccgagttgatcgaaattccttgcggtgcaaaaatacacgagcataaaactttgccatcaagaatctatctatgaaaaccgaaagctcaatccgtgaccgtgcaacggctcagggttcccactctgagagaagcttgtcaatcagctccaccagcttccctgtctcctccggctggcgcatcgcctgctccagcgcccacgcttcctcgatcctggcgtcctgcagcatcgcgtcccgcaccgcctcccgcagctcccgcgtggcctgcaacccgtccgttgccatctccctgagcgcagccagcgcgcccctggggtcctcaaggcggcagagcccctcgacggcgtcagcgtaggtggcggcgtcgggccggcgcggggagtccgggcggcagagccagcgcagcacggaggaggcgtcgcgcgcgcggcgcagggagaggaggctgccgagcagcggcgacgccagcaggagcggcgagggccgggccgggtgatggcgcagcgcggtgaggagcgcgaaggcagcggagagtgtcggaagcgaggcaaggtgcgcggcgagggaatcgagggggaggccgtcctgggagcccgggaggaggagcgccgcggagaggaggcggccggcggcggggacgtggcccgcgtagaggaggcgcgggaggagcgcggagatcgcgtccaggtcggacggggagaggggttgaggtgggggcttggattgcggcagcgcggtagcgcagatgccgcgaaggacgccggcgagcggcggcgcgaggcggatgggcaagcggggcagcatcgtcttctgggctcggctcactcaggaacgattctgagtcttttttttctttctgcaggagggcgcgccgccgtcaaatggacgagcgatatctcagatcgagc

SEQ ID NO: 219933 - DNA, 554 bp, Zea Mays
ctcccccaaaccgccttgcctccgttgccctccccactcccctctcacctcctaaaacccctcttgctctcccttgcccgcgcgcacgagcacgcgcatcgacaccttcagctcgtgtgtccgtgcgagcgggcggtttcctcgccaagaactgtcgcgcgggtcgggggattgaggaagagagtgtcggcggcggcggcggcgacgacgacggatttttctggcccgagattcctggtcaaggcaatatgaagtacgtccttgtcaccggcggggtggtgagcggcctgggcaagggcgtcacggccagcagcatcggcgtcgtcctcaaggcgtgcggcttccgcattacgtccattaagatcgatccttaccttaacaccgatgctgggactatgtctccattcgaacatggtgaagtgtttgtgctggatgatggtggcgaggtggacttggatcttggtaattacgagaggtttctggacattaaacttactcgggacaataacataaccaccggaaagatctatcagtcagaagatgaaatagtccac

SEQ ID NO: 219934 - DNA, 1587 bp, Zea Mays
ctcccccaaaccgccttgcctccgttgccctccccactcccctctcacctcctaaaacccctcttgctctcccttgcccgcgcgcacgagcacgcgcatcgacaccttcagctcgtgtgtccgtgcgagcgggcggtttcctcgccaagaactgtcgcgcgggtcgggggattgaggaagagagtgtcggcggcggcggcggcgacgacgacggatttttctggcccgagattcctggtcaaggcaatatgaagtacgtccttgtcaccggcggggtggtgagcggcctgggcaagggcgtcacggccagcagcatcggcgtcgtcctcaaggcgtgcggcttccgcattacgtccattaagatcgatccttaccttaacaccgatgctgggactatgtctccattcgaacatggtgaagtgtttgtgctggatgatggtggcgaggtggacttggatcttggtaattacgagaggtttctggacattaaacttactcgggacaataacataaccaccggaaagatctatcagtctgtaattgacaaggagaggaaaggggaatacttgggaaagactgtccaggttgtgccacacatcacaaatgccatacaggagtggattgagcgtgttgctatgataccagttgatggcatggagggacctgctgatgtctgtgtgatagaattggggggcactataggtgatattgaatccatgccatttatagaagctttgggtcagttctcttatcgtgttggtcctggcaacttctgcctggtgcacgtcagtctagttccagttttgaatgttgttggtgaacagaaaacaaagccaacccagcatagtgtacgtggtttgaggggactcgggctcactccaaatattttagcttgccgcagtactaaggaattagaggatagtgtgaaggagaaactctcccagttttgccatgtgccggcagcaaatattatcactttgtatgatgtttccaatatctggcgcattcctttgttgctttgtgaccaaaaggctcatgaggctatccttaaagttctgaatctggaaagggtggatagcattgcccgagagccgaagttagacgaatgggttgcaagagctgctatatttgatacccttcatgacactgtgaggattgctatggttgggaagtacactggcttatcagattcatacctctctgtgttgaaagccctcttgcatgcatctgttgattgccgtaggaaacttgttgttgattgggttgcttcgacggatcttgaggattccacagcaattgagggggcagatggaattttggtacctggtggctttggtgacagaggtgttgaagggaaaattttggctgctaagtatgcccgggaaaagaatgtcccatatcttggtatatgtcttgggatgcagattgctgtcgtggagtatgcccgtcatgttatgaatttcactgatgccaacagcactgaatttgatccaaataccaagaccccttgtgttatttttatgcctgagggttccaaaacacatatgggtgcaacaatgcgcttaggatcaaggaggacatttttca

SEQ ID NO: 219935 - DNA, 1402 bp, Zea Mays
tactattgttgcacttgttgctctgattgtggcctttgccttgtaaaatcggtggtggcaagccagctattacttgcattaatgctttagttgcttgtgtttgtctttatgtggttgacatgttctcattcagttacctgaatatgcagatccttaccttaacaccgatgctgggactatgtctccattcgaacatggtgaagtgtttgtgctggatgatggtggcgaggtggacttggatcttggtaattacgagaggtttctggacattaaacttactcgggacaataacataaccaccggaaagatctatcagtctgtaattgacaaggagaggaaaggggaatacttgggaaagactgtccaggttgtgccacacatcacaaatgccatacaggagtggattgagcgtgttgctatgataccagttgatggcatggagggacctgctgatgtctgtgtgatagaattggggggcactataggtgatattgaatccatgccatttatagaagctttgggtcagttctcttatcgtgttggtcctggcaacttctgcctggtgcacgtcagtctagttccagttttgaatgttgttggtgaacagaaaacaaagccaacccagcatagtgtacgtggtttgaggggactcgggctcactccaaatattttagcttgccgcagtactaaggaattagaggatagtgtgaaggagaaactctcccagttttgccatgtgccggcagcaaatattatcactttgtatgatgtttccaatatctggcgcattcctttgttgctttgtgaccaaaaggctcatgaggctatccttaaagttctgaatctggaaagggtggatagcattgcccgagagccgaagttagacgaatgggttgcaagagctgctatatttgatacccttcatgacactgtgaggattgctatggttgggaagtacactggcttatcagattcatacctctctgtgttgaaagccctcttgcatgcatctgttgattgccgtaggaaacttgttgttgattgggttgcttcgacggatcttgaggattccacagcaattgaggcacccgatgcatataaaacatcatggaatttattgaagatggaattttggtacctggtggctttggtgacagaggtgttgaagggaaaattttggctgctaagtatgcccgggaaaagaatgtcccatatcttggtatatgtcttgggatgcagattgctgtcgtggagtatgcccgtcatgttatgaatttcactgatgccaacagcactgaatttgatccaaataccaagaccccttgtgttatttttatgcctgagggttccaaaacacatatgggtgcaacaatgcgcttaggatcaaggaggacatttttca

SEQ ID NO: 219936 - DNA, 3026 bp, Zea Mays
caacacacacaaagagagctgtagaagcagacgcccaaaacaatggccgcagaccgcagtacaagtacacaacacaacactggccgcaaactgcagtgcgagcagccgagctgagtgaagaggggtttggacgtttggtagacacggagggttttgctgggggaggagcattgcaagtaggactgtaggagtatttctccgctctcttcctgcttgatccatccctttctcctctagcctcgcaaagtcgcactctactgggcgctctcgcttcctccttgagcggcgcagccgcgggcgcgtagtgcacatctctctctctcccccctctccccctcgccattaatttgctgcctgccatcccggtagcgcttcgctgcgcagcctgcgcctgaagacagggttcacccaaacctatgaattatggctcttatattgtccacctccaaaattcattattgaagaggactctaaggggagagcgttatataaagctgtacagctaccgctacttgattaatggttttgctgttgtcatcactcctctacaggcagataagctatctaggagaaaagaagtagcaaatgtgatgctggattactcagttaggacagcaacaactcatacccctgaattccttggactgccgcaaggagcctgggtgcaagaaggtggtccgcaattcgcgggtcagggtgtcgtcattggcctcatcgacacaggaatagatccaacccaccctagctttgcagatgatctatcaactgatagttatccagtacctgctcactactctggcatttgtgaggttacaaatgatttcccatctggatcctgcaatagaaagctcgtgggggctcggcattttgcagcatctgcaataactagaggagtcttcaatgcgtctcaagatcttgcttcaccatctgatagtgatggccatgggacgcatacggcatccattgctgctggaaatcacggaattcctgttgctgtgtctgggcatcaatttggaaatgcaagtggcatggctcctcgtgcacacattgctgtctataaagctctttataaaagctttggtggttttgctgctgatgtagtagctgcaatagatcaggcagctgaagataatgttgacatcataagtttgtccattactcctaatcggaggccacctggactcgcaacattcttcaatccaatagatatggcactcttgtcagctgttaaagctggcatatttgtggtgcaagctgcaggaaatactggcccttcccctaagagtatgtcttcatatagtccttggatatttactgttggagcttctgcccatgacagggtatacaacaactacattgtacttggcaacaatttgaccattcaaggagttggtcttgcccctggaacggatgatgattgcatgtatactttagttgctgcgccgcatgcactgaagaacaatacagtcagtcctactgaattgtcctttggggaatgccaagattcgagtcgcctagatgcagatttgataagaggaaagatactagtgtgcagctattctataagatttgtgcttggtctttcttctgtgaaacaagctctagatacagcaaataatgtcagcgccgcaggagttatattctatttagacccatttgttcttgggttccagctgaacccaactccaatgcgcatgcctggacttataataccatcatctgatgactctaaggtatttctcgcttactacaatgactccctagtgagagatgagacatcaggccaagttgttagctttggcggagttgctaaaatattaggggggctaaatccagattatggaaattctgcaccaaaagtaatgttctattctgctaggggtcctgaccctgaggacaatacactgtcaaatgctgatatcttgaaacccaatctagtagcacccggaaattcgatttggggtgcttggagttcacttggattggattctgctgaattttctggtgaaagtttcgcgatgctctctggcacaagtatggctgcaccccatgttgctggcctggctgctctaatcaagcagaagtttccttcttttagcccagcagctatagcttctgcattgtctacaaccacaactcttagtgacaggcaagggaaaccaatcatggcgcagcgaacatacagcaacccagactcgacgcaatctccagcgacagcttttgatatggggaatggttttgtaaacgctaccgctgctttagacccggggctcgtatttgattgcagttatgatgatttcttctcctttctttgcggcataaacgggtctagcccagtcgtgacaaactacactggcaacagctgcgtggcctccgccatgacaggagcagatctaaacctaccatcaatcaccatagccgtgctcaaccagacaagaagcataacgagaacggtgaccaacgtggcggccgacgagagctacaccgtcagttacagcgctccctatggaactgcaatctccgtggtaccgatgcattttcttattccaagcgggcagaagcagcttgtgaccttcgttgtgaacgccaccatgaacagctccagcgcaagctttgggaacgtcggtttctatggtgacaagggccacagggcgatcatcccattctctgtgatctccaaggctgtgtacagttcctgacgactgatgagccgagctgatgcagtggatgcaaatgcaatgcagaccagggcctgactgatccagccagcgtatgcagtggtgacttaactgcatggagccatggaggtggagcttacctttgactaggatttttttgttgttggttgtggtgtgtacactctgaagcatgttgatgtaagtagctgagtgattaaccagtaactgtaaaaagaatgtactaccagaatgttgccatgaatgggaaaaccttctgccaccagaatgttaaacagcactctgcttgatttaccgatgtgaatgtgatgtttgtgtgatagcatcgtg

SEQ ID NO: 219937 - DNA, 3432 bp, Zea Mays
caacacacacaaagagagctgtagaagcagacgcccaaaacaatggccgcagaccgcagtacaagtacacaacacaacactggccgcaaactgcagtgcgagcagccgagctgagtgaagaggggtttggacgtttggtagacacggagggttttgctgggggaggagcattgcaagtaggactgtaggagtatttctccgctctcttcctgcttgatccatccctttctcctctagcctcgcaaagtcgcactctactgggcgctctcgcttcctccttgagcggcgcagccgcgggcgcgtagtgcacatctctctctctcccccctctccccctcgccattaatttgctgcctgccatcccggtagcgcttcgctgcgcagcctgcgcctgaaggttcgatctttcactcccatgggcggtggacgcaactagtctttctttcttggtgtttcttggcgcctcgtgggaggtgagcgccgaggagcttcgagggaatgagggtgacgcggagggatgagcaccgggccgccgccgccgcgttcctgtacgcggtgacggttcttggggtgttggcgggcagcgccggcgtccgcgctttcgatgatggcacagcggtgtacattgtcaccatgaagcaggcgccggttttccacaggcgccttaacttggagaagttcgggagcagcagggttgctaatgctgccggccgcggcggcggcgggggaggaggaggaggaggaggaggaggaggaggaggagcaggagacaccccgaccaccagcgtcctcaggaagccgagacagggttcacccaaacctatgaattatggctcttatattgtccacctccaaaattcattattgaagaggactctaaggggagagcgttatataaagctgtacagctaccgctacttgattaatggttttgctgttgtcatcactcctctacaggcagataagctatctaggagaaaagaagtagcaaatgtgatgctggattactcagttaggacagcaacaactcatacccctgaattccttggactgccgcaaggagcctgggtgcaagaaggtggtccgcaattcgcgggtcagggtgtcgtcattggcctcatcgacacaggaatagatccaacccaccctagctttgcagatgatctatcaactgatagttatccagtacctgctcactactctggcatttgtgaggttacaaatgatttcccatctggatcctgcaatagaaagctcgtgggggctcggcattttgcagcatctgcaataactagaggagtcttcaatgcgtctcaagatcttgcttcaccatctgatagtgatggccatgggacgcatacggcatccattgctgctggaaatcacggaattcctgttgctgtgtctgggcatcaatttggaaatgcaagtggcatggctcctcgtgcacacattgctgtctataaagctctttataaaagctttggtggttttgctgctgatgtagtagctgcaatagatcaggcagctgaagataatgttgacatcataagtttgtccattactcctaatcggaggccacctggactcgcaacattcttcaatccaatagatatggcactcttgtcagctgttaaagctggcatatttgtggtgcaagctgcaggaaatactggcccttcccctaagagtatgtcttcatatagtccttggatatttactgttggagcttctgcccatgacagggtatacaacaactacattgtacttggcaacaatttgaccattcaaggagttggtcttgcccctggaacggatgatgattgcatgtatactttagttgctgcgccgcatgcactgaagaacaatacagtcagtcctactgaattgtcctttggggaatgccaagattcgagtcgcctagatgcagatttgataagaggaaagatactagtgtgcagctattctataagatttgtgcttggtctttcttctgtgaaacaagctctagatacagcaaataatgtcagcgccgcaggagttatattctatttagacccatttgttcttgggttccagctgaacccaactccaatgcgcatgcctggacttataataccatcatctgatgactctaaggtatttctcgcttactacaatgactccctagtgagagatgagacatcaggccaagttgttagctttggcggagttgctaaaatattaggggggctaaatccagattatggaaattctgcaccaaaagtaatgttctattctgctaggggtcctgaccctgaggacaatacactgtcaaatgctgatatcttgaaacccaatctagtagcacccggaaattcgatttggggtgcttggagttcacttggattggattctgctgaattttctggtgaaagtttcgcgatgctctctggcacaagtatggctgcaccccatgttgctggcctggctgctctaatcaagcagaagtttccttcttttagcccagcagctatagcttctgcattgtctacaaccacaactcttagtgacaggcaagggaaaccaatcatggcgcagcgaacatacagcaacccagactcgacgcaatctccagcgacagcttttgatatggggaatggttttgtaaacgctaccgctgctttagacccggggctcgtatttgattgcagttatgatgatttcttctcctttctttgcggcataaacgggtctagcccagtcgtgacaaactacactggcaacagctgcgtggcctccgccatgacaggagcagatctaaacctaccatcaatcaccatagccgtgctcaaccagacaagaagcataacgagaacggtgaccaacgtggcggccgacgagagctacaccgtcagttacagcgctccctatggaactgcaatctccgtggtaccgatgcattttcttattccaagcgggcagaagcagcttgtgaccttcgttgtgaacgccaccatgaacagctccagcgcaagctttgggaacgtcggtttctatggtgacaagggccacagggcgatcatcccattctctgtgatctccaaggctgtgtacagttcctgacgactgatgagccgagctgatgcagtggatgcaaatgcaatgcagaccagggcctgactgatccagccagcgtatgcagtggtgacttaactgcatggagccatggaggtggagcttacctttgactaggatttttttgttgttggttgtggtgtgtacactctgaagcatgttgatgtaagtagctgagtgattaaccagtaactgtaaaaagaatgtactaccagaatgttgccatgaatgggaaaaccttctgccaccagaatgttaaacagcactctgcttgatttaccgatgtgaatgtgatgtttgtgtgatagcatcgtg

SEQ ID NO: 219938 - DNA, 3628 bp, Zea Mays
attggggtgtggattggggtacacctcaatacatgtggattatggtgactagagtacccaaacaatgcctaaatcttcatattgttcatcttctctggtttctttctgtttatatgcttcaagtcttgtttaatctgaagtactgattggcggtacctgtgtatgttgccattctcttaaaatatttttgttccttaaccttttgattccttagatatatttcgcccatttgttggttttcgtgaagttcgtcttgtcaacaaggagtccagacatcctggtggagatccacatgtgttgtgtttcgttgattttgacaaccctgctcaggctacaattgctctggaagcattacaaggttataagtttgacgaacacgagcgtgattcagcccatttgcgtctgcaattctcacgctttcccggtccaaggtcagctggtgggcctcgcggtaggcgttaagacgtgcggacctcgtggttgccgaacctatcgtttatacgagcgatccaactacggtgggctaacgcttcgatatgcgctgaatttcggggcggtggctttttagggttcgtcagctcatttcgtgaatgcgtgaaagggacaatgcaataagtgatattctgccatatgttattagatgccgtataatgtgttaggcatggaaagttattcgacatactgtatctgctgccttagctattgtggtctactgtaacttcattaccttgcttcacatccgagacaatttgagtttgttatcatgtggattatctgttttgaaaatgaaaactagatgatgttagcctattttagtaatgcatattgccccattggtgtttcttgcccatataccaaaatcgtgtactttaatctaggattagtaaaactgtggttgcctaggaactatgttgtaacccactgacacccttagttaagcaccaaaggatgtcaggggctactgtgcctatttctgactttattttgtaaggctaagttcctcgaagatcagctatactaaatggatattagttgctgattgaaactttgatagtgaacttttgaaattttcgttggcataataaatctgagtacatttctcttaaagaagcaaattgattttccttaagtttgatgtgattgttgttggtccaaattactgtgaactgctttggagcttttggggtatctgtagtaatttgtgagaaataactcaataactgagatttgatcaagatgcaaagttaatgaaatgtaatacattctgggatagaggtagtattttgatctgcatgtgtttctaagctacaaataacatggagtgcgagggtattgtttgcatatagtgaactaaattgggatgcagcaatgccagtccaatcctgtttccataagcattgttgaagtagccatgcactgttcagtcatgcatctgtactcaggtaatacaaagttcagttgtgttcatgcattgaaatggtctgctctagaacatgtagcttttggtttaatttagatccactgcatgtcacttgggcgaaatcttctgttcattgattcctttcatctgtcttcctaaagatgtactctctctgttcttttttatttgttgcattttagttcaaaaatggactagcggaccacaaatattcgagaacggaagtagtatatgccaatccgtgtcattttactaattaaattcttggtattatttgtgttcattctcagatggctgttatattgtatatgcgtattgcttaatgggttgaatgtcttacgaattgcttcacatgatgtgttgaaactggctgtgcaatttatttacccaataggtatgcttattccttaacagtttaatgcatggccttatgtgtttactgcagtggtttgcattaataactacatttcggtgtgtgctaatttgcctttctaacccctgtcgacctatcggaatgtgctaatttgcctttctaacccctgttgacctatcggattgtgccttcgccttttgcaattctttgaagtccctgcttattgcgtgccagatgtgtgttgctgttgccattttttcgactgctttgtcgtttctgcgtcagtctgtgtgtttgcatgtctgctgcgtcgtgaacgtttttttttatcagtcgtgcgttattgcactttgcctgttccattttttttaatatttagagctagtttggcaacttcatttttccaaaggattttaagaaatggaagggaaatgagttcattttctctttgggaaaatgagaatcccttagaggaatggagttcctaaattagcccttatacgatatttacatgtgtttgccatcagtgtgaatcttcatactaagggttaatttggaaacttaaatcccctttcggaatcctagagattgagtggagattgactaatatcgcactcaatccccggaatcccctaagttctggaactagccctaaatggtttatatgaatattctcttctaccgagttgtgaactgctgaactctagttctgtgtatctgttacgacacctagcactgtgacacttgaaattgttacagattaagacgcactgacgataccctgcgctcagttgctcgatactcgaggcttgtaggtgattgtatccagtagtttgaagaactggttatctaattatttatgtactgtggatccaccattttggatacgcttcatcaatataaaagagctccaattatgaaagttaggagaaaatggcgatctctaaactattcttgagttgtcgtccagctcccaagactaatggaattgcagtttaatgtctctgatattatattgtaacgtgtcatctcgctccaagcttatacgttggtctgctgttacatgccagttctgtaaggagaaatggcaccgattactggaaattttacaaattggccctactacttgtttagattggacaagctctctcctcgtctctatttaatctcttcctctgtttttctctatttgccccttcgttcactctttctcctcccttttcttgtctcgttatcgtctgctacgccaaaccctagccccaaatcagtagcttgaagctgcccacagcgctccaaattgggatccacagattctgcattcatgaagtgggtggggtaaacggcttggggaattgtgtgtgctatcgtcatttaggcgcaggacgaaagggaagccaccgttgattactcctagactgaattgtaggcaaattgttgaggttcacgcggccatagtcgctatgacaatttctacatggccccagacacaggttgcttgtatgctttgcaggatagctaaggaaaaggacattcttgcactgggacgacaacaaaggaagcgcacggagctgggcaattctcagtttagatgctcaagttgggactttggtgggtttaggttatggtcgttaaaatgcctcgtatttgctaggcagaactgttctttggatgttgttggctgtggtgattgagaaggaataaatgtcatgtaatataaagagtactatgtaacgcacaccaccttttgttagaatgtgaactaccttttgctacaatgtgagatcaaatgtttgagtgaaaaaatgtcttgccattag

SEQ ID NO: 219939 - DNA, 2340 bp, Zea Mays
ttggggtacacctcaatacatgtggattatggtgactagagtacccaaacaatgcctaaatcttcatattgttcatcttctctggtttctttctgtttatatgcttcaagtcttgtttaatctgaagtactgattggcggtacctgtgtatgttgccattctcttaaaatatttttgttccttaaccttttgattccttagatatatttcgcccatttgttggttttcgtgaagttcgtcttgtcaacaaggagtccagacatcctggtggagatccacatgtgttgtgtttcgttgattttgacaaccctgctcaggctacaattgctctggaagcattacaagatggctgttatattgtatatgcgtattgcttaatgggttgaatgtcttacgaattgcttcacatgatgtgttgaaactggctgtgcaatttatttacccaataggtatgcttattccttaacagtttaatgcatggccttatgtgtttactgcagtggtttgcattaataactacatttcggtgtgtgctaatttgcctttctaacccctgtcgacctatcggaatgtgctaatttgcctttctaacccctgttgacctatcggattgtgccttcgccttttgcaattctttgaagtccctgcttattgcgtgccagatgtgtgttgctgttgccattttttcgactgctttgtcgtttctgcgtcagtctgtgtgtttgcatgtctgctgcgtcgtgaacgtttttttttatcagtcgtgcgttattgcactttgcctgttccattttttttaatatttagagctagtttggcaacttcatttttccaaaggattttaagaaatggaagggaaatgagttcattttctctttgggaaaatgagaatcccttagaggaatggagttcctaaattagcccttatacgatatttacatgtgtttgccatcagtgtgaatcttcatactaagggttaatttggaaacttaaatcccctttcggaatcctagagattgagtggagattgactaatatcgcactcaatccccggaatcccctaagttctggaactagccctaaatggtttatatgaatattctcttctaccgagttgtgaactgctgaactctagttctgtgtatctgttacgacacctagcactgtgacacttgaaattgttacagattaagacgcactgacgataccctgcgctcagttgctcgatactcgaggcttgtaggtgattgtatccagtagtttgaagaactggttatctaattatttatgtactgtggatccaccattttggatacgcttcatcaatataaaagagctccaattatgaaagttaggagaaaatggcgatctctaaactattcttgagttgtcgtccagctcccaagactaatggaattgcagtttaatgtctctgatattatattgtaacgtgtcatctcgctccaagcttatacgttggtctgctgttacatgccagttctgtaaggagaaatggcaccgattactggaaattttacaaattggccctactacttgtttagattggacaagctctctcctcgtctctatttaatctcttcctctgtttttctctatttgccccttcgttcactctttctcctcccttttcttgtctcgttatcgtctgctacgccaaaccctagccccaaatcagtagcttgaagctgcccacagcgctccaaattgggatccacagattctgcattcatgaagtgggtggggtaaacggcttggggaattgtgtgtgctatcgtcatttaggcgcaggacgaaagggaagccaccgttgattactcctagactgaattgtaggcaaattgttgaggttcacgcggccatagtcgctatgacaatttctacatggccccagacacagggtaagttgaactgaagagctctgctccaaagaagctttgttaactacgttgtgttctttgttaacctcctgcccattttggcaccgggaggaaagttgcttgtatgctttgcaggatagctaaggaaaaggacattcttgcactgggacgacaacaaaggaagcgcacggagctgggcaattctcagtttagatgctcaagttgggactttggtgggtttaggttatggtcgttaaaatgcctcgtatttgctaggcagaactgttctttggatgttgttggctgtggtgattgagaaggaataaatgtcatgtaatataaagagtactatgtaacgcacaccaccttttgttagaatgtgaactaccttttgctacaatgtgagatcaaatgtttgagtgaaaaaatgtcttgccattag

SEQ ID NO: 219940 - DNA, 2905 bp, Zea Mays
cagctctgtttcgtcgtgtcttgtcccgcccgggctctcgtcggtctcggaccggtacgcaacaaacggggggagcacccgactccacgtcctcttccaccaccaccaccaccgcctcatcccccaccaccgagcagcacagcacagggcactgcccgattccacccctgcagcctctcgctgcccactttccatgtcactgcaccactgccgcgctgccacgacgcccgccatgcccgccaccggcctctcgtccgcgggcgcttccccgttccgcctgcccgcctccagctcctccgcccagggccacctccgtctctccccccctgctgccactgccagtgccaccgcctgccgccgccgcttgcttctccgctgcgccgcctcttctggcggtggcggcggcagcggctccgacccggtcctagaggagcagcggcgccgccaggccgagctcgccgcgcgcattgcgtccggcgagttcaccgtgcaaggccccgggtggattgcgcctctcgtggggaggctctccaagctgggcccgccgggggagctcgccgccgcgctgctcaccagggtagcgggcgctggcggcccggagatcccgcaggcagtggggtcgatcaacgcggtcgtgggccaggccttcttcgtgcccctgtacgacctcttcctcacctacggcggcatctttcgcctcaactttggccctaagtcgtttcttattgtctccgatccggctatcgctaagcacatcctgagggagaactccaaagcttattccaagggaattcttgctgagatattggagtttgtgatgggcacaggtttgatcccagctgatggggagatttggcgtgttcggaggcgtgctatcgtccccgcactgcatcagaagtatgtgactgcgatgattggtctctttggggaagcttcacaacggctctgcgagaaattggacaaggcagcagtggatggggaggacatggagatggagtcgctgttctctcgactcacactggatgtcatcgggaaggcggtgttcaattatgattttgactcattatcttatgataacgggatagtcgaggcagtgtatgtaacactaagggaagcagagatgcgtagcacttctcctataccaacatgggaaatacccatttggaaggacatttccccacggcagaagaaggtcaacgaagctctcaagttgataaatagtactctcgatgaactaattgccatctgcaagagacttgtagagcaagaagatcttcagtttcatgaggaatacatgaacgagcaagacccaagtattcttcacttccttttggcatctggagatgatgtctccagcaagcaactccgtgatgatttgatgaccatgctcattgctggtcatgagacttcagcagctgtcttgacatggacattttatcttctatctaagtatccaaaggtaatggccaagctccaagatgaggctgatagtgttctaggtgatggtttgccaacaattgaggatgtgaagaaactaaagtacacgactcgggttattaatgaatcattgagactatatccacagccgccggttttaattcgtaggtcacttgaggacgatatcctgggagggtacccaattggccgaggagaagatatttttatttctgtctggaatcttcaccactgcccaaagcactgggatgatgcagaagttttcaatccagaaagatggcctttggatggaccaaatccaaacgagataaaccaaaatttcagttacttaccatttggtggcggaccaaggaaatgtgtgggtgacatgtttgctacttttgagactgtggtggcaacagcaatgcttgtcaagcgatttgactttcagatggctccaggagcacctccggttgacatgacaactggagcaacgattcacacgactgagggattaaaaatgactgttactcgaagaacaaggccaccagtaattccaaacctggagatgaaaattattaccgattcacaagaatccacactttctgccccatcgatggttgttagtgctgcttctgttgcttcaggagaagaccaagggggcatctcctgatttaagcagtttcaacatagagaacgagcatatccatttatattgctctggaagtatttggctagtttacagcatttgattacgcaagcagtacaaaacagagatagtctcctggcgtgctacaacgaaaaactccaaacccttccgcagacttgttaccgatggatggcacagcagactcctataggttacagggggtgtgtttgtttactttctagattatatatgttggattatggtggaagggtaatagggtaaaaatcactttaggactgcaaataagctaaaataatctaacattgggtagtttatttcagcttatttgtgatcttaaagttgtattttaccctattactctttcaccataatccaacttatataatctagaatggaaacaaatagggcctaggtctccttgctgatactcaaaagcatcaaaagcaccatggacatatctacatatttacaagaagtttctgacttccatgcatggatttgtgcgctcctaaatcttcagcatgccttccaacacacgaagaacatcagcacgggcaattatacctgttgatagtgtttagaaccccattaggcttgcaacatactctgtgttgtcaatgttaattaaggataatacaaatgaagtatgtacatgcagtttttttatctctagtttgtcagcattctgatactcacatattacttgttcatcctgattctcagctggtaatctcacttattactaatctgtggatctccatcttgagcatccgaaccacagcatctatagacactaaacgt

SEQ ID NO: 219941 - DNA, 1515 bp, Zea Mays
gttgcattcttgctgagttgctatcagggaagcctatcatgccaggacgaactgaggtggaacagttgcacaaaatttttaagctctgcggttcaccatcagaggagttttgggctaatttgaagttatcccgagctaccatattcaagcctcagcatccgtaccgccgatgtgtgaatgatgtatataaggactttcctactactgctttaacacttttggaccatctacttgccgtagaacctgggaataggggtaccgctgcatctgcccttgacagtgaattttttacaacaaagccatatgcctgcgatccatcaagtctacccaagtatcccccaagcaaggaatatgatgctaagcttcgagatgaagaagctaggaggcaaagagcagctgctaaaggacaggaagctgaagctggacggaggaagcaacctcctgcacctgatggtaatagtggattgcagcaccgccgagttcagatgaatcctaaaagcagcagttacaagttcactccaaaggaggatgctgtttctggatttccaattgatccgccagcaagagctgctgcagacaatggttaccctcagcgcgttcctctgatgcaagctggccgttcttcctccactctgggtagatcaagtgggatggatccaaaggcccaaagattccacacctcccaaattgtcactactgagatgtccggccaatctactgcatctgggcagcgaggcaatgctcctaagatgtctaacctcggggaaagtgccaggagacaatatcttcgagagcatcggtccagttcaagatacagtcaactcactgctgcggacccttctgacaggcctgaatggaaccatcaattccaagagcggccatcgtcttcccatcggaaggatgatgctgtggcaaacaaggagcatacggtggtgaacgggacaaagaagaacagaatccactattcggggccattgatgcctcctggagtgaacatggatgagattcttagagagcacgagcgacagatccaacaagcagtgcgaagagcgcgccttgacaagggaaagggaaagcacagcggtgagagagaccagtcggagtcactgctgtgtaccaccgggaatctcagggctgatcgctaagttcagtttgagcagtcatcagaagcaaagaaaacagcatcgaatcccttatattttttcggttcccccgccccaccccaaccgccaagcggagaggtttttgttctgccagaaactcaaactcctgatgcggtttggtacccaggaggtgggcagctgccaaaagaaaacctgttcctgtagagatttaccgccccagagtctagcatatgcggtctgaaatattttttccctgaagatttgttggttatccatagtcctcaattgtatatctcaaaagtactcacccccaaaaatgaaaaattgatccatacactcgtttttgcatacgacgtgacactccaaaatgaaaattccataaagattctcg

SEQ ID NO: 219942 - DNA, 1370 bp, Zea Mays
attcaagcctcagcatccgtaccgccgatgtgtgaatgatgtatataaggactttcctactactgctttaacacttttggaccatctacttgccgtagaacctgggaataggggtaccgctgcatctgcccttgacagtgaattttttacaacaaagccatatgcctgcgatccatcaagtctacccaagtatcccccaagcaaggaatatgatgctaagcttcgagatgaagaagctaggaggcaaagagcagctgctaaaggacaggaagctgaagctggacggaggaagcaacctcctgcacctgatggtaatagtggattgcagcaccgccgagttcagatgaatcctaaaagcagcagttacaagttcactccaaaggaggatgctgtttctggatttccaattgatccgccagcaagagctgctgcagacaatggttaccctcagcgcgttcctctgatgcaagctggccgttcttcctccactctgggtagatcaagtgggatggatccaaaggcccaaagattccacacctcccaaattgtcactactgagatgtccggccaatctactgcatctgggcagcgaggcaatgctcctaagatgtctaacctcggggaaagtgccaggagacaatatcttcgagagcatcggtccagttcaagatacagtcaactcactgctgcggacccttctgacaggcctgaatggaaccatcaattccaagagcggccatcgtcttcccatcggaaggatgatgctgtggcaaacaaggagcatacggtgaacgggacaaagaagaacagaatccactattcggggccattgatgcctcctggagtgaacatggatgagattcttagagagcacgagcgacagatccaacaagcagtgcgaagagcgcgccttgacaagggaaagggaaagcacagcggtgagagagaccagtcggagtcactgctgtgtaccaccgggaatctcagggctgatcgctaagttcagtttgagcagtcatcagaagcaaagaaaacagcatcgaatcccttatattttttcggttcccccgccccaccccaaccgccaagcggagaggtttttgttctgccagaaactcaaactcctgatgcggtttggtacccaggaggtgggcagctgccaaaagaaaacctgttcctgtagagatttaccgccccagagtctagcatatgcggtctgaaatattttttccctgaagatttgttggttatccatagtcctcaattgtatatctcaaaagtactcacccccaaaaatgaaaaattgatccatacactcgtttttgcatacgacgtgacactccaaaatgaaaattccataaagattctcg

SEQ ID NO: 219943 - DNA, 1354 bp, Zea Mays
tcaagcctcagcatccgtaccgccgatgtgtgaatgatgtatataaggactttcctactactgctttaacacttttggaccatctacttgccgtagaacctgggaataggggtaccgctgcatctgcccttgacagtgaattttttacaacaaagccatatgcctgcgatccatcaagtctacccaagtatcccccaagcaaggaatatgatgctaagcttcgagatgaagaagctaggaggcaaagagcagctgctaaaggacaggaagctgaagctggacggaggaagcaacctcctgcacctgatgcaccgccgagttcagatgaatcctaaaagcagcagttacaagttcactccaaaggaggatgctgtttctggatttccaattgatccgccagcaagagctgctgcagacaatggttaccctcagcgcgttcctctgatgcaagctggccgttcttcctccactctgggtagatcaagtgggatggatccaaaggcccaaagattccacacctcccaaattgtcactactgagatgtccggccaatctactgcatctgggcagcgaggcaatgctcctaagatgtctaacctcggggaaagtgccaggagacaatatcttcgagagcatcggtccagttcaagatacagtcaactcactgctgcggacccttctgacaggcctgaatggaaccatcaattccaagagcggccatcgtcttcccatcggaaggatgatgctgtggcaaacaaggagcatacggtggtgaacgggacaaagaagaacagaatccactattcggggccattgatgcctcctggagtgaacatggatgagattcttagagagcacgagcgacagatccaacaagcagtgcgaagagcgcgccttgacaagggaaagggaaagcacagcggtgagagagaccagtcggagtcactgctgtgtaccaccgggaatctcagggctgatcgctaagttcagtttgagcagtcatcagaagcaaagaaaacagcatcgaatcccttatattttttcggttcccccgccccaccccaaccgccaagcggagaggtttttgttctgccagaaactcaaactcctgatgcggtttggtacccaggaggtgggcagctgccaaaagaaaacctgttcctgtagagatttaccgccccagagtctagcatatgcggtctgaaatattttttccctgaagatttgttggttatccatagtcctcaattgtatatctcaaaagtactcacccccaaaaatgaaaaattgatccatacactcgtttttgcatacgacgtgacactccaaaatgaaaattccataaagattctcg

SEQ ID NO: 219944 - DNA, 1907 bp, Zea Mays
acaccttgtgtcgtaccctccggatcgaaggctggacgacgcgaccgcgcggcggcggctcgacgcgaccggtggctttgacgcgaccggcacggcggcgacgcacagcccgacgacgaccctccccgctgccttctccccgggcatttgctggagctggaaggcggaagcgttcccgttggattacttcttgggctggaaagagtgaaagacccggatgcactaaatcctgtcttggaacagttacggccctggaattgatcccatgctgccgaacgggccctaagttggaacctgttcaggcggggggtcagctcgcagctgactggggatccggcaccgcatcgccagacgccaggaggggactatcagccatggcagcgaggcagccgccgccttcgtccgcgtccgcgcccgcgcccgcggcgggtctctccatgaaggactacctcaagaggtacgtgtcgggcccagggaccgacggcgaccagaagagggcgaagaagaagacgaagaagaagcccaagcccgccggcggggtgctcatcgtcgacgaggacccagtgtggcagaagcccgtgcaggtggacgaggagcccgcgtcgtcaggtgacgacaagcctctggtcgacgaggacatcgaggtcaagcggatgcgtcgcctggaggcaatacgcgccgcaaggccgtacaatgctatcgccgaggatggcagcgggtgggttaccgtggccgccccagaggagcagggcggtgggtccacccaccagcgcaggaacgacacgccgttgccagagcggggacgtgctcctacgagggaggacctttctcctgtgcggcggaggcagcggcgcgacacgccctcacctgtgcatggcgatgctgctgcaaaggatttttcaccacctaggcggccctcacctgtgcatggtgatgctgctgcaaaggatttttcaccacctaggcggaggcagcggcgcaacacgccctcacctgtgcatggcgatgctgctgcaaaggatttttcaccacctaggcggaggcagcggcgcgacacgccctcacctgtgccggacggtgctgctgcaaaggatttttcaccacctaggcggaggcagaggcgtcaggacacgccatcaccaaaggacagtggtgcagcggaccaggacgatatgtcaccaccgcggaagtctaggcagagagaggacctttcgccgccaaggaagggtgctcgtcatatcactgaggagccccgggatatctcgccacgaaagaagagagacatttctccctcaaggaagagtacaaaggaaggagcctcaaaacaggtgaagaaatctggactgatgacagcagaagaagttaaagaggacataagaaagattaaggaggctgagatgattaagtttgcatcacaggatccttctctggttgggaaaggggcaaaggcagtattcagagataaggaaggaagacgaataagtgaagaagaaatgtgcaaggcaaaggaacctgagaagccaaaggaaatacatatagaatggggtaaagggttggttcagaaacgagaagctgagtctaggttgaaagagattgaagctgagaagagtaaaccttttgctcgaacaagggatgatcctgagcttgataatatgctaaaagaaagaatccgatggggtgatcctatggctcatctggtcaagcggaaagatccagaatttattttggaagacttgggagatgatgaaaagatgaaagaatctggcttcatagtaccccaaagtatacctactcacagctggctgaaacgtggagtggatgctcctccaaaccgctatggcataaaacccggtcgtcattgggatggcgtggatcgcagtaatggcatagattgcagtagtctaggg

SEQ ID NO: 219945 - DNA, 1570 bp, Zea Mays
cacgaggctccaagaaccaagagaaattctgcaccaatcggcgggcccccacctctggctcggcttccaaatccaaacggccgtgggctcgcctcaggccacttcggtccctcctcgagctccatccgatcctccctccccgtcgtgccggcatcgcgcgcagggaggaccggccggacggccggcccgcccgcccgccgccatgccgggatcgcccaaggtcttcttcgcctcctccgcctcgcgccgctccgggtcgctgcgccggctgctctcgacgccggtcttctccgcggcctgcctcctcttcggcctcgccggcttcgtcgccgccgcgctcgccctctcgcgctccccgtccgtcactcacagccgctgccccgattcctcgcgcccgctctccgtctcagtcgcgtgggaccgcagcccaggggatggctccgcagggggctccgcggagctcccggcctcgctcgccactggatcgcgcggccgccacaaggtcatggccttcgtcgggatcttcaccgggttcggctccatcggccgccgccgcgcgctgcgccggacatggctacccgcggatcgccagggtctacttcggttggaggaagctactggtctggcattccggttcgtgattggaaaaagcaattcaaagaacaagatggccgctcttaatagagaagttgaagaatatgatgattttgtgcttttagatctcgaagaggagtatagcaggctcccgtacaaaacctttctttaaggctgcctatgcattgtttgattctgatttctatgttaaagcggatgatgacatttacttgcgaccagatagactttccttgcttctggctaaagagcggtcacatccacaaacatacattggatgcatgaagaaggggcctgtttttactgatcctaagttgaaatggtatgagccccaatccttcttactcggatcagaatactttcttcatgcatatgggccaatttatgctttatcagctgacgtggtggctagcttggttgctttgaggaacaacagtttccgtatgtttagcaacgaggacgttacaattggatcgtggatgcttgctatgaacgtcaaccatgagaacacacatgcgctctgtgaacctgactgcacggagtcttcagttgctgtttgggacattccaaaatgctcagggctatgccacccagaggtaaaaatgctagagcttcatcaaagaaaagaatgcacaggtggtccaaccgttgcagccgaggtgtccgagtccgaggactgatgatttctcggttggaacacaaactaacggatccgatagttgacctccgccctcactcagtagatgcgtttggagtattcgtttgattcattcatttatcagtggagccgcgatcgacgtttggaacgttcatcctgtaccgtagcaaaaaaggaattttgttgtatagaaactagaaggaatggatgcatcggcgattgatagacaatgcatacacctagctgtgatcggctggaattagggatattccctgaggttctcttttttggagtaaaatc

SEQ ID NO: 219946 - DNA, 2159 bp, Zea Mays
cacgaggctccaagaaccaagagaaattctgcaccaatcggcgggcccccacctctggctcggcttccaaatccaaacggccgtgggctcgcctcaggccacttcggtccctcctcgagctccatccgatcctccctccccgtcgtgccggcatcgcgcgcagggaggaccggccggacggccggcccgcccgcccgccgccatgccgggatcgcccaaggtcttcttcgcctcctccgcctcgcgccgctccgggtcgctgcgccggctgctctcgacgccggtcttctccgcggcctgcctcctcttcggcctcgccggcttcgtcgccgccgcgctcgccctctcgcgctccccgtccgtcactcacagccgctgccccgattcctcgcgcccgctctccgtctcagtcgcgtgggaccgcagcccaggggatggctccgcagggggctccgcggagctcccggcctcgctcgccactggatcgcgcggccgccacaaggtcatggccttcgtcgggatcttcaccgggttcggctccatcggccgccgccgcgcgctgcgccggacatggctacccgcggatcgccagggtctacttcggttggaggaagctactggtctggcattccggttcgtgattggaaaaagcaattcaaagaacaagatggccgctcttaatagagaagttgaagaatatgatgattttgtgcttttagatctcgaagaggagtatagcaggctcccgtacaaaacgttagctttctttaaggctgcctatgcattgtttgattctgatttctatgttaaagcggatgatgacatttacttgcgaccagatagactttccttgcttctggctaaagagcggtcacatccacaaacatacattggatgcatgaagaaggggcctgtttttactgatcctaagttgaaatggtatgagccccaatccttcttactcggatcagaatactttcttcatgcatatgggccaatttatgctttatcagctgacgtggtggctagcttggttgctttgaggaacaacagtttccgtatgtttagcaacgaggacgttacaattggatcgtggatgcttgctatgaacgtcaaccatgagaacacacatgcgctctgtgaacctgactgcacggagtcttcagttgctgtttgggacattccaaaatgctcagggctatgccacccagaggtaaaaatgctagagcttcatcaaagaaaagaatgcacaggtggtccaaccgttgcagccgaggtgtccgagtccgaggactgatgatttctcggttggaacacaaactaacggatccgatagttgacctccgccctcactcagtagatgcgtttggagtattcgtttgattcattcatttatcagtggagccgcgatcgacgtttggaacgttcatcctgtaccgtagcaaaaaaggaattttgttgtatagaaactagaaggaatggatgcatcggcgattgatagacaatgcatacacctagctgtgatcggctggaattagggatattccctgaggttctcttttttggagtaaaatctgagccgtctgcttcgcctgatccatccatagctaagtgagcaaagctgagccttgaggtgctcatgttcaccggtcaaccagccttcgctgtccggacaccgaaaggacttggtgatggtgcgttggaggcttggagccaagcgcaaagaccctatcacgggccctcctgacgggcgatacggatagcgctttgttcagatatttggactagcgctcagttgcagttgcaatttaattgcaatttataaagacagaatacggtagaaaaagtagaagccgtttccgaataagtcgcagcagacaggctaccttggagagtgattgctgcaaaagttctctataaagccccgaccacatgccttggttccatgaaaaatctataccatttgatttgtaaatgaagaccaccagtataacaagttacaagaggcaacacatgcatgcagctgccgggacacttttttcccggcaacgtaaacacaggtataaataacatggcaacaataaaaaattaatcgccctcccctcgcttagcttagctgtggaggatggcggggcggcagtagggcccgttgagccagc

SEQ ID NO: 219947 - DNA, 1607 bp, Zea Mays
acctctggctcggcttccaaatccaaacggccgtgggctcgcctcaggccacttcggtccctcctcgagctccatccgatcctccctccccgtcgtgccggcatcgcgcgcagggaggaccggccggacggccggcccgcccgcccgccgccatgccgggatcgcccaaggtcttcttcgcctcctccgcctcgcgccgctccgggtcgctgcgccggctgctctcgacgccggtcttctccgcggcctgcctcctcttcggcctcgccggcttcgtcgccgccgcgctcgccctctcgcgctccccgtccgtcactcacagccgctgccccgattcctcgcgcccgctctccgtctcagtcgcgtgggaccgcagcccaggggatggctccgcagggggctccgcggagctcccggcctcgctcgccactggatcgcgcggccgccacaaggtcatggccttcgtcgggatcttcaccgggttcggctccatcggccgccgccgcgcgctgcgccggacatggctacccgcggatcgccagggtctacttcggtcagtcgctggttggaggaagctactggtctggcattccggttcgtgattggaaaaagcaattcaaagaacaagatggccgctcttaatagagaagttgaagaatatgatgattttgtgcttttagatctcgaagaggagtatagcaggctcccgtacaaaacgttagctttctttaaggctgcctatgcattgtttgattctgatttctatgttaaagcggatgatgacatttacttgcgaccagatagactttccttgcttctggctaaagagcggtcacatccacaaacatacattggatgcatgaagaaggggcctgtttttactgatcctaagttgaaatggtatgagccccaatccttcttactcggatcagaatactttcttcatgcatatgggccaatttatgctttatcagctgacgtggtggctagcttggttgctttgaggaacaacagtttccgtatgtttagcaacgaggacgttacaattggatcgtggatgcttgctatgaacgtcaaccatgagaacacacatgcgctctgtgaacctgactgcacggagtcttcagttgctgtttgggacattccaaaatgctcagggctatgccacccagaggtaaaaatgctagagcttcatcaaagaaaagaatgcacaggtggtccaaccgttgcagccgaggtgtccgagtccgaggactgatgatttctcggttggaacacaaactaacggatccgatagttgacctccgccctcactcagtagatgcgtttggagtattcgtttgattcattcatttatcaggtgcaatcaatgtggcagcgctgctcaaggcagcactgtagcaaagccactcattgcatttttttttgcagtggagccgcgatcgacgtttggaacgttcatcctgtaccgtagcaaaaaaggaattttgttgtatagaaactagaaggaatggatgcatcggcgattgatagacaatgcatacacctagctgtgatcggctggaattagggatattccctgaggttctcttttttggagtaaaatc

SEQ ID NO: 219948 - DNA, 1255 bp, Zea Mays
cctcactctgtgcaaaattttccacccatggcgcccgccgcgaactgcagcgtcatcgtcctcgctaaactgatattccgcgcgtgtgtgcttgcaggcactggcagccaggaggtatcggcgacgagatactgcagcgcgcgtccatcgcctcgtcccctccacgctccgatcccttcgcctcctccgcgcctccctccccgtccccctccttacccccaaaccctcggcgcaagtctcgcttccgcgacgcccctacccccgattctccactcggtcgcgccacatacacctccacctcgcccatctccgccacgcattctcgccaccgccgccacgcctccgcttcctccgcccccgctttcgcggccgatggatccggtgacggtgtcgcccgcctcaactccttcctccgtcgacagcgtgccatggtcgctgacctagcggcaggggaccgccctgcgtcgaggtccaccaagctcgtgctctccgacccctccaaaagtctgagctcgattgtggcggcaatatgctacgcgtggatgcttcccagcaagggtgatggccaggcaacggtgccggtggtgaacatgagccggagcaggatggctaggtgcaggcaggcggcttggctcctgtatcacgtcggggtcgacgcctcagcgctgctcttcgccgacgaggttgacacggatgggctaataatggaccagcgagttaacttgcttgtggtggggcaagatattttgaaatcaaaagctgaggttggctcagtttgcacaaccctgacccatacctattgtgaggatgcttatagcctgcttcaaaacttggacataaagaaacttctggtatcctgttagatacgaacaacctttccaagaagtgctcaaatagagattcagatgcagtgcagttgcttttgtttggaacctctgagcatatgaggcatgaattgtttcagcaattgatgcttgatcacaatgatcactcctttgttgagtatctgaagaacacctacagatattcaaccataaatggtaatgaggacagtcctccagagcaaaaacattcaacctcagcatcagggtcatcccaagatgttaaaaaatctaattcaactaaccaaaggacatcacgtggaagtggtggaaaggcctcagatgaagcctctcgggggaagaataagttcttcttggcgaatggtttggttttggttcaaataatccttttatcatttgtattagtttggtaa

SEQ ID NO: 219949 - DNA, 3756 bp, Zea Mays
aaacacaagacactgacaagtgggcccattactaaccctattaggccagaccagagctgaagcagagcggagaggtctgctcgccggccatcgaatccaggctcctccaaggtgatctctctcgatcgcttccggcctcaccgtagcccgatccacgcaggctcggccacgacccgcggcctccgcacgacctggatctgacgcgcctccccctgcccccgccctccgcctcgtacttcctcgctgcggccgccgtgctcgcgctactcggcggactcctactctatatgcttccccggaagcggggggtcgacgccggcgaggaccaggacttgcacaacaaggcccttcgcgccgccgcagttgctcaggacaaggagaaggtggttgcggagatgggcggcagggcgccagagatcgatgaggacctccacagccgccagctcgccgtctacgggcgcgagaccatgaagcgcctcttcggctccaacgtcctcatctccggactgcagggactaggcgctgagatcgcaaaaaaccttgtccttgcgggtgtcaagtccgtaaccttgcatgatgatggcaaagttgagctatgggacttgtcaagcaactttttcctctcagagaaggatgttgggcaaaaccgtgctctagcttgcgttccaaagctacaagagcttaacaatgctgttatcatctctaccataactggtgatttgatcaaagagcagctttctaattttcaggccgtggtttttactgatatgagcatagaaaaggcagttgagtttgatgattactgccatagtcaccagccgccaattgctttcattaagtcggaagtttgtggcctttttggcagtgttttctgtgattttggtcctgagtttactgttttggatgtcgatggtgaggagccacatacaggaattgtggcatcaatcagcaatgacaacccagcacttgtttcttgtgtggatgatgagcgtctggagttccaggatggtgatctagttgttttctctgaagtgcatggaatgaccgaactcaatgatggaaaaccaagaaagattaagaatgcaaggccttattcttttactctagaagaagacaccacctcatatggcacttacattagaggcggtattgtcacacaggtgaagccaccaaaggttcttaatttcaaaaccttgaaggaggcaatcaaggagccaggagaatttctcatgagtgatttctccaagttcgaccgcccacctcttgtgcatttggccttccaagctttggacaagtttaggactgagttgacacgattccctattgctgggtcagctgatgatgtacagaagctgatagaccttgctattagtattaatgaaactcttggtgatagtaagcttgaagaaattgacaagaaagtcttgcagcattttgcaagtggttcgagggctgttttgaatcctatggctgcaatgtttggtggtattgtaggtcaggaggttgttaaagcatgttcagggaaattccatccactgtaccagttcttctactttgattctgtcgaatctctgccagttgaaccgttggagcctagtgatttgaagccagagaacagtagatatgatgcgcaaattagtgtctttggggctaagcttcaaaagaaactggagcagtcaaaaatcttcatggttggttctggggctcttggatgtgaattcttgaagaaccttgcgttaatgggtatttcttgcagtcaaaatgggaagctgactgtgacagatgatgatgttatagagaaaagcaatctcagtcgccagtttctcttccgtgactggaacatcggacagcccaagtccacagttgctgcaaccgctgctatggcaattaatcctaagcttcatgtggaggcccttcagaatagagcaagtcctgagactgaaaatgtgtttaatgatgccttttgggagagtttggatgctgttgttaatgcattggacaatgtcactgcaagaatgtacattgattccagatgtgtatattttcagaaaccacttcttgaatcgggtactctgggtgccaagtgcaacacacagatggtcattcctcacctaacagaaaactatggggcatccagggatccaccagaaaagcaggcacctatgtgcactgtacattcatttcctcacaatattgatcactgccttacgtgggccaggtctgagtttgagggtctacttgagaagactcccactgaagtaaatgctttcctgtcgaaccctggtggatatgcaaccgcagcaagaactgctggtgatgcacaggctagggatcaacttgagcgagttattgaatgccttgagacagacaagtgtgagacattccaagattgtattacctgggcccggcttaagtttgaggattatttctccaaccgtgtaaagcagctgacattcactttccccgaagatgcaatgactagctcgggtgctcctttctggtctgctcctaagcggttcccgcgacctctggagttctcgtcttccgactcaagtcaccttaacttcttgttggctgcatctgtattaagggcagagacatttggaatacacatacctgattgggctaagaacccaaagaaactggctgaagctgtggacaaggtcattgttccggatttccaaccaaaacagggtgttaagatagagacagacgagaaggctactagcctatcctctgcgtctgttgatgatgctgctgtcattgaagagcttattgcaaagctggaagaaatttttaaaacattgccaccaagattccatatgaaccctatacagtttgagaaggatgatgataccaatttccatatggacttgatcgctggttttgccaacatgcgggctaggaactacagcatccctgaagttgacaagttgaaggcgaagttcatagcgggaagaatcatcccagccatcgccacctcaactgcaatggccactggccttgtctgcctggagctttacaaagtcctcgctggtgggcacaaggtcgaagactaccggaacacatttgcaaacctggcaatccccctcttctccatggcggaacctgtgccacccaagaccattaagcaccaagacatgtcgtggactgtctgggaccgctggaccataaccggcaacatcacgctgagggggctcctggggtggctcaaggagaagggcttgaacgcctacagcatatcctgtgggacctcgctgctgtacaactccatgttccccaggcacaaggaccggctggacaagaaggtggtggatgtggccagggaggtggccaaggtggaggtgccatcataccgccgccatctggacgttgtggtggcctgtgaggatgacgacgacaatgatgtcgacgtcccacttgtgtccatttactttcggtaaagaggggctcaccgcccgtttacatgttgatcctgtgcgatatttgtcaatgtttgtctcagaaggatcaagtgtataatttgcgatagcaaccgtgaactagattgtgtttaagcacatactgatgatttcctgtgctgccatctggttagacttggctgggaattgtcgctgagatttggaccactgttatggaattcttaagcataacattatgatagctgttgcatgatactgtcgtcgctaaatgttgttatcttggtatttcaatgcatgtactgctgtgactcgtattctggttgcgatttcagag

SEQ ID NO: 219950 - DNA, 2614 bp, Zea Mays
ctgacaagtgggcccattactaaccctattaggccagaccagagctgaagcagagcggagaggtctgctcgccggccatcgaatccaggctcctccaaggtgatctctctcgatcgcttccggcctcaccgtagcccgatccacgcaggctcggccacgacccgcggcctccgcacgacctggatctgacgcgcctccccctgcccccgccctccgcctcgtacttcctcgctgcggccgccgtgctcgcgctactcggcggactcctactctatatgcttccccggaagcggggggtcgacgccggcgaggaccaggacttgcacaacaaggcccttcgcgccgccgcagttgctcaggacaaggagaaggtggttgcggagatgggcggcagggcgccagagatcgatgaggacctccacagccgccagctcgccgtctacgggcgcgagaccatgaagcgcctcttcggctccaacgtcctcatctccggactgcagggactaggcgctgagatcggccgtggtttttactgatatgagcatagaaaaggcagttgagtttgatgattactgccatagtcaccagccgccaattgctttcattaagtcggaagtttgtggcctttttggcagtgttttctgtgattttggtcctgagtttactgttttggatgtcgatggtgaggagccacatacaggaattgtggcatcaatcagcaatgacaacccagcacttgtttcttgtgtggatgatgagcgtctggagttccaggatggtgatctagttgttttctctgaagtgcatggaatgaccgaactcaatgatggaaaaccaagaaagattaagaatgcaaggccttattcttttactctagaagaagacaccacctcatatggcacttacattagaggcggtattgtcacacaggtgaagccaccaaaggttcttaatttcaaaaccttgaaggaggcaatcaaggagccaggagaatttctcatgagtgatttctccaagttcgaccgcccacctcttgtgcatttggccttccaagctttggacaagtttaggactgagttgacacgattccctattgctgggtcagctgatgatgtacagaagctgatagaccttgctattagtattaatgaaactcttggtgatagtaagcttgaagaaattgacaagaaagtcttgcagcattttgcaagtggttcgagggctgttttgaatcctatggctgcaatgtttggtggtattgtaggtcaggaggttgttaaagcatgttcagggaaattccatccactgtaccagttcttctactttgattctgtcgaatctctgccagttgaaccgttggagcctagtgatttgaagccagagaacagtagatatgatgcgcaaattagtgtctttggggctaagcttcaaaagaaactggagcagtcaaaaatcttcatggttggttctggggctcttggatgtgaattcttgaagaaccttgcgttaatgggtatttcttgcagtcaaaatgggaagctgactgtgacagatgatgatgttatagagaaaagcaatctcagtcgccagtttctcttccgtgactggaacatcggacagcccaagtccacagttgctgcaaccgctgctatggcaattaatcctaagcttcatgtggaggcccttcagaatagagcaagtcctgagactgaaaatgtgtttaatgatgccttttgggagagtttggatgctgttgttaatgcattggacaatgtcactgcaagaatgtacattgattccagatgtgtatattttcagaaaccacttcttgaatcgggtactctgggtgccaagtgcaacacacagatggtcattcctcacctaacagaaaactatggggcatccagggatccaccagaaaagcaggcacctatgtgcactgtacattcatttcctcacaatattgatcactgccttacgtgggccaggtctgagtttgagggtctacttgagaagactcccactgaagtaaatgctttcctgtcgaaccctggtggatatgcaaccgcagcaagaactgctggtgatgcacaggctagggatcaacttgagcgagttattgaatgccttgagacagacaagtgtgagacattccaagattgtattacctgggcccggcttaagtttgaggattatttctccaaccgtgtaaagcagctgacattcactttccccgaagatgcaatgactagctcgggtgctcctttctggtctgctcctaagcggttcccgcgacctctggagttctcgtcttccgactcaagtcaccttaacttcttgttggctgcatctgtattaagggcagagacatttggaatacacatacctgattgggctaagaacccaaagaaactggctgaagctgtggacaaggtcattgttccggatttccaaccaaaacagggtgttaagatagagacagacgagaaggctactagcctatcctctgcgtctgttgatgatgctgctgtcattgaagagcttattgcaaagctggaagaaatttttaaaacattgccaccaagattccatatgaaccctatacagtttgaga

SEQ ID NO: 219951 - DNA, 2267 bp, Zea Mays
tccttgcgggtgtcaagtccgtaaccttgcatgatgatggcaaagttgagctatgggacttgtcaagcaactttttcctctcagagaaggatgttgggcaaaaccgtgctctagcttgcgttccaaagctacaagagcttaacaatgctgttatcatctctaccataactggtgatttgatcaaagagcagctttctaattttcaggccgtggtttttactgatatgagcatagaaaaggcagttgagtttgatgattactgccatagtcaccagccgccaattgctttcattaagtcggaagtttgtggcctttttggcagtgttttctgtgattttggtcctgagtttactgttttggatgtcgatggtgaggagccacatacaggaattgtggcatcaatcagcaatgacaacccagcacttgtttcttgtgtggatgatgagcgtctggagttccaggatggtgatctagttgttttctctgaagtgcatggaatgaccgaactcaatgatggaaaaccaagaaagattaagaatgcaaggccttattcttttactctagaagaagacaccacctcatatggcacttacattagaggcggtattgtcacacaggtgaagccaccaaaggttcttaatttcaaaaccttgaaggaggcaatcaaggagccaggagaatttctcatgagtgatttctccaagttcgaccgcccacctcttgtgcatttggccttccaagctttggacaagtttaggactgagttgacacgattccctattgctgggtcagctgatgatgtacagaagctgatagaccttgctattagtattaatgaaactcttggtgatagtaagcttgaagaaattgacaagaaagtcttgcagcattttgcaagtggttcgagggctgttttgaatcctatggctgcaatgtttggtggtattgtaggtcaggaggttgttaaagcatgttcagggaaattccatccactgtaccagttgaaccgttggagcctagtgatttgaagccagagaacagtagatatgatgcgcaaattagtgtctttggggctaagcttcaaaagaaactggagcagtcaaaaatcttcatggttggttctggggctcttggatgtgaattcttgaagaaccttgcgttaatgggtatttcttgcagtcaaaatgggaagctgactgtgacagatgatgatgttatagagaaaagcaatctcagtcgccagtttctcttccgtgactggaacatcggacagcccaagtccacagttgctgcaaccgctgctatggcaattaatcctaagcttcatgtggaggcccttcagaatagagcaagtcctgagactgaaaatgtgtttaatgatgccttttgggagagtttggatgctgttgttaatgcattggacaatgtcactgcaagaatgtacattgattccagatgtgtatattttcagaaaccacttcttgaatcgggtactctgggtgccaagtgcaacacacagatggtcattcctcacctaacagaaaactatggggcatccagggatccaccagaaaagcaggcacctatgtgcactgtacattcatttcctcacaatattgatcactgccttacgtgggccaggtctgagtttgagggtctacttgagaagactcccactgaagtaaatgctttcctgtcgaaccctggtggatatgcaaccgcagcaagaactgctggtgatgcacaggctagggatcaacttgagcgagttattgaatgccttgagacagacaagtgtgagacattccaagattgtattacctgggcccggcttaagtttgaggattatttctccaaccgtgtaaagcagctgacattcactttccccgaagatgcaatgactagctcgggtgctcctttctggtctgctcctaagcggttcccgcgacctctggagttctcgtcttccgactcaagtcaccttaacttcttgttggctgcatctgtattaagggcagagacatttggaatacacatacctgattgggctaagaacccaaagaaactggctgaagctgtggacaaggtcattgttccggatttccaaccaaaacagggtgttaagatagagacagacgagaaggctactagcctatcctctgcgtctgttgatgatgctgctgtcattgaagagcttattgcaaagctggaagaaatttttaaaacattgccaccaagattccatatgaaccctatacagtttgaga

SEQ ID NO: 219952 - DNA, 1947 bp, Zea Mays
ccagcagcgaagatggcacgctcttcctccgccacaggctcgtgggcgcgacgcttcccgtgctgctgcgacggtgaccgtaggaacaggttcggcggccgcagcctctccggcgatctcctgccgccgccgtcggttggcgcaatggcacagcagcctcccaggctcaggaagaaaaacctcgtgtcgccctacgatccgcgttacaacccacgcagggtctgggagacgtttctgatcctcctggtggtgtactcggcgtggatatgcccgctggagttcgcgttcctgaggtacctgccccgggcccctttcgtcgtggacgacgtcgtcaacggcttcttcgccgtcgacatcgtgctcactttcttcgtcccgtacgtcgacagcaagtcctgcctcgtcgtcgacgatcacaggaaaatagcagccaggtacctgtcgacttggtttgccttcgatgtctgctcgacgttcccgttccagtccatcagcctgctgttcgacgagcacgagcacagcctgggcctcaagttcctcaacgttctcaggctttggcggctgcgcagggtcagctccttgtttgcaaggctcgagaaggacatccggttcaactacgcagtgatccgctgcacgaagctcatctccgtgaccctgttcgccatccactgcgccgggtgcatcaactacctgatcgcggaccggtacccggacccgaggcggacgtggatcggcgccgccatgccggacttccgcgaggccggcctgtggatccgctacgtgacgtccatgtactggtccatcaccacgatgaccaccacggggtacggcgacctgcacgccgagaacagccgggagatgctgttcgggatcgccttcatgctcttcaacctctggctcaccgcctacctcatcggcaacatgacaaacctcgtcgtccacagcaccggccgcaccagggactttagggatatggtccaggtcgcctcggagttcgcggcgaggaaccaactgccgcagcagatcgaggagcagatgctgaaccacatatgcctgaggttcaggacggagggcctcaagcagcaggagacgctggatatgcttcccaaggcgatgcggtccagcatctccctctacctcttcttccccgtcgtgcagggctcctacctgttcaagggagtttcctcaggcttcatccagcagctggcgacggagatgcagcccgagtacttcgccccgaaggaggatatcatgctgcagaatgacaagccgtcagacatgtaccttctcgtatcaggagccgtggacattctgacgttcctagatggaacagagcaggtctacggaaaagcggcagagggagagctgttgggagaggttggggtcatgtccaacaagccacagccattcaccttccggaccacaagactgtctcagattctgaggattgccaggtccaagctgatggacatcatgcgagagaacggagaggacggccagatcatcagaagcaactttcagcagagactccgcgtggagcaaagactgtacatcgcaatgcatcaagacggtccggtccctgcatttgagcggaggatggatccctgagacccctcggctgtcaaagcacgcacgcagcgtggtgaattatttgctcggctatactgacaatatgtattgggtgaaatcgacaaataagtttaagtaggggagaagaaggattttgctgtatcctttttggcgcacaatctgaagagtgaagtagccttcggtagcagtgtagcaggagaacatggaaggaagggccgaaattattgtcagctccggcttctcagccctggaatatcgaacgggctcgatttgtcagatattgggcctctcgcagtttgttttcgtaaagcaggctcgttgcccttctgtcctggctgcttctggccttggcccatg

SEQ ID NO: 219953 - DNA, 415 bp, Zea Mays
gaaagataaaccaattcgatgggttgatcctactggtaaaggtctacaatttgacatattatcatggtggaaggccaaccaagttacatatcctgttctctcgcgtcttgctcgtgatgtattggctgttcaagtctctactgtggcctcagaatgtgctttcagttcgagtgggcgtgttgtgagtaaatatcacagccgtttagagcctgagactgtggaggcattagtttgtaccaaagactggaatcttgcatctaacaaagatcgcaatgacaaggtaccgtcaattgttgaggagttcatggcagatgaaaatgaatatagctcgacaattgaagagggacagaaccaagctgacaatgaaggaaatggtgaggatagtgaggatgagggcagcgatatggagttatga

SEQ ID NO: 219954 - DNA, 1603 bp, Zea Mays
agctaagcaagcagccaagcactcatcacactctctctacttgctagctagccgcccttagcttcgcacgcgacatctatcatcggccaagaaacggagcagatcggtcggccgccgacatgggggatcacgctgagatgctgcatgccactccggccatgtacaacggcgccggcgctgcccctcgtggtggctggtggagtacggcggtgcccgcgaccacgtgctcgacggagctggccggcggcttcaccacgtggtcgtccgccctggctgctagctacgacctggcggcggagggggcaaaggccaacaagagcgccaccaccgcctcgtcggagtcgcccgggaacaacagctccgtgaccttccaagaaccggccggcggcgtcggaaccgccgtggtgcagcagcctcttgctggctgcgctgactggaggcatccctatttgagcagcggcgctgctactttgcatgggtttctgcaagatggtcaccagcaggacatgagctcatcgacaactgagcagagccccatggccgcatcaagcctcatgaacccttcatccaataacctagccctggccctgcaacaaggtcaccatcaccaagagccggaccaccagcagatgctgtccaacttcggcggctccgaggccgagctgctcctgtcgccgacgacctcaccctacgggttccagtcgtctctgctgagaagcctcatggagccgacagcggacgcggcgaagccggctttgccggggtaccagcagcagtatgaccagtaccagcagatgggcatgggccaggcgaggtcgtttgcaccggccggcggagctgccagcagggaggcactccagttcaccaacgacgcgccgtcctggaacccttccgctgcggctgggttcggcgtgccgccggcgccggcgccggcgccggcgccggctgaccaagctagcagcagcgtacgttctgtgaaaccatcgccggcggcgcgtgctactgcaacccttgcattaaagactgcgttggaaggagtaggagagtctgctagctccatcatcaccaagaagaaggcaaacggagagctggtgccggccttcaagaaatcgaggctccagacgccgtcgccgttgccaacgttcaaggttaggaaggagaagctaggggacagggtcactgcactccaacaactcgtcgccccttttggaaagacggatacagcatcggtgctccatgagaccgtcgagtacatcaagttcctccacgaccaggtcggggtccttagtgctccatacttgaagaacaacggccatcaagtgccctacctgaagagatcaagtcctgacaggtccgaggacgacaacagccatgccggcgagagatcactcaagggccgggggctgtgcctggtcccgatatcgagcacgttcgcggtagccagcgaggtgcccgtcgatttcgggtggagtactgcatttgctgccagctttaggtagaagagaaggctgggaacgaagagcgcgccaaagctctgatcagaggcgtcgaacgagtatataactagctagctagccagctaccacagatcgatcgacctgcc

SEQ ID NO: 219955 - DNA, 5028 bp, Zea Mays
ctcgttcgttagcttgtcatatcgcgtctgcgacgactgacgaagccatggattcgcgctgtggattcatgccatcgaataacggttcaccctgtaaaagggttcacccgagaatgtgatgttatctgaatgactggatccggcggacacctctttcggcgatccgtggcttcccttgcgccccatgttttctcaagatttgcgttagttgactactctagtctagactgagggcaagtaaagaataaaaccatatgtgttgcgttgtttagtactttagtaggcaaccaccatataagaaggcaggatttgcgttgctcagtgtggcttcctgaatgtgaagcgagtcgtgcagtcgacaacgttgctgtttctgttgtcattgtcttggtgacgccgatatcctgcgctcttgtggataatttcaaggttcaagacacactatataaattgttgttgccggtatgcgtgtgtttaagcttgacattccttcacacgaaaaatcaaggataggctggaactggaaaaacatgcatcaaaagataggaggtgtagctggtggactctgctttggtttctcggttactggagtagcaagtgccgaggttcctatcattagagtcaaagacaatgccgagacttcgtcatcatctaccagttcaactcatggaaaggaagtgtacacagattattctgtcacaggtattcctggagatggaaggtgtttattccgctccgtggtgcatggtgcatgcattagatcagggagaccaatacctaatgaagatcttcagagaaaactagctgatgaattgagagcaacggtcgcagatgaatttgtcaagaggcggaaagagaccgaatggttcgttgagggggattttgatacatatgtatcccatattagggagccacatgtgtggggaggcgagccagaattgttcatggcgtcccatgttcttcagatgccaataacggtttacatgcgcgacgaggatgctggcggtctgatagcaatcgcagagtatggccagcagtatggtaaagaagacccaatccaagtcctgtatcatggttttggccattacgacgctctacagatcccagcaaaggttggatcgaagaggaaactgtagacgctgcgcgccgcgagcttgaggtacgctccttgttccagtgtttatacaaccttgtcgaacactcatgctatatgcatgcgagtgtggaagaagacaagcttaacatgaaatggcgttaactcgccgccatgcataaatgttattacatgattcatgtacttccccaggagcagatgagttggaacacttcacttgttgtgttttctctctcctcccatatcatctatttcccattcataatttgatacttaattccaggtgcattcgttgggcaaccatctaacctcctactactacagagaaaattcggaaacaataagctgcatgcatgcatgcattgagatgtgtacctgtacaaaatgtcaatccaagcttcggatgctgaatctgtacaccatgccctgaaaaccgcacttgtgtagtttgtgtgactggtacagtagaagatagaaggggcgccggggacccatttaccatactctgatgactgcaagtacgttcatttagagtgaagtaagctacacagctcaccagttggtccagacgtccagtgagcgtacatgttttgaatgaggggcatgtggagagcacatagacagttgagtccggcactctcctggatcggaattgaattttatttgcagcataatcatgtgtggttctccaactgaaccatagcctcgttcttctcacccccttcaaaaaaaacgaggggctggctggctggctggtagtagtagtaacctgcttgttagctggactggtgatttcaaaccgtgatgggtgggtgcacatgtcctgatgtcactcgaatcgggttctgttttgccgcgtcgcctttgcacgccgccgtgatgtgccgctgccaaccttggggggatttcgaacggggacgacgaaccagatccaccgcgcagcgtcacccagctagcctgctgcctgctggactggaaccgggggaagcctccaaggcgaaggcagcagcaggaacagtagaagcttggggatgtggattactagactattattatttattagactagactagagtagtcatggggatcaacgacaccccttgagatctcccacatgcaaacgcgctcgattaacctttttttactactttcccaaacaaaagtcgccctcccgaccaactatatcaaaatcaaatcaaatgctttcaaaccaatcgaatcaccaccgggcggtccttgcagcgcattcatttcaaatcgctttccccaaactacccctgccttccctcaatgatctagtctacaggtgtgggtttcccgtcatttcgccgctaaatcccagtcacctaaaccccacgcccctatcgctcccctccttccccttctccgcagctcatcctccccttgtctgcgacccagggaatggcagcactgtcattctagtcactcaacaaccaccaccacctgcacccccgctcgctccgggcaatggcggcggttctggcggtcctggtgtcggcggtggccgccacgtccatcacggccgcggcgctcaacacggacggtctcgcgctgctggcgctcaagttcgccgtctcagacgacccgggcggcgcgctgtccacgtggcgggacgcggacgccgacccctgcgcctggttcggcgtcacatgctccaccgccgccggccgcgtctccgccgtcgagctcgccaacgcctcgctggccgggtacctcccgtcggagctctcgctgctgtcggagctgcaggcgctgtcgctgccctacaaccggctctcggggcagatcccggcggccgtggccgcgctgcagcggctggccacgctcgacctcgcgcacaacctgctgtcgggcccggtcccgcccggggtggcgcgcctcgtctcgctgcagcgcctcgacctctcctccaaccagctcaacggcacgatccccgccgcgctggccgcgctcccgcgcctggccggcgtgctcaacctcagctacaaccacttcacgggcgccgtcccgcccgagctcggcgccatccccgtcgccgtcagcctcgacctccgcgggaacgacctggagggggagatcccgcaggtcggctcgctcgtcaaccagggccccaccgcgttcgacggcaacccgcgcctgtgcggcttcccgctcaaggtccagtgcgcgggggccgccggggcggacgacgacccgaggatcccgaactccaacggccccaccgaccctggcgctgcggcggaggtcgggaggaggggaggcccgaggcagccgcggcggcggcgctcgtcgccggcggtcccggtcctcgcggccgtcatcgtcgtcgccctcgtcgccggcgtggttctgcagtggcagtgccggcggcggtgcgccgccgcggccggggacgaggggaaggagtccggcaaggagaagggcggcggcgcggtgacgctcgccggcagcgaggaccgccgcagcggcggggaggaaggggaggtgttcgtggccgtcgacgacggcttcgggatggagctggaggagctgctccgggcctccgcctacgtcgtcggcaagagccgcggcggcatcgtgtaccgggtcgtccccggccgcggccccgccgtcgccgtccgccgcctcagcgagcccgacgacggcgacagcgatggctccggttctggctccggctggcgccgccgccgcgcgttcgaggccgaggctgccgccatcggccgcgcgcgccaccctaacgtcgcccgcctccgcgcctactactacgcccccgacgagaagctgctcatctacgactacctccccagcggctccctccactccgctctccacggtggcccgacggcgtcgccgacgccattgccgtggtccgtgcgtctgtccatcgtgcagggcgcggcgcgcgggctggcgtatctgcacgagtgcagcccgcggcggtacgtgcacggctgcatcaagtcgtccaagatcctgctggacgacgagctccgcgcgcacgtgtccgggttcgggctcgcccgcctggtcgccggcgcgcacaaggccgccggcggcgggcactccaagaagctcggcagcgcggcatgcgcgctccgaggcggtggcgcggcgtcgtacgtggccccggagctgcgcgcgcccggcggcgcccccgccgcggccgccacgcagaagggggacgtgttcgcgttcggcgtcgtgctgctggaggccgtgaccgggcgcgagcccacggagggggagggcggcgtggacctggaggcctgggtgcgccgcgcgttcaaggaggagcggccgctgtcggaggtggtcgaccccacgctgctcggcgaggtgcacgccaagaagcaggtcctggccgtcttccacgtcgcgctcgggtgcacggagcccgaccccgagatgcgcccgcgcatgcgcgccgtcgccgagagcctcgaccggatcggctgacttccagcgcgacggcgtccggccggccgccggttactgatcatcaactacgtaggtgcaatccaacgcataaaagagactcgcagtcctgttcatgtagattagcgcagttaagcattgtggatttcagagacggtaaacgcaggtaaaaacaatcatcatccgctccatctgtgaatgacgaaggtgaatcactcgacgtagcaggctataggctagcagccgtgctaatattttgtggcaccccttgatccattccaaagcgaactctgttgggagttttctatcgttttgccactgcctacaactgtgcggcgctttgcccaaaagcttgcgatgcgttccttggggacctgggactctgggaggcagagagagcagacaggcttttggccctaggctgtgcggttcacctttggcttggtcgaattgactct

SEQ ID NO: 219956 - DNA, 1482 bp, Zea Mays
cacgcctcctcgcgcgccgtgcgctctgcctcgcaccgctccagcgtctccaggaacacgcgctgcatggcgtcttgcttctccgtgaactgcttcatcatcctctcgaaggtggccatcatctccctgtcgcactcgcccccgctgaggccctcctcccccgcaccagagtcgtcgtcgtcgtcgtccgagtcgtactctgagtcggactcggacatcgacgagaagctgaggtccggcaggccggcgacggcggcagggcccagcaccgtagggcccgccgtccatgccatttccatcggctgatgagggccagcttgcaccgtggtcatgcccgagggcgggggcggcagaggcggcgccgaggcgtgcagcgcctcgagctgcgagaagaagcggtagctcttgccgtcctggcgcccggcgcgggcgtccttggtgcgcctgtagtacttgtccacgttctcgaacttctccttgcacttcttggcgctccggtggtaacccagccctgcaagcttccttgcgacgttctcccagagcggcgctttgagcggggagctccggaagtcggcgtccatctccgtccggatcctgatgagcgccagcgtctcctcgcgcggccaccggttgccggacgctcccgcgccgctggcgcccaagtcggcctgcatgtcttcgtcctggagtctgaccgccacaccggcgccggagccgcccgctgccaattcctcgaaattagcgctcgaccccgccggctgcaactgcatcgtcggcagggctgggatggcggcggtgacagacacggcgagccccgtcggcgtcggcgagaacggggccgtgcccgtgcccgtgccagccgtctccggggccatgtacggggacccggcgccaccgtggtggtgcagcatggccgccgccacctttggttccctgcacaaaacaagaaattccgttgatccaccagctcgcaagacctagggaatagaaaattgcagcatcacttcaccggtactgcgactaagctagcacacagtccctctcctggctgtggactgtgtgtggtctacaactacgtactaccaactaacaattgtccaggaaaacaacccagggacagaattggggagaattcttgcttctacacccggccatctctctcagtccccttttccctcccgtctctcttctaggaacagagtgagtgagtgccacaagcaagattagagagacttacggcccctctggacgacgggttatgacggaaactggcagcgagggggctgtgcagctagggggaggaggaagaaggggcagtggtgaaagggagggatggggtcatggacaactggaaaggggcgaaagagtgtggagggctgtaagggcaggcagagaaagccaagaacctctctctacaaagggggaggcttctgcctgctgctggggtacggtacatgtgtaaaaccactagatatacactag

SEQ ID NO: 219957 - DNA, 1120 bp, Zea Mays
cagctacagtgctttcagaaaccttgcagactcacagattgggcaggacatttggagtattcttcagttcaggtccctccaattcccaccatgatctcttggccaaccatctaccatgttcttgaagaaacggttcccctgtatgtagctatgatagtggcctacctatccatacaatggtggaagctgttcacgccagagcagtgctccggtatcaacaaaaatcgctctccttgctggggtttgcagttgcctctagggtgtgctgcgaggagaagtttgattggctgattacagaggaatggctatcacaacatcatctgaagctatagatgaagcagaatcaggtactccaggacctatgcagcaaggacacgaagaggggcaagcgaaaggagtctcggcaagatgttatggtgccttccacttcttactggtggtcagtaggaagctggtgacaaatcccaacatgtatgcaagcctagccggcctgatctgggctctgatcagcttcaggtggcgaatacagttaccatcgatcgtcaacaactccataagaatactttcagatggagggctagggatggcgatgttcagcttaggtgtcttcactgccctgcaaacgaaaatcgtggcatgtggaaccaaaaggatgctgctatcactaggcatcaggttcttcctcgggccaggcctgatggtgatctcttcctatctaatcggtatgcgtggaactttgctgaaggtggccataatacaggcagctctacctcaaggaatagtgccgtttgtgtttgccaaagagtataacgtgcatgcggatattctgagcactgcgataattctgggaatgatggttgcggttccggtggccctgggttattacttcgtcatggatcatcccagactctaaccatgtcccatttgcggaaaggattatcctctagattcatattgcgggcgtgcttgtgatattatatctttgtggaggctgtatatatctggattcgtgttagttgacccaagctaatgataacaaccagcttggtttcggtgaattgttcggccagtacttgattagtaaataattgatgcaaaagaaggaagaaggggacgcctg

SEQ ID NO: 219958 - DNA, 5214 bp, Zea Mays
gcaaggcacaatacactgcgccgttcgccactgttcctcccagtcccagtctcagtccttcttcaagcagcagacagggcgcggagaggagggactagggagggttctagaaccttctagaagtgaacactccttgccgggggcagctcctgttgctctgcgccttctgcagcgtctttgttccgccactcctgttcctgagctcctccactccactcaagtgctctcagaaggcggccgcggcggcagacgatagagagcaccattcgccgcctcaccatcctcctgctcgccgcctccgcctcctccgccccgctcagaatggtgagggatcacgccgcgctccgccgaactccggcgaaggcttccgcctcggaagccggcaacgacgagaactcgccgggcgtcgtcccagatgtcgcggccgttggcgtcgccgtcgccgccacggaccccggccgccctccgctgctcgctatccagccgccggcgtccggtctgaagcggaagcccgagtcgccggcgccgacgccgtccaagctcccgttccggacccccgagaaggccgccacgcggagccggttcggctgggtcccgccccgcgccgacgaggccccaccgcgggtcggcgtgggggcaaccccgcactgcgcgatgaccacgccccgtgcgcatcggggcaaggcggtgacggtggcgccggcggcctccgagggcgggtccacgcacagcacgcccaccaagagcgtcaccaagccggcgcacagcattggggcgagcgggtcgaggccgcccatgagcggtggcgggcccaggggggcagggtttggcctggggttcaccatggcggggaggggaccgccgacgtcacttgggccgccgacggtggtgaattccgtggaggtgcctcatttcgagctccgagaggacccctccttttggatggacaacaatgtgcaggtcgtcatccgtgtgcgcccgctaaataataacgaaaagaacctgcacagttattaccgatgcttgaaacaagaaagtgcgcagactatcacttggattgggcagcccgaaactcgttttacatttgaccatgttgcttgtgaagcagtggatcaggaggtgctcttcagagttgctggtttaccaatggttgagaactgtatggctggatacaacagctgtgtgtttgcttatggacagaccggaagcggaaaaacatatacaatgcttggtgaaataagcgatctggaagtaaggcctagtccagaccgagggatgacaccacgcatttttgagttcttatttgccagaattaaagcggaagaagagagcaggagagatgagaagctcaaatacagttgcaagtgttctttcctggagatatataatgaacaaattacagatcttcttgatccttctgccacaaatctcccactccgagaagatataaggaatggagtgtacgtcgaaaatttgactgaattcgaagttggctgtgccagtgacataataaaactcctgatgcagggttctgcaaatagaagagtggctgctacaaatatgaaccgtgagagtagccgctcccacagtgttttcacctgtatcattgagagtaggtgggagaaggattcagcatccaacttacggtttgcaagattaaatctggttgatcttgctgggtctgaaaggcagaggacatctggagcagaaggtgagcggctgaaggaagctgttaatattaacaaatcgttatcaacacttggccttgtgataatgagtttagttgatctagcgcatggcaaacaaagacacattccatatagggactcaagattgacattccttctccaagattcacttggagggaactcaaaaactatgatcattgcaaatgtcagcccttcagtatgttctgctaacgaaacactcagcaccctgaagtttgctcagcgtgcaaggctcattcagaacaatgcggttgttaatgaagacgcttcaggagatgtgctagctttacaacatcagatacgtctcctaaaggaggagcttgctgtcctcaagcgtcaacatgtcactagatctttatccttctcagctgatgtttttggaggtgatgttgatgatggtagtgaaaacatgagtgtggatgacaagaatgataataaagcccataacggacactttttgaaagatatacgattttcaaataagcaggtgaggtcactggaagaagcacttgccggagcattacggagagaatcaactgcagaaaatactataaaggaacttgaacttcaaattgagcagttgaatgaattggttcgacaaagagaggatgacacaagatcggctaagatgatgcttaagtttcgggatgataagattcatagaatggaggttcttgtgaacagtaaattgccagcacaatcatatctactggaggaaaacaaaaccttatcacaagaagttgaacttcttagggaaagagttgataaaaatccagaagtaactcgttttgcactagaaaatattcgtctctcaagccaactgaagaggtcccagctcttcttcaacgaaggggagagggagcttctattgaatgaaatttctgagcttcgaaatcaggtttcacaaatacttgaacagaggacagaaaccgagcaacaaaataccttttctgacaaaactaagttgaaaaggaccagccaagaagtagaaacatgtagaagcaaccgtcaagtttgcttagaatcgaacatagcactaacaagggaaatagctgatcttgtggaagagaaaacagcccatgcggaagctgaggaaaaaccagctggtttaggtgacaaactgcaagaagcaaacatacatatcctccaatcgtgtaagcattgtgaggcaatggaaagagaattgaacgagtcaagatctcttattgaagctcttgaatcacagcagattatattgataaacgaaatagctgaacttaagaaggggtgtgtcgaaatctcaaggttgaacagtgaacttgacctccaccataggcaggattacttgaccaaagaggagcccaaagcggaacttcttaagtgtttcggtaaagaagattcacctttgcagaggaagtttaaaagaatgcaagcttcacttgaaaaggcacggaacctaaatacaaggtaccaaatagatcaggcatcacactgttttgctgagaaagaaatggatgaagttcgtaaacaggttgaggttgaaacagctaaggtgattcaatgcttagaagaagatctgatatcagtccaacagcaactaaatgcaagcaacaaaaatgacttgttagccaaacaaagcataaatgaacttcaactagaaatcaagcagttgaatgataagttacttgaggtgttgaaagagaacgaaatattttcttctgtgaccaaggaaaaagaaaaggaaattgaactattgtccaatgactggaacagattagctgccgacattggaaaatgtcttgtggatggaaatgcagctttaggtgaagcttctgatcaggttgcctttatttccaaatctttatctcaaagaaaatggatcgagaaacaagttcgaaagctgtgtagtggtatatctgaaagagatgagctactcgaagagcttcagaacaggttgaaagaggcagatgatataagacgtgacttagacttgaaattaaggtccttaagaggagcaatgcaggttgtaaatgaagagcatcagcaggaaaaatgtgatcaagaaaaagaaatatattttctaagatcacaaatatctgaacaaggacatgtaaacaatcaccaactagaagaaattcacagaataaacctattgttggatgaatcaattgagacttttgtacagaaggaggttctgcaacagacctgtgtttctttacaaaaggcaatgggagaagagattcatcgtctggagtcacaattagaccagtcaaagatacattttgctcatttattgaatcagactcaggaaaaggaacagcttattgggaagcttaaaaatgaagagttaaatgttttgttaagactgatgtcagaagttctaaagacaaacagtactgtacgtgagcttcgaattggattcaatacattgcagtcaagcctttatatgagccctgaagtgatcgcctgtcaaaattcagatttgaacttagaggatcgggtcgaccttagggccaatgaagcgttccaatctgtggagcggcaaaatgctgaggttctttgccaacatagcaaagaaatggagcttgcagttcaaggaatgcagataatgcagtctcaaatgactaaacttcttcaagaaaaagaaaatgcgaaggagtttaatttggagagtcaaagaacaattaaagatctaagtgatgaggtccttagattgaattcacatataattgaaaaagaaagatcctatgaagctaaattggaagagctgaatacaaaaatccacgaacacgatgcatcatttatttcatggaatgaagagaacgaggcacttcgaattgaggtttcggaggcaaaacttgttgtggcccagaaatcttttgagtctgcaactcttacagccaaatttgaagaagcgcaggcaactataagagatgcagactctacggtcaaggcattggtcgaagcaaacgaaaaggcaaaattcgaagcagataagtatgaagagaaggaggctttgtttagtgctgaaacagaaagcatgctaagtgaaattagtagtctgaaaatgctgctggatatgaaggaacaaagttacaagcttatggaaaagcaattccagtcaggcttgcttgaagcaaatgagctagctcttgagctggaagatggcattagacttacgcagaatttattacagcagaagcttgagtttgtttcttctgatgttgagtggatgaaggaaagggtccagcagtttgcagggttgactagaaaatggttagaggagaattggctggagataattggcaaagattgtgctatctctgtgttgcacctctgtcacatggagattcttttggagagaatcactgggttgaatgcagaaaatggtttcccttcagcacgggctgtgtgaatctaattctttgatatctaaactgcgagagcacaatgaaaaagccaagaatgaactggagaatgtgcagtgttctcaaagggaaattattaa

SEQ ID NO: 219959 - DNA, 2011 bp, Zea Mays
cgtcttcccctcctccgcgctcccgtcatctacacctctcgctcccacccacgagtcccaccgccaccaccaccagtctatcccctcgccatttgtttcctccccgtgcatgaaaccctaaacctaaaccccacctcccttcccgagccatcccctccagcgcggcgatggcaaaggcgctgctttcctcctccctcctccccgcgctgcccggcgctgccggaggcagccggagcgctgcgaggccgatgctgctcccaccgctccggttgcggcgcggccggcgcggcgcctccgcttgcgaggtgagggcgggcctgcacgggctcgactccgtcggcgggccccaccttcaggccgcgctggagcgcgccgaggcggcgctatacacactcgctgacgccgcggtcgccgcggcggacaccgccgcgggcgcaggggccgacgcaggccaggctgcggcggtccaaaagaacagcggctggttcggcttcatctccgaggccctcgaggtcgtgctcaaggtgctcaaggatggtctttctgcagtccatgtgccatactcctacgggtttgccatcattctgctcactatcattgttaaggctgcgacattgcctctaaccaaaaagcaggtggaatcaactctggcaatgcagaatttacagccgcagattaaggcaatccagcagagatacgcaggcaaccaggaaaggatacagctagagactgctcggttatacaagcaagctggtgtaaaccctttagcaggatgttttccaacgttagcaacaattcctgtatggattggtctttaccaggccctttcaaatgtagcaaatgaggggctattgacagaaggatttttctggattccatcactgggaggtcctacaacaattgcagctcggcaaagtggttctggaattacatggctcttcccatttgtggatggtcatcctccgctaggctggcatgacacgatatgctaccttgtattgcctgtgctacttgttgcttctcagtatgtatctatggagatcatgaagccacctcagagcgatgacccatcacagaagaacacaatgctcattttgaaatttcttccatttatgattggctggttctctttgtcagtgccatcaggattgtctatttactggtttacaaacaatgtcctcagcacagcccagcaggtgtggttacggaaaatgggaggagcgaagcctgtagtgactgagggagacaatctcgcaagcaggtttaggcagctaaaggaagaagagaacaggagaaaattcagcaaagcacttgctgcaggagattcagatgcgtcgtcatcgacatatgacatggatgatgaagagtcggatgagacgatagaagagggaggacctgtggaggaagcatctactagcagtgacaagaaacttccaaactactcagggaagaagggcaaaagatcgaagaggaagcgcatggtgcagtaatcgttgcagcataattggatgcgatttttgtcacaactggttaattcagctgaccagttaggtgccgtagtatcatggagacagttttggtgggggccttttggaggcataattgcataaatctgaggtgcagacaattagacagtttccggggacacaagtatttgctgctaagctatccaatgaactagctcagtcagtatatatgctttagacctgagggtaatggacaggagaacaggagtggggtaaatgcacaagcagagagacaggatctgtagaggtaggcgagagatactccggtgtactctgtacatggttctaaaaaattgggcagaaactggattgtccagaccgttcatatacgttgtactagccggttgttgtactagccagttgcgctacggttgttatatattatataaatagatattgagatatttattcaaatataactattgtttatttctaaacactacaagaagggtattatataattgattaattgtaaaggcttgttt

SEQ ID NO: 219960 - DNA, 2382 bp, Zea Mays
ccgtcccccaccccacctccaacgacaacctccacctcgtcttcccctcctccgcgctcccgtcatctacacctctcgctcccacccacgagtcccaccgccaccaccaccagtctatcccctcgccatttgtttcctccccgtgcatgaaaccctaaacctaaaccccacctcccttcccgagccatcccctccagcgcggcgatggcaaaggcgctgctttcctcctccctcctccccgcgctgcccggcgctgccggaggcagccggagcgctgcgaggccgatgctgctcccaccgctccggttgcggcgcggccggcgcggcgcctccgcttgcgaggtgagggcgggcctgcacgggctcgactccgtcggcgggccccaccttcaggccgcgctggagcgcgccgaggcggcgctatacacactcgctgacgccgcggtcgccgcggcggacaccgccgcgggcgcaggggccgacgcaggccaggctgcggcggtccaaaagaacagcggctggttcggcttcatctccgaggccctcgaggtcgtgctcaaggtgctcaaggatggtctttctgcagtccatgtgccatactcctacgggtttgccatcattctgctcactatcattgttaaggctgcgacattgcctctaaccaaaaagcaggtggaatcaactctggcaatgcagaatttacagccgcagattaaggcaatccagcagagatacgcaggcaaccaggaaaggatacagctagagactgctcggttatacaagcaagctggtgtaaaccctttagcaggatgttttccaacgttagcaacaattcctgtatggattggtctttaccaggccctttcaaatgtagcaaatgaggggctattgacagaaggatttttctggattccatcactgggaggtcctacaacaattgcagctcggcaaagtggttctggaattacatggctcttcccatttgtggatggtcatcctccgctaggctggcatgacacgatatgctaccttgtattgcctgtgctacttgttgcttctcagtatgtatctatggagatcatgaagccacctcagagcgatgacccatcacagaagaacacaatgctcattttgaaatttcttccatttatgattggctggttctctttgtcagtgccatcaggattgtctatttactggtttacaaacaatgtcctcagcacagcccagcaggtgtggttacggaaaatgggaggagcgaagcctgtagtgactgagggaggtagtggaataattaccgcaggacgagcaaaacgctctaatgctcaacctgccggagagaggtttaggcagctaaaggaagaagagaacaggagaaaattcagcaaagcacttgctgcaggagattcagatgcgtcgtcatcgacatatgacatggatgatgaagagtcggatgagacgatagaagagggaggacctgtggaggaagcatctactagcagtgacaagaaacttccaaactactcagggaagaagggcaaaagatcgaagaggaagcgcatggtgcagtaatcgttgcagcataattggatgcgatttttgtcacaactggtaagttctattgaccctcagatactgttcataatgaatcatgtcacaaggaaccagggttgaacttctccgttttgtaaaaaattcttactgttccttttttagaaaatttaaaatttattcaaactcctgctccaaacagaagcaaaaacttaacagtcactgccaattcatatagaattaaccaacaatttaactttttatcattttcccttttggaagagagggtgccatccggtccacatcttgtcttgaaaaatgcgcacatattaataattttctattgcaggttaattcagctgaccagttaggtgccgtagtatcatggagacagttttggtgggggccttttggaggcataattgcataaatctgaggtgcagacaattagacagtttccggggacacaagtatttgctgctaagctatccaatgaactagctcagtcagtatatatgctttagacctgagggtaatggacaggagaacaggagtggggtaaatgcacaagcagagagacaggatctgtagaggtaggcgagagatactccggtgtactctgtacatggttctaaaaaattgggcagaaactggattgtccagaccgttcatatacgttgtactagccggttgttgtactagccagttgcgctacggttgttatatattatataaatagatattgagatatttattcaaatataactattgtttatttctaaacactacaagaagggtattatataattgattaattgtaaaggcttgttt

SEQ ID NO: 219961 - DNA, 2090 bp, Zea Mays
aaccgtcccccaccccacctccaacgacaacctccacctcgtcttcccctcctccgcgctcccgtcatctacacctctcgctcccacccacgagtcccaccgccaccaccaccagtctatcccctcgccatttgtttcctccccgtgcatgaaaccctaaacctaaaccccacctcccttcccgagccatcccctccagcgcggcgatggcaaaggcgctgctttcctcctccctcctccccgcgctgcccggcgctgccggaggcagccggagcgctgcgaggccgatgctgctcccaccgctccggttgcggcgcggccggcgcggcgcctccgcttgcgaggtgagggcgggcctgcacgggctcgactccgtcggcgggccccaccttcaggccgcgctggagcgcgccgaggcggcgctatacacactcgctgacgccgcggtcgccgcggcggacaccgccgcgggcgcaggggccgacgcaggccaggctgcggcggtccaaaagaacagcggctggttcggcttcatctccgaggccctcgaggtcgtgctcaaggtgctcaaggatggtctttctgcagtccatgtgccatactcctacgggtttgccatcattctgctcactatcattgttaaggctgcgacattgcctctaaccaaaaagcaggtggaatcaactctggcaatgcagaatttacagccgcagattaaggcaatccagcagagatacgcaggcaaccaggatacagctagagactgctcggttatacaagcaagctggtgtaaaccctttagcaggatgttttccaacgttagcaacaattcctgtatggattggtctttaccaggccctttcaaatgtagcaaatgaggggctattgacagaaggatttttctggattccatcactgggaggtcctacaacaattgcagctcggcaaagtggttctggaattacatggctcttcccatttgtggatggtcatcctccgctaggctggcatgacacgatatgctaccttgtattgcctgtgctacttgttgcttctcagtatgtatctatggagatcatgaagccacctcagagcgatgacccatcacagaagaacacaatgctcattttgaaatttcttccatttatgattggctggttctctttgtcagtgccatcaggattgtctatttactggtttacaaacaatgtcctcagcacagcccagcaggtgtggttacggaaaatgggaggagcgaagcctgtagtgactgagggaggtagtggaataattaccgcaggacgagcaaaacgctctaatgctcaacctgccggagagaggtttaggcagctaaaggaagaagagaacaggagaaaattcagcaaagcacttgctgcaggagattcagatgcgtcgtcatcgacatatgacatggatgatgaagagtcggatgagacgatagaagagggaggacctgtggaggaagcatctactagcagtgacaagaaacttccaaactactcagggaagaagggcaaaagatcgaagaggaagcgcatggtgcagtaatcgttgcagcataattggatgcgatttttgtcacaactggttaattcagctgaccagttaggtgccgtagtatcatggagacagttttggtgggggccttttggaggcataattgcataaatctgaggtgcagacaattagacagtttccggggacacaagtatttgctgctaagctatccaatgaactagctcagtcagtatatatgctttagacctgagggtaatggacaggagaacaggagtggggtaaatgcacaagcagagagacaggatctgtagaggtaggcgagagatactccggtgtactctgtacatggttctaaaaaattgggcagaaactggattgtccagaccgttcatatacgttgtactagccggttgttgtactagccagttgcgctacggttgttatatattatataaatagatattgagatatttattcaaatataactattgtttatttctaaacactacaagaagggtattatataattgattaattgtaaaggcttgttt

SEQ ID NO: 219962 - DNA, 2087 bp, Zea Mays
ggataaaccgtcccccaccccacctccaacgacaacctccacctcgtcttcccctcctccgcgctcccgtcatctacacctctcgctcccacccacgagtcccaccgccaccaccaccagtctatcccctcgccatttgtttcctccccgtgcatgaaaccctaaacctaaaccccacctcccttcccgagccatcccctccagcgcggcgatggcaaaggcgctgctttcctcctccctcctccccgcgctgcccggcgctgccggaggcagccggagcgctgcgaggccgatgctgctcccaccgctccggttgcggcgcggccggcgcggcgcctccgcttgcgaggtgagggcgggcctgcacgggctcgactccgtcggcgggccccaccttcaggccgcgctggagcgcgccgaggcggcgctatacacactcgctgacgccgcggtcgccgcggcggacaccgccgcgggcgcaggggccgacgcaggccaggctgcggcggtccaaaagaacagcggctggttcggcttcatctccgaggccctcgaggtcgtgctcaaggtgctcaaggatggtctttctgcagtccatgtgccatactcctacgggtttgccatcattctgctcactatcattgttaaggctgcgacattgcctctaaccaaaaagcaggtggaatcaactctggcaatgcagaatttacagccgcagattaaggcaatccagcagagatacgcaggcaaccaggaaaggatacagctagagactgctcggttatacaagcaagctggtgtaaaccctttagcaggatgttttccaacgttagcaacaattcctgtatggattggtctttaccaggccctttcaaatgtagcaaatgagaaggatttttctggattccatcactgggaggtcctacaacaattgcagctcggcaaagtggttctggaattacatggctcttcccatttgtggatggtcatcctccgctaggctggcatgacacgatatgctaccttgtattgcctgtgctacttgttgcttctcagtatgtatctatggagatcatgaagccacctcagagcgatgacccatcacagaagaacacaatgctcattttgaaatttcttccatttatgattggctggttctctttgtcagtgccatcaggattgtctatttactggtttacaaacaatgtcctcagcacagcccagcaggtgtggttacggaaaatgggaggagcgaagcctgtagtgactgagggaggtagtggaataattaccgcaggacgagcaaaacgctctaatgctcaacctgccggagagaggtttaggcagctaaaggaagaagagaacaggagaaaattcagcaaagcacttgctgcaggagattcagatgcgtcgtcatcgacatatgacatggatgatgaagagtcggatgagacgatagaagagggaggacctgtggaggaagcatctactagcagtgacaagaaacttccaaactactcagggaagaagggcaaaagatcgaagaggaagcgcatggtgcagtaatcgttgcagcataattggatgcgatttttgtcacaactggttaattcagctgaccagttaggtgccgtagtatcatggagacagttttggtgggggccttttggaggcataattgcataaatctgaggtgcagacaattagacagtttccggggacacaagtatttgctgctaagctatccaatgaactagctcagtcagtatatatgctttagacctgagggtaatggacaggagaacaggagtggggtaaatgcacaagcagagagacaggatctgtagaggtaggcgagagatactccggtgtactctgtacatggttctaaaaaattgggcagaaactggattgtccagaccgttcatatacgttgtactagccggttgttgtactagccagttgcgctacggttgttatatattatataaatagatattgagatatttattcaaatataactattgtttatttctaaacactacaagaagggtattatataattgattaattgtaaaggcttgttt

SEQ ID NO: 219963 - DNA, 1856 bp, Zea Mays
ctcgtgggcccagatgaggtagcgagccgtccccgatcccgtctccatgggaagaagaacgtggaaacctgcggggaagtaaacggcggcgacaggcggctgcgcgtcgccgcggcgacatgacgtcagttaggcacccgatcgacaagttgtcgctgcagcgaatccacccacgaagggcagcggcgcgacccaggtacttatggcataatttacatatgtcttgccgtcgttcttgtgtgggtgatctacggtgtgtttggttagccggttggccttaatccggcgtgagagtcaattcggaatgaggtggtctggatggactctttcctcagattaacatgtcactagtgctcgttcatgacggacagctagcgtctcaaaccaaacaacgtcataggctgggatggttcggcagactatcccgttctgcaaagtgcaaaccaaacggaccaggaaccgattctgcatttctatggcttttttgtgtcatgcttcgcgcatgtgttggtgatcgaccaagacctaacgatctcaactctcgagggagaatgttggtgaattaggtttgtgctcgactgctcatatgtacgattcgtttagaaatttttcagagcctcaacttgtatccaagagatcagcacctgatgccaaataaattaaactttagaagatgcagcaccatcatcaagtcttggtggagacccttggagccaacctcggcaaaacttgataatctatgtgtgtcatatttatctatgtgtgatctcgacttttatttgaacccacgtgaactcggatcactctgacttgcttgcattagtatttagttcctgaaatgcctttctgcatccttcgtcaaagccaccagcaagctgcaaatttgtttcggtgcagtcagttaattaattagtttctgcaagtgtcgttgcgaattaattcgtggttcggaacaagttacctgatgtatgcggaaggcaaagcggacaccttgcagaagcagctcctcctcattcgcaaatggatctgacttcagtgtcttcacaatgcggttcatgtactcttttgcaagcttcaaggaagccatctttagctgtttaatgtaggatgggcatgcaccatgtgtcatatgtctattattgtatttggactccacacttttgtgaaactaaatgcctctcctttattgcgagttgtgacagaacatactgtgaaaggaagacatacttggcttatgactccagagtcgagcatccattcccatggtatcttaagatcgcggtagttgaatgctgcttctctcaaggcatctgctttcttctcgggccagttggggaattgttttagcactgctctttcatccacaagccatgtgcaggtaactaaatcgacgtacgggatggcctaagatgatagagctcctttaccagccagagcgaggggagacaccttttgctaataacgggcaagtaaaagttttaaataataggaagaaaaagaaacgaagggaaagctgacaaaacagagaataaaatggttaaatcctatgtgttttacttctggcatgtgcttagtattcgtttgcctttaatctataacagcttctactgattttacagtatttttacttctatcgattacagctacattactttaaatagttggctttaatccgaaccgaacaacttgatccgaggtttggcggatttcgttgttagtggtacaaaagatggagcccatttctttgcccaagccgatgacgcacttgttgaaagggcagatttagatcccggtcgtgtggacacatgtagagatggtaatgaactctaaattttgcgctataaaatttaataatt

SEQ ID NO: 219964 - DNA, 929 bp, Zea Mays
cgacggtgacgctgcgggagcgtctcgctggctcgtgggcccagatgaggtagcgagccgtccccgatcccgtctccatgggaagaagaacgtggaaacctgcggggaagtaaacggcggcgacaggcggctgcgcgtcgccgcggcgacatgacgtcagttaggcacccgatcgacaagttgtcgctgcagcgaatccacccacgaagggcagcggcgcgacccagaacatactgtgaaaggaagacatacttggcttatgactccagagtcgagcatccattcccatggtgtggccactctcctgtcatcatggaaggatgatgcttccgactctatgttcttcagatcgcggtagttgaatgctgcttctctcaaggcatctgctttcttctcgggccagttggggaattgttttagcactgctctttcatccacaagccatgtgcaggtaactaaatcgacgtacgggatggcctaagatgatagagctcctttaccagccagagcgaggggagacaccttttgctaataacgggcaagtaaaagttttaaataataggaagaaaaagaaacgaagggaaagctgacaaaacagagaataaaatggttaaatcctatgtgttttacttctggcatgtgcttagtattcgtttgcctttaatctataacagcttctactgattttacagtatttttacttctatcgattacagctacattactttaaatagttggctttaatccgaaccgaacaacttgatccgaggtttggcggatttcgttgttagtggtacaaaagatggagcccatttctttgcccaagccgatgacgcacttgttgaaagggcagatttagatcccggtcgtgtggacacatgtagagatggtaatgaactctaaattttgcgctataaaatttaataatt

SEQ ID NO: 219965 - DNA, 2752 bp, Zea Mays
gtttgtgatcgtttaatttattttagttatgctctttggaatgggcatttaggttgatgtctagtgaactcgagttcaagtttgggcttcccaatccttgttgttagtgtaaggctgttgttgtccaactggtattataggataattggagtaacaagagtagttttagcgataaactacttcttctgtcctaaattataagacgttttggcttttgtaggttcatagttttggcaacgactactatgcaatcaagccttaggtgcaaacgtgaagcgagtcttttggtccattaaatcattatccaaccatagatataattgtagtttgttagttttttttataaatctacgtgaattggtggtggaaaggtttaagtgttaaatataatatatggttggatcatgatctaatgtaccagaaggcttgtttgtacgcttgcacctaaatcctgattgtatagtagtcattgcctacgtataagttatgtgtggatacatcatacataatagaagctataaatctagaaatgccaaaacgtcttataatttgggatggagggagtattatataatcttaaatttatatatgatcccattacttgtaccatttctttgctataggtgagtagtttcttagcagcactcccatcagtattgcagtattgctcttataatttttgacgcatctatgagttattgtcttgtgatgtatttgtcagttatcatctagatcgatcacaactgatgagttttcatatagccttgaatcattcgcagtgtttaatgtggattacttaatggtgttttgaatgtatgcaggcagtaatcaagaggttcattgtgaaccactagaagttattcgtgaaagacactccacagaaccaaacatcaatgctgcagctattctaccatcaagacctgtgagcaatacatttaacctgcttctggaaggtgacatgaatccaagtcatggcaatgggcttgctgaaatagagaacataatcaaccagagatatttttctagggatgagacactacgtcttatagagatcatgcggtcaaggacttctgattttactgttgaagaccagagacctccagtatctactgcaaaaggttttgaaacaaaattttttacacctgccaaactgatcgaggctcagccatcttggaggactgatatcgttccatcatccaatgtgcatgatattggttcttcgccagttgaaattgccaaagcttttatggaagcgcagacctcagcttctgtacacgagtccaaaaagcggaaattcagagctttgagtcatggagttgcggttgacaattcgacatcagaagttttccctacaataactactgattcttctgtaagatggcctgactcagttgttcaaggtggtcccaattatcttacaccacaaagtaataaaggaaggactctgtctcagcctctttctcgcacaccatacaatagctcagttattcgaagatatattaagaacagcaggcatggtgatatgcacaataatggacagacacaatttcccactccattttctattggaagtaagagaatactagaggatacacatgtatcagcaagtggtggtatagcgcagccatcatcttccaggggacagatagatgtttttggttctattctaagagaaggttcgactgcaataaacaatgttgcattcaacctgcaagagtcagatggtaaaagcatgacagaaagcagaacaacttttggacgtgcttcaggtgtagacaatatctcaagggttgcttcagtatctgttcatcccaagtcaagcgaaacagcattcaaaatacttaagcaacttgacagaactattccttcccctacatcaaagccactagggctgagacagacattagccaagaaaaatactttttctgttgctacctacagacagattaaagagcctgatatcattatcggtaatgataataaacagagcagcattaatgagagtggtagtgctagctcggagactacatatggaaaaaaggttcagcaacctcaaagcagtcctatttcaggagagtcaagtgaaaaagtccagagaagcggagctaactcagatgtttatgaagcaggcacttctcagcgtcctctgaaatcaaatctaacacccacttcagtcgccgaggtcttggataataacaacaccagcaaaggtttcagcttcacatttcctattcctaaagctccaagctctctacttgaaccgcctcctacaccaaccatggcctcgccaccaaggaccttgccaatcactaacgaggatgttcccaagttcacctttggctcatccagcatggccaacaaactcgttttctccttcaactccacaagcagttctcctggtgctggtggaacagacccaaccttcaaatttggatctgataataagcgagagcttgtgttttgatacagtttttttttgatagacaccatgcccgcggatctgaactgtaccactctatctattcttggtgtaagacgtcttaagagagttggagtgtgctacttgagctacacaacatgacattcttttcattcattagcatattcaaacattacatattttagacgtcctgcgttggcaggacatttcccccagtgctttgcacccgtggctgtgtcattgggcatcagttcgtttagcctattatttggaagcttttcatagctgaatggagttccattgccctttcgg

SEQ ID NO: 219966 - DNA, 2504 bp, Zea Mays
gtccattaaatcattatccaaccatagatataattgtagtttgttagttttttttataaatctacgtgaattggtggtggaaaggtttaagtgttaaatataatatatggttggatcatgatctaatgtaccagaaggcttgtttgtacgcttgcacctaaatcctgattgtatagtagtcattgcctacgtataagttatgtgtggatacatcatacataatagaagctataaatctagaaatgccaaaacgtcttataatttgggatggagggagtattatataatcttaaatttatatatgatcccattacttgtaccatttctttgctataggtgagtagtttcttagcagcactcccatcagtattgcagtattgctcttataatttttgacgcatctatgagttattgtcttgtgatgtatttgtcagttatcatctagatcgatcacaactgatgagttttcatatagccttgaatcattcgcagtgtttaatgtggattacttaatggtgttttgaatgtatgcaggcagtaatcaagaggttcattgtgaaccactagaagttattcgtgaaagacactccacagaaccaaacatcaatgctgcagctattctaccatcaagacctgtgagcaatacatttaacctgcttctggaaggtgacatgaatccaagtcatggcaatgggcttgctgaaatagagaacataatcaaccagagatatttttctagggatgagacactacgtcttatagagatcatgcggtcaaggacttctgattttactgttgaagaccagagacctccagtatctactgcaaaaggttttgaaacaaaattttttacacctgccaaactgatcgaggctcagccatcttggaggactgatatcgttccatcatccaatgtgcatgatattggttcttcgccagttgaaattgccaaagcttttatggaagcgcagacctcagcttctgtacacgagtccaaaaagcggaaattcagagctttgagtcatggagttgcggttgacaattcgacatcagaagttttccctacaataactactgattcttctgtaagatggcctgactcagttgttcaaggtggtcccaattatcttacaccacaaagtaataaaggaaggactctgtctcagcctctttctcgcacaccatacaatagctcagttattcgaagatatattaagaacagcaggcatggtgatatgcacaataatggacagacacaatttcccactccattttctattggaagtaagaaaccacgtaggtacaaggtggaactggaagaccatctgagaatactagaggatacacatgtatcagcaagtggtggtatagcgcagccatcatcttccaggggacagatagatgtttttggttctattctaagagaaggttcgactgcaataaacaatgttgcattcaacctgcaagagtcagatggtaaaagcatgacagaaagcagaacaacttttggacgtgcttcaggtgtagacaatatctcaagggttgcttcagtatctgttcatcccaagtcaagcgaaacagcattcaaaatacttaagcaacttgacagaactattccttcccctacatcaaagccactagggctgagacagacattagccaagaaaaatactttttctgttgctacctacagacagattaaagagcctgatatcattatcggtaatgataataaacagagcagcattaatgagagtggtagtgctagctcggagactacatatggaaaaaaggttcagcaacctcaaagcagtcctatttcaggagagtcaagtgaaaaagtccagagaagcggagctaactcagatgtttatgaagcaggcacttctcagcgtcctctgaaatcaaatctaacacccacttcagtcgccgaggtcttggataataacaacaccagcaaaggtttcagcttcacatttcctattcctaaagctccaagctctctacttgaaccgcctcctacaccaaccatggcctcgccaccaaggaccttgccaatcactaacgaggatgttcccaagttcacctttggctcatccagcatggccaacaaactcgttttctccttcaactccacaagcagttctcctggtgctggtggaacagacccaaccttcaaatttggatctgataataagcgagagcttgtgttttgatacagtttttttttgatagacaccatgcccgcggatctgaactgtaccactctatctattcttggtgtaagacgtcttaagagagttggagtgtgctacttgagctacacaacatgacattcttttcattcattagcatattcaaacattacatattttagacgtcctgcgttggcaggacatttcccccagtgctttgcacccgtggctgtgtcattgggcatcagttcgtttagcctattatttggaagcttttcatagctgaatggagttccattgccctttcgg

SEQ ID NO: 219967 - DNA, 2287 bp, Zea Mays
aaaggtttaagtgttaaatataatatatggttggatcatgatctaatgtaccagaaggcttgtttgtacgcttgcacctaaatcctgattgtatagtagtcattgcctacgtataagttatgtgtggatacatcatacataatagaagctataaatctagaaatgccaaaacgtcttataatttgggatggagggagtattatataatcttaaatttatatatgatcccattacttgtaccatttctttgctataggtgagtagtttcttagcagcactcccatcagtattgcagtattgctcttataatttttgacgcatctatgagttattgtcttgtgatgtatttgtcagttatcatctagatcgatcacaactgatgagttttcatatagccttgaatcattcgcagtgtttaatgtggattacttaatggtgttttgaatgtatgcaggcagtaatcaagaggttcattgtgaaccactagaagttattcgtgaaagacactccacagaaccaaacatcaatgctgcagctattctaccatcaagacctgtgagcaatacatttaacctgcttctggaaggtgacatgaatccaagtcatggcaatgggcttgctgaaatagagaacataatcaaccagagatatttttctagggatgagacactacgtcttatagagatcatgcggtcaaggacttctgattttactgttgaagaccagagacctccagtatctactgcaaaaggttttgaaacaaaattttttacacctgccaaactgatcgaggctcagccatcttggaggactgatatcgttccatcatccaatgtgcatgatattggttcttcgccagttgaaattgccaaagcttttatggaagcgcagacctcagcttctgtacacgagtccaaaaagcggaaattcagagctttgagtcatggagttgcggttgacaattcgacatcagaagttttccctacaataactactgattcttctgtaagatggcctgactcagttgttcaaggtggtcccaattatcttacaccacaaagtaataaaggaaggactctgtctcagcctctttctcgcacaccatacaatagctcagttattcgaagatatattaagaacagcaggcatggtgatatgcacaataatggacagacacaatttcccactccattttctattggaaagaatactagaggatacacatgtatcagcaagtggtggtatagcgcagccatcatcttccaggggacagatagatgtttttggttctattctaagagaaggtgtagacaatatctcaagggttgcttcagtatctgttcatcccaagtcaagcgaaacagcattcaaaatacttaagcaacttgacagaactattccttcccctacatcaaagccactagggctgagacagacattagccaagaaaaatactttttctgttgctacctacagacagattaaagagcctgatatcattatcggtaatgataataaacagagcagcattaatgagagtggtagtgctagctcggagactacatatggaaaaaaggttcagcaacctcaaagcagtcctatttcaggagagtcaagtgaaaaagtccagagaagcggagctaactcagatgtttatgaagcaggcacttctcagcgtcctctgaaatcaaatctaacacccacttcagtcgccgaggtcttggataataacaacaccagcaaaggtttcagcttcacatttcctattcctaaagctccaagctctctacttgaaccgcctcctacaccaaccatggcctcgccaccaaggaccttgccaatcactaacgaggatgttcccaagttcacctttggctcatccagcatggccaacaaactcgttttctccttcaactccacaagcagttctcctggtgctggtggaacagacccaaccttcaaatttggatctgataataagcgagagcttgtgttttgatacagtttttttttgatagacaccatgcccgcggatctgaactgtaccactctatctattcttggtgtaagacgtcttaagagagttggagtgtgctacttgagctacacaacatgacattcttttcattcattagcatattcaaacattacatattttagacgtcctgcgttggcaggacatttcccccagtgctttgcacccgtggctgtgtcattgggcatcagttcgtttagcctattatttggaagcttttcatagctgaatggagttccattgccctttcgg

SEQ ID NO: 219968 - DNA, 2920 bp, Zea Mays
ggcagtaatcaagaggttcattgtgaaccactagaagttattcgtgaaagacactccacagaaccaaacatcaatgctgcagctattctaccatcaagacctgtgagcaatacatttaacctgcttctggaaggtgacatgaatccaagtcatggcaatgggcttgctgaaatagagaacataatcaaccagagatatttttctaggcaggtttttctgtaccttctgagtttttgacctttgtgtaatattatttgagttcattgaaagataggcttggcacagtggtgagaaaccttctcactgagccaaaggtcttgggttcgatgagcctctttgcaaaaatgcagggttaaggcttgcctcggttattccttccctagaccccactcatgtgggagtcactaactctggatctatctttttttattgaagttgttttttttatcttttgaaaggtagagtaaaaaactttgtattttccctttgactgtttaatttgttatccaaatacaccctctgattgaaattgtaaattagtttattatatgttggtaaaattatataaaatagtcacgtagactaaaaacataaaattgatactactagaaccatgattaaaaggacttctgcaatatatatttcttttatctgaaataatataatgccttagaaattattagtcaaagtgttgttagagttagagatcagattaatgccctaagcttacctttccctagaaagtaaaacccctggcaggaaaagtagggcacaatgggtcagtgggaattggattttaatgactaattgttgacacatgtgttcttatcaaaggatgttacatgcaaaattcatatcatgcccattgcttatttatattattttacttctttccaattgactgccataactggaatcatcacacatcatgtggacttgtggagaaagatttctgtctatattggacatcagttgtggtttcccagtgtttcttgagtttattgtgcgtttaggcttggaacttcagatgcctgtgaacctttttgattttatacagggatgagacactacgtcttatagagatcatgcggtcaaggacttctgattttactgttgaagaccagagacctccagtatctactgcaaaaggttttgaaacaaaattttttacacctgccaaactgatcgaggctcagccatcttggaggactgatatcgttccatcatccaatgtgcatgatattggttcttcgccagttgaaattgccaaagcttttatggaagcgcagacctcagcttctgtacacgagtccaaaaagcggaaattcagagctttgagtcatggagttgcggttgacaattcgacatcagaagttttccctacaataactactgattcttctgtaagatggcctgactcagttgttcaaggtggtcccaattatcttacaccacaaagtaataaaggaaggactctgtctcagcctctttctcgcacaccatacaatagctcagttattcgaagatatattaaggttgcatgttgactttcttgcaattgatttctattctaagctatgcaatgtttcttatttgtcatcagctgtgtactagcattcaaatatcacctttgggagctaaaatgtttcatgcttatttggtctgttgctactacagaacagcaggcatggtgatatgcacaataatggacagacacaatttcccactccattttctattggaaagaatactagaggatacacatgtatcagcaagtggtggtatagcgcagccatcatcttccaggggacagatagatgtttttggttctattctaagagaaggttcgactgcaataaacaatgttgcattcaacctgcaagagtcagatggtaaaagcatgacagaaagcagaacaacttttggacgtgcttcaggtgtagacaatatctcaagggttgcttcagtatctgttcatcccaagtcaagcgaaacagcattcaaaatacttaagcaacttgacagaactattccttcccctacatcaaagccactagggctgagacagacattagccaagaaaaatactttttctgttgctacctacagacagattaaagagcctgatatcattatcggtaatgataataaacagagcagcattaatgagagtggtagtgctagctcggagactacatatggaaaaaaggttcagcaacctcaaagcagtcctatttcaggagagtcaagtgaaaaagtccagagaagcggagctaactcagatgtttatgaagcaggcacttctcagcgtcctctgaaatcaaatctaacacccacttcagtcgccgaggtcttggataataacaacaccagcaaaggtttcagcttcacatttcctattcctaaagctccaagctctctacttgaaccgcctcctacaccaaccatggcctcgccaccaaggaccttgccaatcactaacgaggatgttcccaagttcacctttggctcatccagcatggccaacaaactcgttttctccttcaactccacaagcagttctcctggtgctggtggaacagacccaaccttcaaatttggatctgataataagcgagagcttgtgttttgatacagtttttttttgatagacaccatgcccgcggatctgaactgtaccactctatctattcttggtgtaagacgtcttaagagagttggagtgtgctacttgagctacacaacatgacattcttttcattcattagcatattcaaacattacatattttagacgtcctgcgttggcaggacatttcccccagtgctttgcacccgtggctgtgtcattgggcatcagttcgtttagcctattatttggaagcttttcatagctgaatggagttccattgccctttcgg

SEQ ID NO: 219969 - DNA, 1105 bp, Zea Mays
gcaggcacaagaaacaaaaccgcgcctctccccctcgtccgttccgatccccagcggaaagcggagccaggaccgggagctgaagcggttgtcttccccccctcgtctccgtcaactggcacccccacaagccagcaagatggacgggttcgtggaccccttcgtcccggaacaggcatggccgcaggacgccatgttcatcggctcatcctggccatgcgccggcgccggcgccacttccctcgccgaccctgcagggacgtacgcgtacctgggagctcaggctgcaccaggccaaggcgcaggctttcacctccaagacggctcctccacggcgctcgtgccgcccttggagctgcaccagcagttcctgagcgcgcacctgccgggcgacgacgtgaccgtgacccaggaggagggcctcggcttcgaggtgaacagcgcgctggtggccggcatgctgggcccggtcctgagcgcgccctgcgcggtatcgctcgccgacagcgcgccggtggtgtgcagctcctccaacgacagcagcggcgggagcgagcagtccggcctgccgccgccgccgcggttcctagtcctgggagagcagcccgcgtcgtggccttccgcgttcccgcggatctcgtcgctggccggggaagagacttcgcggagcttcggtttcggcgcggttagcgacaacgatctcgtccgtggatcctcctgtgtcgcggacgtgaacaagtatccacagataggcaatgcgcggctacatgtagaggatgacgttgagttcaacactggaaagatgctgtcgttcgctcctggccttgactttggcgatctgcagctcagccaaaaggaactcagcggtctgcgtcacctgaactctgggcagcagctctcgtcgtttgatgcaacgcgtaatcctgaacagtcgtctaacgaggccagcggcggcggaactgggttgaatgcgccgccgttcatggttccggccaatggggctgctgggaatggagctcctaagccgcgcgtcagggctcgccggggccaggcaactgatccacacagcattgcggagaggtgtgctctgttggtcatgtgtctg

SEQ ID NO: 219970 - DNA, 1574 bp, Zea Mays
acggaaaatccaatcagggaaaaaatccatttccctttcttctgaagtcgtcctcttcttcccgtcgcttcgccgtgccgcacctgcgaggagaggagacttcgccgcgaagctcaccatgatctcgccggagaggagctcgtcacagagccagcggtcggcggcggcgggggcgccgttcctgtcgatctccgtcacggatcccgtaaagatgggtaccggcgtgcagtcctacatctcctaccgcgtcatcaccaagaccaacctccctgaatttgagggaccagagaaaattgttattcggcgctatagtgattttgaatggttgcatgatcggcttgctgagaggtacaaaggcatttttataccccctcttccggagaagaatgctgttgagaaattccggtttagcaaggagttcattgaattgcggcgtcaagctctggatttattcgttaacaggatagcttcacaccctgaactcaagcaaagtgatgtcttgaggacatttttgcaagcagatgaagagataatggatagggcaagatcttatgagactggtatttttaagaaaccggcagatttcatacagatgtttaagtcaaaagtcagtgatgttgttctgggaaaagaaaagcctgtggaggaatctactcctgaatatgagaagcttaaaaattacatatttgagctagaaaatcatttagcagaggcccaaaaacaagcataccgtcttgtgaaaagacacagagaacttggtcaatctttggcggactttggaaaggcgattaagcatttaggtgcttgtgaaggagatttgatggaaaaggtgttttctgaagttggttcgaagtcagagatgttgtcaataaagctgcaaagagaggcagacaaccttctctttaactttgaagaacccttgaaagattatgtgcgtgctgtacaatctataaaagccactatgcttgatcgagccaatgctttcaggcagcacttcgatttggatcaggagaggaagtataaagagcttaatcttgaaaaattgaagttcatgaaccctgaaaagtatgccgaagcagaatctgagtttcgagagttgaaagcagacagtgaggaggctactaagaagtttgaacacatagttagactaatgaatgaagagcttgctcgtttccaggagcaaaagacagctgatattggactcgcattccatgaatttgccaagggtcaggctaagctagctaaagacattgcggatgcatggcgcagcgtcctcccaaagctcgaagcttgttccacatcataaatgtgatttgtgtttcctcatgatgtttgggaatgggatagggggttggcagctggtgagtttaggctgttttttcccagcctgttttgacactgattactgtatacttgaactgcggtttggaaatgctccagctgttaggttcagttgacgtcatttcttgctgtttgagcttttaaccgtcttcttttcttagatcaactgaaatagctactggaatctcgtgatattgataatcaatgatgtaccatgatgctacttcctggaa

SEQ ID NO: 219971 - DNA, 1500 bp, Zea Mays
caaaaatacccacggaaaatccaatcagggaaaaaatccatttccctttcttctgaagtcgtcctcttcttcccgtcgcttcgccgtgccgcacctgcgaggagaggagacttcgccgcgaagctcaccatgatctcgccggagaggagctcgtcacagagccagcggtcggcggcggcgggggcgccgttcctgtcgatctccgtcacggatcccgtaaagatgggtaccggcgtgcagtcctacatctcctaccgcgtcatcaccaagaccaacctccctgaatttgagggaccagagaaaattgttattcggcgctatagtgattttgaatggttgcatgatcggcttgctgagaggtacaaaggcatttttataccccctcttccggagaagaatgctgttgagaaattccggtttagcaaggagttcattgaattgcggcgtcaagctctggatttattcgttaacaggatagcttcacaccctgaactcaagcaaagtgatgtcttgaggacatttttgcaagcagatgaagagataatggatagggcaagatcttatgagactggtatttttaagaaaccggcagatttcatacagatgtttaagtcaaaagtcagtgatgttgttctgggaaaagaaaagcctgtggaggaatctactcctgaatatgagaagcttaaaaattacatatttgagctagaaaatcatttagcagaggcccaaaaacaagcataccgtcttgtgaaaagacacagagaacttggtcaatctttggcggactttggaaaggcgattaagcatttaggtgcttgtgaaggagatttgatggaaaaggtgttttctgaagttggttcgaagtcagagatgttgtcaataaagctgcaaagagagacaaccttctctttaactttgaagaacccttgaaagattatgtgcgtgctgtacaatctataaaagccactatgcttgatcgagccaatgctttcaggcagcacttcgatttggatcaggagaggaagtataaagagcttaatcttgaaaaattgaagttcatgaaccctgaaaagtatgccgaagcagaatctgagtttcgagaggagcaaaagacagctgatattggactcgcattccatgaatttgccaagggtcaggctaagctagctaaagacattgcggatgcatggcgcagcgtcctcccaaagctcgaagcttgttccacatcataaatgtgatttgtgtttcctcatgatgtttgggaatgggatagggggttggcagctggtgagtttaggctgttttttcccagcctgttttgacactgattactgtatacttgaactgcggtttggaaatgctccagctgttaggttcagttgacgtcatttcttgctgtttgagcttttaaccgtcttcttttcttagatcaactgaaatagctactggaatctcgtgatattgataatcaatgatgtaccatgatgctacttcctggaa

SEQ ID NO: 219972 - DNA, 2182 bp, Zea Mays
ccgctgtctgctctatccaccacccccgcccacatcaccagagcacccgaggcttgtcttccttcctctcacatccgtacatagaaaaaaaaagaagaaatagggataccggagccgaactccggcggaccatctggtattctggtctggcactctggcgtgagaaaaggaaactgaattgaagcacaggtgtgctcagaatatgcagtcatctgcgatggcgttcttccctagcgttgccacggcgaagctggagctgaactctctgtacaggaagtacgtggacatgttcggtgtatcatcaaacaactctaccgttggctctcacaccatccacaagatgtcgcaccttcctgtcctgctggtcgatcgtacattcttcagcaccggtactgctattcagagcattgccatcagctatggagctcttattcgtaggtggttactgggcggaacttctgttgcacagcacgcgatgatatcccgtgctgctatgaactcgcttccttgctgtgccttcctgccattctttgccagcgttggtgctctaatgaccaagctctgtggctgcactatgattccagaccgtttttctggttggcaatctgtccttggccaaagtgctaacctccgtggagaaccagttctggtcgtggacaataatgagctgggcaatgatcagacattatcgagctttcttgggcgcaagcgagattacgtcggtctcggtctagcgcttcagtgcatctgttaccctgcatgtctgaaggttgctgagttcccccagaagaatctcagcttcagcaggcagtggatgcgaagtggccatgacacgagcgcaatctggagggccatggcgaggaatgagcaatacctggcattcgtcgtagtcctggcggccttgcagctcttcctgcggctagcccgggtgaacgtcaccatcctgttcctgccaatgctgtcccaggccgtgagttccaggagcagcccagcggtgatcggcaacgttctgctggttctggtgacctcctgcggagttcttggatctgcactctcagtgaaacagttcggccgggaggtgacgttcgctatcggtgccatcgtgatggtaatttgccaggtcgcgattccactgatcatggaagtccagatcggggttggcggaggaacgcgcatgccggtgggttacacggccgcgacgttcgccctgacgtgcgtcgtgtcctgcggcctcagctggtcgtggggctcgttcttctggaccttacctggcaggaaggttcactcggccggacacgttctggccgtggctctgaacctgggcgtctgcttcgcccagatgcggtacttcctgctgatgctgtgcaggctgaagaacgccacccttgcgtactatgcgctgtggatctggtcgtgattgggattcagctgagggagaatgcgtagctagatgagtgcgtgttaactctggttacttgagtaggaggctagtttggtggatgtaaatacttctcttggcttggcttgtacagagttctggcgctatttctgatggctccgtagatagcaactgtagggcttggttgcacttcctatgctaatggctgttctactaactgtgtggcgctcaataaagctgttatggttggcatggtcgctacagggttatcaattaagcggatatgtggctgaccaatcggacactttcaaattcagggatgggatataattttttttctcccacgggtaattttttatgtctaaggtttgttattcaattcgaggcaatccaaacatgaccgccacggccggatggtatttcgacgtgggccataggaaacgccggcgtgaagaagcgcttccagtaccagtaccagtgctttgacccatatgataatatggagggcaatagtgctagtataggtgaaaccaccgaaaaaagtattttacaagtacgagggcaattgtcagtcttgcaaactttagaatttccctgtttcatatcatatgcgcacacagaattactacgcctggtgaagcgagtggtggaggatcacctatacattgccccctccgcttttgttgcaaggaggaaacaatgcataaaacaatttatgcaaattcttttcttatctgtaataatgtgcttgataaaagattgacatcaaatttcatacatata

SEQ ID NO: 219973 - DNA, 1670 bp, Zea Mays
cgaaacccgcttgctcgcctccgctgtctgctctatccaccacccccgcccacatcaccagagcacccgaggcttgtcttccttcctctcacatccgtacatagaaaaaaaaagaagaaatagggataccggagccgaactccggcggaccatctggtattctggtctggcactctggcgtgagaaaaggaaactgaattgaagcacaggtgtgctcagaatatgcagtcatctgcgatggcgttcttccctagcgttgccacggcgaagctggagctgaactctctgtacaggaagtacgtggacatgttcggtgtatcatcaaacaactctaccgttggctctcacaccatccacaagatgtcgcaccttcctgtcctgctggtcgatcgtacattcttcagcaccggtactgctattcagagcattgccatcagctatggagctcttattcgtaggtggttactgggcggaacttctgttgcacagaccgtttttctggttggcaatctgtccttggccaaagtgctaacctccgtggagaaccagttctggtcgtggacaataatgagctgggcaatgatcagacattatcgagctttcttgggcgcaagcgagattacgtcggtctcggtctagcgcttcagtgcatctgttaccctgcatgtctgaaggttgctgagttcccccagaagaatctcagcttcagcaggcagtggatgcgaagtggccatgacacgagcgcaatctggagggccatggcgaggaatgagcaatacctggcattcgtcgtagtcctggcggccttgcagctcttcctgcggctagcccgggtgaacgtcaccatcctgttcctgccaatgctgtcccaggccgtgagttccaggagcagcccagcggtgatcggcaacgttctgctggttctggtgacctcctgcggagttcttggatctgcactctcagtgaaacagttcggccgggaggtgacgttcgctatcggtgccatcgtgatggtaatttgccaggtcgcgattccactgatcatggaagtccagatcggggttggcggaggaacgcgcatgccggtgggttacacggccgcgacgttcgccctgacgtgcgtcgtgtcctgcggcctcagctggtcgtggggctcgttcttctggaccttacctggcaggaaggttcactcggccggacacgttctggccgtggctctgaacctgggcgtctgcttcgcccagatgcggtacttcctgctgatgctgtgcaggctgaagaacgccacccttgcgtactatgcgctgtggatctggtcgtgattgggattcagctgagggagaatgcgtagctagatgagtgcgtgttaactctggttacttgagtaggaggctagtttggtggatgtaaatacttctcttggcttggcttgtacagagttctggcgctatttctgatggctccgtagatagcaactgtagggcttggttgcacttcctatgctaatggctgttctactaactgtgtggcgctcaataaagctgttatggttggcatggtcgctacagggttatcaattaagcggatatgtggctgaccaatcggacactttcaaattcagggatgggatataattttttttctcccacgggtaattttttatgtctaag

SEQ ID NO: 219974 - DNA, 1853 bp, Zea Mays
catcgaaacccgcttgctcgcctccgctgtctgctctatccaccacccccgcccacatcaccagagcacccgaggcttgtcttccttcctctcacatccgtacatagaaaaaaaaagaagaaatagggataccggagccgaactccggcggaccatctggtattctggtctggcactctggcgtgagaaaaggaaactgaattgaagcacagatcgatcgagagaggcgaacggcagtcggcaggcgagaaagaagtgctgacgcctcgtttccgtcgtgtgctcagaatatgcagtcatctgcgatggcgttcttccctagcgttgccacggcgaagctggagctgaactctctgtacaggaagtacgtggacatgttcggtgtatcatcaaacaactctaccgttggctctcacaccatccacaagatgtcgcaccttcctgtcctgctggtcgatcgtacattcttcagcaccggtactgctattcagagcattgccatcagctatggagctcttattcgtaggtggttactgggcggaacttctgttgcacagcacgcgatgatatcccgtgctgctatgaactcgcttccttgctgtgccttcctgccattctttgccagcgttggtgctctaatgaccaagctctgtggctgcactatgattccagaccgtttttctggttggcaatctgtccttggccaaagtgctaacctccgtggagaaccagttctggtcgtggacaataatgagctgggcaatgatcagacattatcgagctttcttgggcgcaagcgagattacgtcggtctcggtctagcgcttcagtgcatctgttaccctgcatgtctgaaggttgctgagttcccccagaagaatctcagcttcagcaggcagtggatgcgaagtggccatgacacgagcgcaatctggagggccatggcgaggaatgagcaatacctggcattcgtcgtagtcctggcggccttgcagctcttcctgcggctagcccgggtgaacgtcaccatcctgttcctgccaatgctgtcccaggccgtgagttccaggagcagcccagcggtgatcggcaacgttctgctggttctggtgacctcctgcggagttcttggatctgcactctcagtgaaacagttcggccgggaggtgacgttcgctatcggtgccatcgtgatggtaatttgccaggtcgcgattccactgatcatggaagtccagatcggggttggcggaggaacgcgcatgccggtgggttacacggccgcgacgttcgccctgacgtgcgtcgtgtcctgcggcctcagctggtcgtggggctcgttcttctggaccttacctggcaggaaggttcactcggccggacacgttctggccgtggctctgaacctgggcgtctgcttcgcccagatgcggtacttcctgctgatgctgtgcaggctgaagaacgccacccttgcgtactatgcgctgtggatctggtcgtgattgggattcagctgagggagaatgcgtagctagatgagtgcgtgttaactctggttacttgagtaggaggctagtttggtggatgtaaatacttctcttggcttggcttgtacagagttctggcgctatttctgatggctccgtagatagcaactgtagggcttggttgcacttcctatgctaatggctgttctactaactgtgtggcgctcaataaagctgttatggttggcatggtcgctacagggttatcaattaagcggatatgtggctgaccaatcggacactttcaaattcagggatgggatataattttttttctcccacgggtaattttttatgtctaag

SEQ ID NO: 219975 - DNA, 648 bp, Zea Mays
ctcgaggccgtcgacgccgccgcggccgacgaggtcatggacgccggctgcgtcacgggggaccgcgtcaacggcatcgttgacggcgtttctggctcctggtacatcaagtttgatacgtttactcctgcagctgagcgggggctcccggtcacaagggtcattagccgcatgacgctgcaacagatccttgctcgagcagttggcgatgacgctatattgaatggaagccatgtagtcgattttacagatgatggcagtaaggttactgccatattggaggacggtaggatatttgaaggtgaccttttggttggtgccgatggaatatggtcaaaggtgaggaagacactattcgggcactcagatgccacctattcaggttacacctgctacactggaattgcagattttgtgccgcctgatatcgatacggttgggtaccgggtatttctgggccacaaacagtacttcgtctcttcggatgtcggtgccggtaaaatgcaatggtatgcttttcacaaggaagaggctggtggcactgaccctgagaacggtgagtgcttagagaagttttcaagcttaactagtgaaataggcactgcctcattgtaagttgtgatgaaaaatgagaacaaaacttctcac

SEQ ID NO: 219976 - DNA, 487 bp, Zea Mays
acatcaagtttgatacgtttactcctgcagctgagcgggggctcccggtcacaagggtcattagccgcatgacgctgcaacagatccttgctcgagcagttggcgatgacgctatattgaatggaagccatgtagtcgattttacagatgatggcagtaaggttactgccatattggaggacggtaggatatttgaaggtgaccttttggttggtgccgatggaatatggtcaaaggtgaggaagacactattcgggcactcagatgccacctattcaggtaccgggtatttctgggccacaaacagtacttcgtctcttcggatgtcggtgccggtaaaatgcaatggtatgcttttcacaaggaagaggctggtggcactgaccctgagaacggtgagtgcttagagaagttttcaagcttaactagtgaaataggcactgcctcattgtaagttgtgatgaaaaatgagaacaaaacttctcac

SEQ ID NO: 219977 - DNA, 3582 bp, Zea Mays
ctccacaaggcagcaatgatatgacatccctcgtgccattcgggcccgctcgccagtcacccgcgtctgagagaggagagaggagagagagagaccacctcctccgcttccgctctcctctctttctgactcttgactcgaccgctcctgttcgccgctccgccatcgccggcgaccactccggcgacgctgcgtctccggcgaccccaccgacgcctgtcccagcgaccccattcctccgatccccgcctcacgccctgcgctctcccggctagggttcgtgctcctgcccggatccaccccgcctcctcgcgcccccgttcgcgcgcgccgatcggcaggctgcgggccgccgccgctgcgcgagctagcgggcgtcggatccatcgatccgcgcggcctccgcggccgtcatggacgacttcgagggcctgctggcccgcgacttcggcctccgcccgcaggggaaggccgcgcccatgtcggccgcccgctcctcggggccctccggatctgcctgggccaataccagatccgccgccgccccctcctacgacgagctcttcgggtccgccccgccactgcccaaggccacgccgtcgccgtcgccgtcgctcgaccacatcttcgactcgttcaaggagcccgcttccaccgcgccgccgcctaagccgaagcactcgtccatgccggtgttcgacaagccggtctacgacgacgacatctttgtcggggtccctggggtcaagagctcctcggcgcgctacgacgatgtgttcgggggaagccatagccgcgaggcgcctccagcgttcgatgacctgctcggtggatttggtaagagctcacaggtgagggaagaggtggatgacaagaggaaacaagaggcagctatggggccagcggcgggtactgggtttgattatttgatcccaggctttggcgggaggagctccccgcggcaaagggatactgttggtgcaaaacaacagaagatttccatgtcaacatctaagcaaccagctagcttaagcgacccctttgttgttctcgaaacaacttcatcctcagcccatccattcgcagatcccttggatgaatttggtaaagctgcaaaatatcaagggaaaagccgtgaaagtactaacgttgggagcaatctgtttgaggattcaagcacttccatccaggctccaaaatctgaacctatttttacctcagaggtggacaatggcttgaaagataagaatgagtctagcagagcccgagacgcaaatcctgtacagagtttttctaaaggaaactcctcccaacaaccttctgtagaggattttgaaaatatcttttctaagccgcagtctgccagatatgctgatgtccatgttgacattggctcagataaatatagtgggaatggtataaacgaccagtcacctagatctgatgaatccgaagatgagatatggcttacagcttctgagattcccctcttcacacagccaactagtgccccaccaccttcaaggccaccaccacctcttgcagctaagcaaaaaaaacatggatcaaaatcaaaaagaaaagatgatgaacatctaaagcagtctaggaaaaacaatgatcatcaaagaagttcgtcaaatcatgctggtgtttctacagtagatgaactagaagattttgccatgggtaagcctcagagtgtgcatgctttaaatgcggaagaatttgagagaagtacagcagcagcagcatctgcagctgctatgaaagaggccatggataaagcagaggcaaagttcaaacatgcaaaggaggtacgagagagagagcgtgatgcgaagattagaaatagagaacaacgggaacaagatagtgtaacaaggtcgtatgcccaggatcgtgaggacaaagagagaaaggaaagactagaacaagaaagagagatgaagcaaaatgaggaaaaggaaagagagcaaagaagacttgaagaggaaagagaacttgagcgacataaagaaagagaaagagctaggcaagcagtggagagggctacaaaggaggcacgggaaagagcagctgttgaagctcgtgcaaaagcggagagagaggcacgccaacgttcagaacgtgctgctgtgcaaagagcccaacaggaagcacgtgagagggcagcagtggaggctaaagagcgagcagagagggctactgcagaagcaaaggaaagggctgctgctgaaggtaaggaaaaagctgctagtcaagccagggatagggctgcagcagaaagagctgctgtggagagagctcagcaagaagcgaggaagagagctgaacgagcagcagtggaaagggctgctgctgaggctcgggaaagacaggctgctgctgcaagagataaaacgagcaaaccagatgatctagagtccttctttggtatgggtgctcgagctaatagtgctccgaagcaaagggctccgactgtggactctatgtttcattctcaaacgcaaaatagagggagttccacttcgacatcaatgaaaaaggcatcatcaacaacaaatattgctgatgacttgtctgcgatatttggaggagctcctacatcagaagaatttcaagaagtagatggggagagcgaagaaagaagacgcgctaggatggaacggcatcaaagaactcgtgaacgagcggcaaaggctttggctgagaagaatgaacgcgacatgcagcaacaaagagagcaggctgaaagacataggcttgcggaaacactggactttgagattaagcgctgggctgctggaaaagaaggcaatttgcgtgcattgctatcaactttacaatatgttctttggccagaatgtgggtggcaacctgtatccctcactgatttgatcactgctgctgctgttaaaaaagtgtacagaaaagcaacactgtgtatccatcctgacaaggtgcagcaaaagggtgcaaatctccaacagaaatatatcgctgagaaggtttttgatctccttaaggaggcgtggaacaaactcaactctgaagagctcttctaaacagcctcacgactgaacatagggtcgcccctcagggtctgcacaaggtactctcggaagaaactcacaagctggagtggcttgaggttggtcggggggaaccatgaagcgaccaagcgaaacctgagctatgagacatgtggcagctgcccaagctggacctcatccagtaggccagaaggtgtagtatttatcctgggctgtatgcaccgtcagagcgggggttttcttaggccagtgttgtggttatagattaggtacaggttttttttaagcatggagagacgttttactagataatgatgaatgttgcttgtctgatgccattggcatcgtggcaagttcggttgtcttgtttatagtcaatttctggaacatcacttgacctatactctgattcctgttttcttttactcttgtacaaagttgctggtcgattttgattgcttgtattgtaatcatgtttggacgtttacgggttcagtggaatagtttccgggttcgtcattttcat

SEQ ID NO: 219978 - DNA, 1526 bp, Zea Mays
cacaacccaggttgccccggcccgaagaatcctcctccctcagattcgaatccggcccgtgtctctcctcctcttctcttcttctgcgacccgcacgaggcaggcctcttcctctctctttggctctttgctttgctttccccaaaccgtcctctgctctgctcctcccgctcccttcccgaagtcgccgggagccacaagcccacacgcattcccctccctcgcgctctctccccgctccgctgtcaccaaccccgcctgcctatttaccggccgcgtcgcccaccgccgcacgccttcccacccacccccgcgcctgcctgctccccgacaccgggggcgccccccacgacgccccggccccgccacggcggcgacagcaagccgggacatggcgcgcggcggcctcgcccgcctgctcgccacgctcatcctcttcctcctgctcgccacgcccctcgccgccggaccttcactcgccgagtcagaggcggacctcgcgcggggcacgtccgaggcagcgccggacgcgcagcagcacctcctggccgcgcccgctccgccggacgcgcagcagcacctcctgccgcgcccgctcgtcatcgagctcccgtcggcgcgggccggggccgagctcgacgccgacgccgacgccgacgccgtggtaacggtcgacgtgcgctgcgccagctggcggctcgcggccgaggccaacaacctcgcgccgtgggcggcggtgccgcccgaatgcgcgccgcacgtgcgggactacgtcaccggctccgcctaccgctccgacctcgacctcgtggcgcgggagtcggccgcctacgcgcgcgccgccgcgccggccggcgccgccgacggacgcgacgcctgggtgttcgacgtcgacgagacgctgctctccaatctcccatactacgccgagcacggctacggggccgagttgttcgaccaccacaagttcgacgagtgggtggaaaggggcgaggcggccgccatcccttccagcttgaagctctacaacgaggtccgcgggctgggattcaagaccttcctgctcacgggcagaagcgaggcgcaccgaggagtcacggtggagaacctcaacaagcaggggttccatgactgggagaagctcatactcagcaggtgaccgcgagaaaacagcgacagtctacaaatcagagaagagggacgaaatggaacaggagggttacaggatcctaggcaactccggcgaccaatggagcgacctgctgggatcttccatgagcgctcgctctttcaagctccctaacccaatgtactatatcccgtgacagaaagaaactggagaacagggcgggtgaaaggtgctctgcgtttactggatgcacattctaccaggccctcggctgatgatggaaaatgaaaaataattttgcaatggaattaaactgtacaaaatgcttttctccaacttcgtgtagtacacattgcctgtaatgttcgacggtaacgacaacatgcgaataattgac

SEQ ID NO: 219979 - DNA, 3477 bp, Zea Mays
catagcgacgagcgttcttgtgttctgatgacatcttccactcttcctttctgcggcgcacccttctttctccatccacttgtgtactttcgacgtcgtcttcctcagtagcgcccccttctttctccacccgccgtcgacgcagctgccttccagccatctccatatccgtttcgccgtccccttcctcctcatcaggacccgcgcaagtggctcgtcaagcgcgtcgtcgggatgcatgggggctccgtcacctaccttgtcgaccccggcaacaacgactcctcctccagaaccgtcgtggtgagttggtcactactgggctgggcttttgggttcctactgcttgttaggtgctgcctccgtgatccgatttgtgctcaactgattgatgctgagcattgttggtcttaatggagtttcagtagttgtttttagcgacgggcttagggggtgtttgggaacacagttttttacagtattggaacaatactgtggtatttgagaataccatggtataatatacagaaaggtgtttggaaatgtaggtaaaatctctgtatttaaaactaaagtattatcaatactgcagctgtttcaaagtattgtaaactttgctctccaccaaagttttcttctgtaaacaagcttgtgagcgtgcggtaccggcgatggcgtgggaccgagctgggttctgcggacacaatgccgaaaaggctgtcactggtgtacctatcgctcgttccaaacttccaatgctgcacggggctgtatgagtatgacagcttgggtgtacgtacgtgtacccaatggttcagctttcatatgattttagctttattagttgcaataaccaactaccgctagctttagattgtatgatatttgttatctagaaggaagacttcaatttatggaataactcaaccatgcggctgttactaaccttagggaatttagaagataattccaataggggaacagagagcctcacatggtatatactttgttcccaaacacctccatgtattcaaaattgtggtattctaaaactgtggtattgaaaactgagatcatgtcatggcatttgtatactgtggtatttgaaataccatggttttgaaaaactgtgtttccaaacacccccttagtacttgtcagtacattttacatgcttcgaattgagatgcataggaattaggagacgtgcgttttttagtaattggtacctacttgcgcctgagactctagtctaggcaccaaagtcagggaggtgtttctctgagctctgcttcaaaactgtattatctgatgtttgtctgagccacaagtcatgaattttgcctgtagtcaaggatggtgaaggtccaatcatgtgcatatcattggtttcctcttgttatgatgaccaaacttgtatctaatatattgatttgaatatgatgacctctatattgtaagtttctgaatttttgcaacacaggtcatgcatttttcctgtagtcaaggatggtgaaggtccaatcatgtgcatatcattggtttcctcttgttatgatgaagagatctggattcaatacttgatttttcatttgtttttaaatatttgttaactgttatggtgtatgtcaatggaatttgggcattggttgctttgactgtttcttggaatgcagataaactacgcctatgctcgagacaatgaaacactatttgatattattagtgtgaaggtatggagcttatcaggatatccaggaaattttctgcaatttatgtattttggtatcaattatcaatttgccaatcaatcattttcttttgctttcttcgataaacatttattggcaagacagatgaacctctcaattgacaagcgatgcaggataaataatttgtccacaagcatgattgcattatcctaggtgcttatgaaagtttttaccttttcttcaatatgaagtctgaatgtgtggtgtggcttgtctgatctatctagcaggtttagtggtactcgcatcagctaaaccttaaacttgttttcttcttaatgcctccgtgatcggtttaagttctttcgttgcggagatggcagcggcggcggggccgtacaaagagatgctggaagtggtgaacgcgtgcgcgacccggatccggtggcgcctcagtccagcttccaagcgccgcctcctcaacggtcagtgcccactcgcttgctgctttctcttagtagttgtagtcgttttttaacgggaaatacaacagggaagccaccagcccaccactatgtaggattttattaattgaaaaatagtgttgtagttgttattatctctatttaggacttgttgttggcaattgtcctatttcttgcttaattcgctaccgccatgctgtctttctgttctactgctaaaacacttattttttgtggtcgttgaatgaattgttaaccaaactcaattgcagaagacattcatccactaatcgtcacatgatccaccttagttcataagtttataccaccgtagttataggtcacttggtcagtagctgcaacttgcaagtgatttagggtttaataaaaaatttctggtagtaaagttgaaaggtatggtttgaggagagtgaatggtatcatgtcgaattacagtacattacaatttacaagtaaattgattagtcctctggtcttttgattggtagcatgtttttcctatgtaattgcctctgttcttctttaggggctaggttcgttgtaatcatttgaccgtggggatgtttgtactaaattcttatttctcttaaggaaaatcatgctaatgcacgaccacgaagaaaaagtaaattcatgaacaaatctacctaacttatgatttctgttggattttaactctagtctacctctttgaaattaaaaggttgtgctgtggttgttgatgaacaaacccagttgttgccaaatatcctgtttctctgcactaggttgcgtcctgtggtactggtcgactatggtggcacaatgcctcagctacaagaaaatctttgtggcctgctatatcttgcccgacagttcaagctctacaaggttaggtctgttcagtttggctagaaaggcatcccctacctgaacacctacgacgaccgcaccatccgctaccccgaccctctcatcaaggccaacgacaccatcaagatcgatctggagaccaacaagatcatggacttcatcaagttgtatttgccctttcatggacttcatcaagttatatacttagttaggctcaatgttagcacaaacagttgatgagcaagtttaaatttagagtacacttatgtatgagttatttgacaatgcttatttatgagatattgaatattatttatctatattatattaattatagtgttattaaatatatgtgtatgtatttttctcttttaaattattataatgtgataatttaagaatatact

SEQ ID NO: 219980 - DNA, 2531 bp, Zea Mays
gcgttcttgtgttctgatgacatcttccactcttcctttctgcggcgcacccttctttctccatccacttgtgtactttcgacgtcgtcttcctcagtagcgcccccttctttctccacccgccgtcgacgcagctgccttccagccatctccatatccgtttcgccgtccccttcctcctcatcaggacccgcgcaagtggctcgtcaagcgcgtcgtcgggatgcatgggggctccgtcacctaccttgtcgaccccggcaacaacgactcctcctccagaaccgtcgtggtgagttggtcactactgggctgggcttttgggttcctactgcttgttaggtgctgcctccgtgatccgatttgtgctcaactgattgatgctgagcattgttggtcttaatggagtttcagtagttgtttttagcgacgggcttagggggtgtttgggaacacagttttttacagtattggaacaatactgtggtatttgagaataccatggtataatatacagaaaggtgtttggaaatgtaggtaaaatctctgtatttaaaactaaagtattatcaatactgcagctgtttcaaagtattgtaaactttgctctccaccaaagttttcttctgtaaacaagcttgtgagcgtgcggtaccggcgatggcgtgggaccgagctgggttctgcggacacaatgccgaaaaggctgtcactggtgtacctatcgctcgttccaaacttccaatgctgcacggggctgtatgagtatgacagcttgggtgtacgtacgtgtacccaatggttcagctttcatatgattttagctttattagttgcaataaccaactaccgctagctttagattgtatgatatttgttatctagaaggaagacttcaatttatggaataactcaaccatgcggctgttactaaccttagggaatttagaagataattccaataggggaacagagagcctcacatggtatatactttgttcccaaacacctccatgtattcaaaattgtggtattctaaaactgtggtattgaaaactgagatcatgtcatggcatttgtatactgtggtatttgaaataccatggttttgaaaaactgtgtttccaaacacccccttagtacttgtcagtacattttacatgcttcgaattgagatgcataggaattaggagacgtgcgttttttagtaattggtacctacttgcgcctgagactctagtctaggcaccaaagtcagggaggtgtttctctgagctctgcttcaaaactgtattatctgatgtttgtctgagccacaagtcatgaattttgcctgtagtcaaggatggtgaaggtccaatcatgtgcatatcattggtttcctcttgttatgatgaccaaacttgtatctaatatattgatttgaatatgatgacctctatattgtaagtttctgaatttttgcaacacaggtcatgcatttttcctgtagtcaaggatggtgaaggtccaatcatgtgcatatcattggtttcctcttgttatgatgaagagatctggattcaatacttgatttttcatttgtttttaaatatttgttaactgttatggtgtatgtcaatggaatttgggcattggttgctttgactgtttcttggaatgcagataaactacgcctatgctcgagacaatgaaacactatttgatattattagtgtgaaggtatggagcttatcaggatatccaggaaattttctgcaatttatgtattttggtatcaattatcaatttgccaatcaatcattttcttttgctttcttcgataaacatttattggcaagacagatgaacctctcaattgacaagcgatgcaggataaataatttgtccacaagcatgattgcattatcctagttctttcgttgcggagatggcagcggcggcggggccgtacaaagagatgctggaagtggtgaacgcgtgcgcgacccggatccggtggcgcctcagtccagcttccaagcgccgcctcctcaacggttgcgtcctgtggtactggtcgactatggtggcacaatgcctcagctacaagaaaatctttgtggcctgctatatcttgcccgacagttcaagctctacaaggttaggtctgttcagtttggctagaaaggcatcccctacctgaacacctacgacgaccgcaccatccgctaccccgaccctctcatcaaggccaacgacaccatcaagatcgatctggagaccaacaagatcatggacttcatcaagttgtatttgccctttcatggacttcatcaagttatatacttagttaggctcaatgttagcacaaacagttgatgagcaagtttaaatttagagtacacttatgtatgagttatttgacaatgcttatttatgagatattgaatattatttatctatattatattaattatagtgttattaaatatatgtgtatgtatttttctcttttaaattattataatgtgataatttaagaatatact

SEQ ID NO: 219981 - DNA, 1021 bp, Zea Mays
gttcttgtgttctgatgacatcttccactcttcctttctgcggcgcacccttctttctccatccacttgtgtactttcgacgtcgtcttcctcagtagcgcccccttctttctccacccgccgtcgacgcagctgccttccagccatctccatatccgtttcgccgtccccttcctcctcatcagtggctcgtcaagcgcgtcgtcgggatgcatgggggctccgtcacctaccttgtcgaccccggcaacaacgactcctcctccagaaccgtcgtgataaactacgcctatgctcgagacaatgaaacactatttgatattattagtgtgaagatgaacctctcaattgacaagcgatgcaggataaataatttgtccacaagcatgattgcattatcctagttctttcgttgcggagatggcagcggcggcggggccgtacaaagagatgctggaagtggtgaacgcgtgcgcgacccggatccggtggcgcctcagtccagcttccaagcgccgcctcctcaacggttgcgtcctgtggtactggtcgactatggtggcacaatgcctcagctacaagaaaatctttgtggcctgctatatcttgcccgacagttcaagctctacaaggttaggtctgttcagtttggctagaaaggcatcccctacctgaacacctacgacgaccgcaccatccgctaccccgaccctctcatcaaggccaacgacaccatcaagatcgatctggagaccaacaagatcatggacttcatcaagttgtatttgccctttcatggacttcatcaagttatatacttagttaggctcaatgttagcacaaacagttgatgagcaagtttaaatttagagtacacttatgtatgagttatttgacaatgcttatttatgagatattgaatattatttatctatattatattaattatagtgttattaaatatatgtgtatgtatttttctcttttaaattattataatgtgataatttaagaatatact

SEQ ID NO: 219982 - DNA, 1994 bp, Zea Mays
gttctgatgacatcttccactcttcctttctgcggcgcacccttctttctccatccacttgtgtactttcgacgtcgtcttcctcagtagcgcccccttctttctccacccgccgtcgacgcagctgccttccagccatctccatatccgtttcgccgtccccttcctcctcatcagtggctcgtcaagcgcgtcgtcgggatgcatgggggctccgtcacctaccttgtcgaccccggcaacaacgactcctcctccagaaccgtcgtggtcatgcatttttcctgtagtcaaggatggtgaaggtccaatcatgtgcatatcattggtttcctcttgttatgatgaagagatctggattcaatacttgatttttcatttgtttttaaatatttgttaactgttatggtgtatgtcaatggaatttgggcattggttgctttgactgtttcttggaatgcagataaactacgcctatgctcgagacaatgaaacactatttgatattattagtgtgaagatgaacctctcaattgacaagcgatgcaggataaataatttgtccacaagcatgattgcattatcctagttctttcgttgcggagatggcagcggcggcggggccgtacaaagagatgctggaagtggtgaacgcgtgcgcgacccggatccggtggcgcctcagtccagcttccaagcgccgcctcctcaacggtcagtgcccactcgcttgctgctttctcttagtagttgtagtcgttttttaacgggaaatacaacagggaagccaccagcccaccactatgtaggattttattaattgaaaaatagtgttgtagttgttattatctctatttaggacttgttgttggcaattgtcctatttcttgcttaattcgctaccgccatgctgtctttctgttctactgctaaaacacttattttttgtggtcgttgaatgaattgttaaccaaactcaattgcagaagacattcatccactaatcgtcacatgatccaccttagttcataagtttataccaccgtagttataggtcacttggtcagtagctgcaacttgcaagtgatttagggtttaataaaaaatttctggtagtaaagttgaaaggtatggtttgaggagagtgaatggtatcatgtcgaattacagtacattacaatttacaagtaaattgattagtcctctggtcttttgattggtagcatgtttttcctatgtaattgcctctgttcttctttaggggctaggttcgttgtaatcatttgaccgtggggatgtttgtactaaattcttatttctcttaaggaaaatcatgctaatgcacgaccacgaagaaaaagtaaattcatgaacaaatctacctaacttatgatttctgttggattttaactctagtctacctctttgaaattaaaaggttgtgctgtggttgttgatgaacaaacccagttgttgccaaatatcctgtttctctgcactaggttgcgtcctgtggtactggtcgactatggtggcacaatgcctcagctacaagaaaatctttgtggcctgctatatcttgcccgacagttcaagctctacaaggttaggtctgttcagtttggctagaaaggcatcccctacctgaacacctacgacgaccgcaccatccgctaccccgaccctctcatcaaggccaacgacaccatcaagatcgatctggagaccaacaagatcatggacttcatcaagttgtatttgccctttcatggacttcatcaagttatatacttagttaggctcaatgttagcacaaacagttgatgagcaagtttaaatttagagtacacttatgtatgagttatttgacaatgcttatttatgagatattgaatattatttatctatattatattaattatagtgttattaaatatatgtgtatgtatttttctcttttaaattattataatgtgataatttaagaatatact

SEQ ID NO: 219983 - DNA, 1787 bp, Zea Mays
ttccactcttcctttctgcggcgcacccttctttctccatccacttgtgtactttcgacgtcgtcttcctcagtagcgcccccttctttctccacccgccgtcgacgcagctgccttccagccatctccatatccgtttcgccgtccccttcctcctcatcaggtaaacctaattcccttcctctctccccatcaattcgcccctaacctaattcgtgctgatgatctcccccgaggacccgcgcaagtggctcgtcaagcgcgtcgtcgggatgcatgggggctccgtcacctaccttgtcgaccccggcaacaacgactcctcctccagaaccgtcgtgataaactacgcctatgctcgagacaatgaaacactatttgatattattagtgtgaagatggcagcggcggcggggccgtacaaagagatgctggaagtggtgaacgcgtgcgcgacccggatccggtggcgcctcagtccagcttccaagcgccgcctcctcaacggtcagtgcccactcgcttgctgctttctcttagtagttgtagtcgttttttaacgggaaatacaacagggaagccaccagcccaccactatgtaggattttattaattgaaaaatagtgttgtagttgttattatctctatttaggacttgttgttggcaattgtcctatttcttgcttaattcgctaccgccatgctgtctttctgttctactgctaaaacacttattttttgtggtcgttgaatgaattgttaaccaaactcaattgcagaagacattcatccactaatcgtcacatgatccaccttagttcataagtttataccaccgtagttataggtcacttggtcagtagctgcaacttgcaagtgatttagggtttaataaaaaatttctggtagtaaagttgaaaggtatggtttgaggagagtgaatggtatcatgtcgaattacagtacattacaatttacaagtaaattgattagtcctctggtcttttgattggtagcatgtttttcctatgtaattgcctctgttcttctttaggggctaggttcgttgtaatcatttgaccgtggggatgtttgtactaaattcttatttctcttaaggaaaatcatgctaatgcacgaccacgaagaaaaagtaaattcatgaacaaatctacctaacttatgatttctgttggattttaactctagtctacctctttgaaattaaaaggttgtgctgtggttgttgatgaacaaacccagttgttgccaaatatcctgtttctctgcactaggttgcgtcctgtggtactggtcgactatggtggcacaatgcctcagctacaagaaaatctttgtggcctgctatatcttgcccgacagttcaagctctacaaggttaggtctgttcagtttggctagaaaggcatcccctacctgaacacctacgacgaccgcaccatccgctaccccgaccctctcatcaaggccaacgacaccatcaagatcgatctggagaccaacaagatcatggacttcatcaagttgtatttgccctttcatggacttcatcaagttatatacttagttaggctcaatgttagcacaaacagttgatgagcaagtttaaatttagagtacacttatgtatgagttatttgacaatgcttatttatgagatattgaatattatttatctatattatattaattatagtgttattaaatatatgtgtatgtatttttctcttttaaattattataatgtgataatttaagaatatact

SEQ ID NO: 219984 - DNA, 1192 bp, Zea Mays
cggcgcacccttctttctccatccacttgtgtactttcgacgtcgtcttcctcagtagcgcccccttctttctccacccgccgtcgacgcagctgccttccagccatctccatatccgtttcgccgtccccttcctcctcatcagtggctcgtcaagcgcgtcgtcgggatgcatgggggctccgtcacctaccttgtcgaccccggcaacaacgactcctcctccagaaccgtcgtgataaactacgcctatgctcgagacaatgaaacactatttgatattattagtgtgaagatgaacctctcaattgacaagcgatgcaggataaataatttgtccacaagcatgattgcattatcctaggtgcttatgaaagtttttaccttttcttcaatatgaagtctgaatgtgtggtgtggcttgtctgatctatctagcaggtttagtggtactcgcatcagctaaaccttaaacttgttttcttcttaatgcctccgtgatcggtttaagttctttcgttgcggagatggcagcggcggcggggccgtacaaagagatgctggaagtggtgaacgcgtgcgcgacccggatccggtggcgcctcagtccagcttccaagcgccgcctcctcaacggttgtgctgtggttgttgatgaacaaacccagttgttgccaaatatcctgtttctctgcactaggttgcgtcctgtggtactggtcgactatggtggcacaatgcctcagctacaagaaaatctttgtggcctgctatatcttgcccgacagttcaagctctacaaggttaggtctgttcagtttggctagaaaggcatcccctacctgaacacctacgacgaccgcaccatccgctaccccgaccctctcatcaaggccaacgacaccatcaagatcgatctggagaccaacaagatcatggacttcatcaagttgtatttgccctttcatggacttcatcaagttatatacttagttaggctcaatgttagcacaaacagttgatgagcaagtttaaatttagagtacacttatgtatgagttatttgacaatgcttatttatgagatattgaatattatttatctatattatattaattatagtgttattaaatatatgtgtatgtatttttctcttttaaattattataatgtgataatttaagaatatact

SEQ ID NO: 219985 - DNA, 1013 bp, Zea Mays
attcgatccgttcccttgccctaagacccacccctgatttcatttccccaatcatggcggcggctctgtcggggacggcggtgtccacggcagcgcttctagccccaatccgagctccaaccagcgcgtttatccggcgctcccagctcacctgtcatcgcctccactcactaaaatgccgccgcgctgggtccatcgtccccgcggccgctgctgccgcggcgggcagcagctcgccgtcgtcagccgttttccacggcgagtgcttcgtggtgggcgacaatatcgacaccgaccagatcatccccgccgagcacctcactctggtgccctccaagccggacgagtaccgcaagctcggttccttcgccttcgcggggctcccatccgcggcctacccgacgccgttcgtcgctccgggtgaggagtcctcccgctacgccatcattgtcggcggagccaacttcgggtgcggttcctctcgcgagcacgcgcccgtcgcgcttggggccgctggcgcacgcgccattgttgcggagggctacgcgcgcatcttttttcgcaactccgtggccactggagaggagtacaagctgaaaccaattggtgatgctggccctgtaattgaggcgggagggatctttgcctacgcccggaagacaggaatgattgcgtcgaaagctgctgcatgagggaaagcttatgcagccgagcctctgcggagatgaagaagtaagctggagttaggactaagagttactgcacctacttgatgtcgacggtgtctcaaaataagttgcggcctaccgaaattatgatgaatcaatcaatttggtctttgtcacagatcgtttttttttgttactagtacttgtacaattgtactcctgcctgctactgttcttatctgtttgaataactgctctgttgccatcttatgtgtacaactcttgaaactcgctgccgttcgatgtatttgagcttttggtatgcaactcttgaaaatggttgca

SEQ ID NO: 219986 - DNA, 521 bp, Zea Mays
cccggttggcacgtcattcgctcaccactcccaccgccaccggcctcaagccaacaccaccagtccacacatgcgcaggcgcacacgcacggccgttgagacttgagacagagacgcaggagcgcggaggaaaaggaggcccagaccaccgacggggaaaaaacatcacgaacaccgttctccatagcgggagtagtgaggaacgaaagagagggggcggcctagggcttcgattccgcagccatggacgccgctgacgtgtggggccgctcatcgtcctcgtcttcttcgtccgccgccgccgcgaggcgcctgcaggcgcgctacgatctgtacatggggatcgacgacgcggacgccggcttggacgaggtgacggagccgcgcggcggggcggagtcctacaactgccccttctgcggcgaggacttcgactttgtcggcctctgctgtcacatcgacgacgagcatgccgttgaggctaagagcgggggcatgatgaaatcagtgtttgctattta

SEQ ID NO: 219987 - DNA, 950 bp, Zea Mays
gcaggattcttctcccctccaccccttgtctgaggcatgccccatctgtgctacaagggtcggaatggacttgataggacatttgactatgcaacatggaagttatttcaagatgcaacgcaggcgcagagtccgaaaagtatcttctgggtcccattctttattatctttgttgagaaaggacttgagaaatggcagtttgcagtcatttctcggtggatcatcctatgtatccaatcctcctgctgcagcaccagatccatttgtgtcatctttaatttgtactttgcctgtggctgaaccatccaaagatttacattccgactcatctgacaataactttttgctaaataaattcccagatgaaaagcctgtagagaggtacgtcacctcaagcttgtcctttctgctgcctcactcatctccctctttgccacgataccattggatctgggctgaaccatcattgtcggagaaagatcagaaggaaagggttcaaaggagcaaattcgtccgagggcttgtgctctcgacaatatttgatgatgataacttgtaaagggggtcatcaaacttgataacagcatcacaatagttaaggaacacgaagagaatcatcagactctgctgctgttgtcgtgatcacacaagaggcccatctaagttcgtatatgtacggatggaatatttatgcatgtatgtatttatgtttatctccctgcatttacccttagtgcaacagggtggtaggggacggttgtagtattccaaatttatgtatcaaataaatgaggacactgtccttggggtgcaattgtgtatataatataataatagggagctactcgccatgatttaggatattttatttaactgttgtaataatatgcagtgttttgtatgatgaccccatttttttatatataactgttcattttagtcctttaatg

SEQ ID NO: 219988 - DNA, 1053 bp, Zea Mays
tttgggtccggttaggtggaacagatttgttgcttgtgctggaagtttcccatacaatccttttacctgacagtctttcttgttttagtttgctaattatggctatgcttgaaaatgaaccaatggaatactagtaggcatgccccatctgtgctacaagggtcggaatggacttgataggacatttgactatgcaacatggaagttatttcaagatgcaacgcaggcgcagagtccgaaaagtatcttctgggtcccattctttattatctttgttgagaaaggacttgagaaatggcagtttgcagtcatttctcggtggatcatcctatgtatccaatcctcctgctgcagcaccagatccatttgtgtcatctttaatttgtactttgcctgtggctgaaccatccaaagatttacattccgactcatctgacaataactttttgctaaataaattcccagatgaaaagcctgtagagaggtacgtcacctcaagcttgtcctttctgctgcctcactcatctccctctttgccacgataccattggatctgggctgaaccatcattgtcggagaaagatcagaaggaaagggttcaaaggagcaaattcgtccgagggcttgtgctctcgacaatatttgatgatgataacttgtaaagggggtcatcaaacttgataacagcatcacaatagttaaggaacacgaagagaatcatcagactctgctgctgttgtcgtgatcacacaagaggcccatctaagttcgtatatgtacggatggaatatttatgcatgtatgtatttatgtttatctccctgcatttacccttagtgcaacagggtggtaggggacggttgtagtattccaaatttatgtatcaaataaatgaggacactgtccttggggtgcaattgtgtatataatataataatagggagctactcgccatgatttaggatattttatttaactgttgtaataatatgcagtgttttgtatgatgaccccatttttttatatataactgttcattttagtcctttaatg

SEQ ID NO: 219989 - DNA, 658 bp, Zea Mays
cggcgcacgtcacgggcccggcggcgcctggagtacgtgcgcccgaccatgaccgcgaccatgacaatagatgaaaagcctgtagagaggtacgtcacctcaagcttgtcctttctgctgcctcactcatctccctctttgccacgataccattggatctgggctgaaccatcattgtcggagaaagatcagaaggaaagggttcaaaggagcaaattcgtccgagggcttgtgctctcgacaatatttgatgatgataacttgtaaagggggtcatcaaacttgataacagcatcacaatagttaaggaacacgaagagaatcatcagactctgctgctgttgtcgtgatcacacaagaggcccatctaagttcgtatatgtacggatggaatatttatgcatgtatgtatttatgtttatctccctgcatttacccttagtgcaacagggtggtaggggacggttgtagtattccaaatttatgtatcaaataaatgaggacactgtccttggggtgcaattgtgtatataatataataatagggagctactcgccatgatttaggatattttatttaactgttgtaataatatgcagtgttttgtatgatgaccccatttttttatatataactgttcattttagtcctttaatg

SEQ ID NO: 219990 - DNA, 1356 bp, Zea Mays
caagcgcagtacgccgcgacagcgtcgactttctgaacgatctggcggcggccgcggctcccaagttcacgaagcgggaggcgcaagcgaagcggctacctctcgccggagatgccgctggggacctctccagtagtggcggaggccgaggcatggacgtgggagaacgcagcggctggagctgccgccgggttcgccacggtcgcggccctccacccgctcgacgtcgtccgcacccgcttccaagtgagcggcggaagggggtggtctgaagtgcctccgtacaggaacaccgcgcatgctgtgtacactatcacacgatctgagggcctgagaggactttatgcaggattttatcccgcagttcttggatcaactgtttcctggggcctatatttctttttctataacagagctaaacaaaggtacttacagaggaagaatgaccagcttcatccagtccatcatctcatctcagctgcagaagcaggtgctttggtttccttgtttacaaatcccatatggctggtgaaaacaagactgcaactacaaacagctaaacaccatacttctcagtattctggtttttctgatgctttgaaaactattctaagagaggagggatttcttgcactttataggggaattggacctggtcttttgctggtcacccatggcgcaatacagttcacggcctatgaggaacttcgcaaagctatgatattctttaaaagtgcacaatcaagggcagacgacgcaggaggcggggagtcattggtagtaactgaccaaatctgaattccatcgattttgcggcacttggggctggttcaaaagtagctgctattctacttacttatccttaccaggtcatcagagcccgcttgcagcaacggcctggcactgatggtactccaaagtactcaaatagctggcatgtagtgaaggaaactgcaaagtatgaaggcgtccgtggattttacaggggcatcacgtccaatctactgaaaaaccttccagctgcgtccctcacgttcgtggtgtatgaaaatgttatcaaactattcaaagcaaccaaggagaagacgtagctactcattaaatccaggagtactatgcatggtctgacatttctgagttcaaacgatgcctataatttccattccacgtcaagcccatattttatccatttaacatcgtatatgacaaatatgtaacagtacaggttgtgaccaacctgggtcgtggaaattttttgtacttgcattttgtagagagaaaatacacattttgtttcttcccaaagaaatatgtctttgttatataatccagccgggacgctggcgttgtagatct

SEQ ID NO: 219991 - DNA, 1326 bp, Zea Mays
gacagcgtcgactttctgaacgatctggcggcggccgcggctcccaagttcacgaagcgggaggcgcaagcgaagcggctacctctcgccggagatgccgctggggacctctccagtagtggcggaggccgaggcatggacgtgggagaacgcagcggctggagctgccgccgggttcgccacggtcgcggccctccacccgctcgacgtcgtccgcacccgcttccaagtgagcggcggaagggggtggtctgaagtgcctccgtacaggaacaccgcgcatgctgtgtacactatcacacgatctgagggcctgagaggactttatgcaggattttatcccgcagttcttggatcaactgtttcctggggcctatatttctttttctataacagagctaaacaaaggtacttacagaggaagaatgaccagcttcatccagtccatcatctcatctcagctgcagaagcaggtgctttggtttccttgtttacaaatcccatatggctggtgaaaacaagactgcaactacaaacagctaaacaccatacttctcagtattctggtttttctgccagatgctttgaaaactattctaagagaggagggatttcttgcactttataggggaattggacctggtcttttgctggtcacccatggcgcaatacagttcacggcctatgaggaacttcgcaaagctatgatattctttaaaagtgcacaatcaagggcagacgacgcaggaggcggggagtcattgctgaattccatcgattttgcggcacttggggctggttcaaaagtagctgctattctacttacttatccttaccaggtcatcagagcccgcttgcagcaacggcctggcactgatggtactccaaagtactcaaatagctggcatgtagtgaaggaaactgcaaagtatgaaggcgtccgtggattttacaggggcatcacgtccaatctactgaaaaaccttccagctgcgtccctcacgttcgtggtgtatgaaaatgttatcaaactattcaaagcaaccaaggagaagacgtagctactcattaaatccaggagtactatgcatggtctgacatttctgagttcaaacgatgcctataatttccattccacgtcaagcccatattttatccatttaacatcgtatatgacaaatatgtaacagtacaggttgtgaccaacctgggtcgtggaaattttttgtacttgcattttgtagagagaaaatacacattttgtttcttcccaaagaaatatgtctttgttatataatccagccgggacgctggcgttgtagatct

SEQ ID NO: 219992 - DNA, 1314 bp, Zea Mays
gacagcgtcgactttctgaacgatctggcggcggccgcggctcccaagttcacgaagcgggaggcgcaagcgaagcggctacctctcgccggagatgccgctggggacctctccagtagtggcggaggccgaggcatggacgtgggagaacgcagcggctggagctgccgccgggttcgccacggtcgcggccctccacccgctcgacgtcgtccgcacccgcttccaagtgagcggcggaagggggtggtctgaagtgcctccgtacaggaacaccgcgcatgctgtgtacactatcacacgatctgagggcctgagaggactttatgcaggattttatcccgcagttcttggatcaactgtttcctggggcctatatttctttttctataacagagctaaacaaaggtacttacagaggaagaatgaccagcttcatccagtccatcatctcatctcagctgcagaagcaggtttccttgtttacaaatcccatatggctggtgaaaacaagactgcaactacaaacagctaaacaccatacttctcagtattctggtttttctgatgctttgaaaactattctaagagaggagggatttcttgcactttataggggaattggacctggtcttttgctggtcacccatggcgcaatacagttcacggcctatgaggaacttcgcaaagctatgatattctttaaaagtgcacaatcaagggcagacgacgcaggaggcggggagtcattgctgaattccatcgattttgcggcacttggggctggttcaaaagtagctgctattctacttacttatccttaccaggtcatcagagcccgcttgcagcaacggcctggcactgatggtactccaaagtactcaaatagctggcatgtagtgaaggaaactgcaaagtatgaaggcgtccgtggattttacaggggcatcacgtccaatctactgaaaaaccttccagctgcgtccctcacgttcgtggtgtatgaaaatgttatcaaactattcaaagcaaccaaggagaagacgtagctactcattaaatccaggagtactatgcatggtctgacatttctgagttcaaacgatgcctataatttccattccacgtcaagcccatattttatccatttaacatcgtatatgacaaatatgtaacagtacaggttgtgaccaacctgggtcgtggaaattttttgtacttgcattttgtagagagaaaatacacattttgtttcttcccaaagaaatatgtctttgttatataatccagccgggacgctggcgttgtagatct

SEQ ID NO: 219993 - DNA, 1831 bp, Zea Mays
gacagcgtcgactttctgaacgatctggcggcggccgcggctcccaagttcacgaagcgggaggcgcaagcgaagcggctacctctcgccggagatgccgctggggacctctccagtagtggcggaggccgaggcatggacgtgggagaacgcagcggctggagctgccgccgggttcgccacggtcgcggccctccacccgctcgacgtcgtccgcacccgcttccaagtgagcggcggaagggggtggtctgaagtgcctccgtacaggaacaccgcgcatgctgtgtacactatcacacgatctgagggcctgagaggactttatgcaggattttatcccgcagttcttggatcaactgtttcctggggcctatatttctttttctataacagagctaaacaaaggtacttacagaggaagaatgaccagcttcatccagtccatcatctcatctcagctgcagaagcaggtttccttgtttacaaatcccatatggctggtgaaaacaagactgcaactacaaacagctaaacaccatacttctcagtattctggtttttctgccagatgctttgaaaactattctaagagaggagggatttcttgcactttataggggaattggacctggtcttttgctggtcacccatggcgcaatacagttcacggcctatgaggaacttcgcaaagctatgatattctttaaaagtgcacaatcaagggcagacgacgcaggaggcggggagtcattggtagtaactgaccaaatgtgtgtttgggtgttgaatatcgactttagcatggttcaataaagacatttcagttcccctgaattcttaattatgttgtttttatattctttccttaaactgttattgccggtatttatatctagcattttcatgatatttcacacatttagacactgtttctctgtattatgcaatttttgaaattatcaaacctaagcaaattgaacatatagttatatgacttatgaaaatagttcatgcaatatcatattgttttttgaaattgtaaaacctaagcgaattgaacatatagttatgtgacttatgaaaatagttcatgcaatatcatattgtttggctccactcataacgtatgtacagttgtagatatacatctatggtatcatattgtttgactccactcataacatatgcagaattgtagatatacatctatccttgggcctttactactttgcctgatattccattctcttcactcttaatgcttagctgaattccatcgattttgcggcacttggggctggttcaaaagtagctgctattctacttacttatccttaccaggtcatcagagcccgcttgcagcaacggcctggcactgatggtactccaaagtactcaaatagctggcatgtagtgaaggaaactgcaaagtatgaaggcgtccgtggattttacaggggcatcacgtccaatctactgaaaaaccttccagctgcgtccctcacgttcgtggtgtatgaaaatgttatcaaactattcaaagcaaccaaggagaagacgtagctactcattaaatccaggagtactatgcatggtctgacatttctgagttcaaacgatgcctataatttccattccacgtcaagcccatattttatccatttaacatcgtatatgacaaatatgtaacagtacaggttgtgaccaacctgggtcgtggaaattttttgtacttgcattttgtagagagaaaatacacattttgtttcttcccaaagaaatatgtctttgttatataatccagccgggacgctggcgttgtagatct

SEQ ID NO: 219994 - DNA, 1829 bp, Zea Mays
gtcgactttctgaacgatctggcggcggccgcggctcccaagttcacgaagcgggaggcgcaagcgaagcggctacctctcgccggagatgccgctggggacctctccagtagtggcggaggccgaggcatggacgtgggagaacgcagcggctggagctgccgccgggttcgccacggtcgcggccctccacccgctcgacgtcgtccgcacccgcttccaagtgagcggcggaagggggtggtctgaagtgcctccgtacaggaacaccgcgcatgctgtgtacactatcacacgatctgagggcctgagaggactttatgcaggattttatcccgcagttcttggatcaactgtttcctggggcctatatttctttttctataacagagctaaacaaaggtacttacagaggaagaatgaccagcttcatccagtccatcatctcatctcagctgcagaagcaggtgctttggtttccttgtttacaaatcccatatggctggtgaaaacaagactgcaactacaaacagctaaacaccatacttctcagtattctggtttttctgatgctttgaaaactattctaagagaggagggatttcttgcactttataggggaattggacctggtcttttgctggtcacccatggcgcaatacagttcacggcctatgaggaacttcgcaaagctatgatattctttaaaagtgcacaatcaagggcagacgacgcaggaggcggggagtcattggtagtaactgaccaaatgtgtgtttgggtgttgaatatcgactttagcatggttcaataaagacatttcagttcccctgaattcttaattatgttgtttttatattctttccttaaactgttattgccggtatttatatctagcattttcatgatatttcacacatttagacactgtttctctgtattatgcaatttttgaaattatcaaacctaagcaaattgaacatatagttatatgacttatgaaaatagttcatgcaatatcatattgttttttgaaattgtaaaacctaagcgaattgaacatatagttatgtgacttatgaaaatagttcatgcaatatcatattgtttggctccactcataacgtatgtacagttgtagatatacatctatggtatcatattgtttgactccactcataacatatgcagaattgtagatatacatctatccttgggcctttactactttgcctgatattccattctcttcactcttaatgcttagctgaattccatcgattttgcggcacttggggctggttcaaaagtagctgctattctacttacttatccttaccaggtcatcagagcccgcttgcagcaacggcctggcactgatggtactccaaagtactcaaatagctggcatgtagtgaaggaaactgcaaagtatgaaggcgtccgtggattttacaggggcatcacgtccaatctactgaaaaaccttccagctgcgtccctcacgttcgtggtgtatgaaaatgttatcaaactattcaaagcaaccaaggagaagacgtagctactcattaaatccaggagtactatgcatggtctgacatttctgagttcaaacgatgcctataatttccattccacgtcaagcccatattttatccatttaacatcgtatatgacaaatatgtaacagtacaggttgtgaccaacctgggtcgtggaaattttttgtacttgcattttgtagagagaaaatacacattttgtttcttcccaaagaaatatgtctttgttatataatccagccgggacgctggcgttgtagatct

SEQ ID NO: 219995 - DNA, 1307 bp, Zea Mays
ctggcggcggccgcggctcccaagttcacgaagcgggaggcgcaagcgaagcggctacctctcgccggagatgccgctggggacctctccagtagtggcggaggccgaggcatggacgtgggagaacgcagcggctggagctgccgccgggttcgccacggtcgcggccctccacccgctcgacgtcgtccgcacccgcttccaagtgagcggcggaagggggtggtctgaagtgcctccgtacaggaacaccgcgcatgctgtgtacactatcacacgatctgagggcctgagaggactttatgcaggattttatcccgcagttcttggatcaactgtttcctggggcctatatttctttttctataacagagctaaacaaaggtacttacagaggaagaatgaccagcttcatccagtccatcatctcatctcagctgcagaagcaggtttccttgtttacaaatcccatatggctggtgaaaacaagactgcaactacaaacagctaaacaccatacttctcagtattctggtttttctgatgctttgaaaactattctaagagaggagggatttcttgcactttataggggaattggacctggtcttttgctggtcacccatggcgcaatacagttcacggcctatgaggaacttcgcaaagctatgatattctttaaaagtgcacaatcaagggcagacgacgcaggaggcggggagtcattggtagtaactgaccaaatctgaattccatcgattttgcggcacttggggctggttcaaaagtagctgctattctacttacttatccttaccaggtcatcagagcccgcttgcagcaacggcctggcactgatggtactccaaagtactcaaatagctggcatgtagtgaaggaaactgcaaagtatgaaggcgtccgtggattttacaggggcatcacgtccaatctactgaaaaaccttccagctgcgtccctcacgttcgtggtgtatgaaaatgttatcaaactattcaaagcaaccaaggagaagacgtagctactcattaaatccaggagtactatgcatggtctgacatttctgagttcaaacgatgcctataatttccattccacgtcaagcccatattttatccatttaacatcgtatatgacaaatatgtaacagtacaggttgtgaccaacctgggtcgtggaaattttttgtacttgcattttgtagagagaaaatacacattttgtttcttcccaaagaaatatgtctttgttatataatccagccgggacgctggcgttgtagatct

SEQ ID NO: 219996 - DNA, 555 bp, Zea Mays
atggcgacaccgtcgtcgtcgctttgctccagcttcgcctccctgcggaccgcctccatcggccaccctcgcgacatcacgtcatctacgcccaggttggtggagcatttgcttattttggccaaaagactcaagtttaccatcaaaatttccttccctggcgcaattgctattcaggcattgccagaaatagctcaaaagattacatggttggagaatgaagataccttgcttgattcttctggcgagaaaatcatttatgagatgatgagaccagagaggactttgttgtatttggttcctggaaggctggcccggaacccagggtctacacatcttataactgaaaaacacatgagcagcaagaaggtgagcaagaggaagcacgctagaatcattgacaagaagattgccaaaaagaagtctgaggctgtcgagtaccaaaagcttcttcccataggctcaaggaatagagaccgccacaatgagagcttggccaagagaagatccaagctttctacctctgccaagtcttcctctggcacctccgcttaa

SEQ ID NO: 219997 - DNA, 359 bp, Zea Mays
atggcgacaccgtcgtcgtcgctttgctccagcttcgcctccctgcggaccgcctccatcggccaccctcgcgacatcacgtcatctacgcccaggttggtggagcatttgcttattttggccaaaagactcaagtttaccatcaaaatttccttccctggcgcaattgctattcaggcattgccagaaatagctcaaaagattacatggttggagaatgaagataccttgcttgattcttctggcgagaaaatcatttatgagatgatgagaccagagaggactttgttgtatttggttcctggaaggctggtaggttagggtgagggatggttcaacagactggggatggggtgtgg

SEQ ID NO: 219998 - DNA, 413 bp, Zea Mays
atggcgacaccgtcgtcgtcgctttgctccagcttcgcctccctgcggaccgcctccatcggccaccctcgcgacatcacgtcatctacgcccaggttggtggagcatttgcttattttggccaaaagactcaagtttaccatcaaaatttccttccctggcgcaattgctattcaggcattgccagaaatagctcaaaagattacatggttggagaatgaagataccttgcttgattcttctggcgagactgatcttgctgaacatcacaaattggggcttgatatatctgaaccggagaagaaaatcatttatgagatgatgagaccagagaggactttgttgtatttggttcctggaaggctggtaggttagggtgagggatggttcaacagactggggatggggtgtgg

SEQ ID NO: 219999 - DNA, 2197 bp, Zea Mays
aggagagacctgacggcgcatctccggcaaagagtagcgagagggcttcttcttcctccaagcccccactccccgaccgttcaatacacgggaagcacaagcacatgcaggggaaggaggctaagaatggcaggcgcctttctaataataaagcgagtgccactcccaaaataaaactcactcctgtctaaccctgccagcggtccggggcctcctcccctattcggacaggaaaggggcagatgacgatccatagaaaccgattcatggattgcagacacccacaggaatcatccatcattcggagctaatcattcatcgggcctttcggctctttctgctcgcgcacaatcttggctagctcgtcctttccggcgacacccgcgctacgttcgaggccgcgaaagctgccgcacactttacagatcgctcgatgaacgccggtgcgcagcttgagcggcggagctcggtgcggcggtcgcagagcatggtgcaggaggaggacaggggccagccgcccgacgaggagctcatgtcccggagccagggctccagcacggagccgtcgggcggggcgctcaggaccggcggcgccgtgcccgacaaggacagcgcgacgcccaagccgcgcctcgccgaacagagcgcgggaccttccgagatggacctgatgaaggagaagttcgccaagctgctgctcggggaggacatgtccgggtccgggaaagggagaagtgggctggcttctgtccgtcgctgaccacatcgtcgagttcgtcgccaagaaacaagtcctggacaacggcaccgaaatggaggtgatgggcacgcagcagagacgggatctccaggccaacattccagcattgcgtaaactggacacgatgcttctcgactacctggataacttcaaggaacgcaacgagttctggtacgtgaagcgcgactcgtgctcagagagcgagaacgaggagaggtccgacgagaaatggtggatcccgatcgtcaaggtgccccccggcgggctttccaagacctctagaggctggctcctgcaccagaaggagctggtgaaccaggtgctcaaggcggccatggccatcaatgccaactgcctcatggagatgagcatcccggacacgtatatagacacgctccctaagaacgggagagccagcctcggggacgcgctgtaccgaatcatcacagatgtggagttcgacccggacgacttcctgtcgacggtggacctgacgtcggagcacaagatcctggacctcaaggaccggatcgaggcatcggtcatcatctggaacaggaaggtgcacaacaaggacggcaagtcctcttggggctccgccgtcagccaggagaagagggagcagttcgaggagcgggcgcagacactgctgctcatcatcaagcacaggttccccggaatcccccagtccacgctcgacatcgcaaagatccaagagaacagggacgtcgggtttgcgctgcttgagagctactccagggtcctggagagcctggcgttcaacgtcatgtcccggatagaggacgtcatccaggccgacaacctggctagggagaaggccaagaagaacgcgccgcccgcagcagaccccgccgccggacgccgcggcccgcaggaggccggtggcgacgacgacgaccagagcaagacgaccctgctggacttcatggggtggactggggactccgagggcaagaacgacgacgcatctcccccgccgccacccgagctgccggcgcaggacgacggcaggctgatgaagctgccaaacatcatgaccaacctcaagcagacgtacatggataagctggacttcctcagcgggaacagaagcccctcaggtcgccattagagacgcgacacgacacgagatttttgcatgtatcgtgtgaggtagtgtacatatatatttttggattgtgtcaaactgggctctctcttgagtagcccgtgccgtgtcacttcctgattttgcagacacgtgacattctcttctcatgtacgagtacgattccaagggattggccattgtatcaggtacatcaataaatagacaaaaaatagagctaacagaacttcaacatcacatatatatgtgacattaaggactcctttggttcataggatttccaaagaaacaaggtaggtgaatataag

SEQ ID NO: 220000 - DNA, 2274 bp, Zea Mays
agggttgcgtacatcgatgaagtcgaagagcctagcaaagacaaaaataagaaaatagagaaggtttactactccgcattggtgaaggcagcagtaacgaagcctgatgatcctggccagaaacttgatcagggatatatataggataaagcttccaggaaatgcaatgctaggtgaaggaaaaccagagaaccagaaccatgccataattttcacacgaggaacattatatggaggagactttgaaaatgaggaatttgttgcaagagtttctgaagaaacatgatggtgtgagatatccatcaatacttggtgtaagagaacacatcttcaccggaagcgtgtcttctcttgcatggttcatgtcaaaccaagaaacaagttttgtgaccattggacaacgtgtacttgccaatcctttgagagttcgatttcattatgggcatcctgatatctttgatcgacttttccacctcacacgtggaggtgtaagcaaagcttctaagattatcaatcttagtgaagacatatttgctggatttaattcaacactgcgtgaaggaaatgttacacatcatgaatacatgcaagttggcaagggcagagatgttggtctcaaccagatctcactatttgaagcaaaaatagcaaatggtaatggtgaacagacgctgagccgtgacgtgtaccgtcttggacatcgttttgactttttcagaatgttgtcctgctactatactactattggtttttacttcagcacaatgataacagtttggaccgtttatgtattcctctacgggcgcctgtatcttgtcctaagtggccttgatgaagcattagccactggaaagaggtttatacacaacgagcctctccaggttgctctagcttcacagtcttttgtgcagcttgggttcttgatggcgctgcctatgatgatggaaattggtctagagagaggattcagaactgcattgagtgactttgtacttatgcagctccagttagcatctgtgttcttcacattctctcttgggaccaaaactcactactacggaaccacactgctacatggaggagctgaatatagagctacagggcgtggatttgtggtgttccatgccaagtttgctgagaattatcgattgtattcgcgaagccattttgtgaagggcattgaactgatgattttgcttattgtgtatgaaatatttgggcagtcataccgaggagctattgcgtacattttcatcacattttccatgtggtttatggttgtcacctggctctttgccccattcctgtttaatccttctgggttcgagtggcagaaaattgtggatgactggactgactggaataagtggatcagtaaccgtggaggtattggggtgccgccagagaaaagttgggagtcatggtgggaaaaagagcaggagcctcttaggcattctggaaagcgtggcactgttcttgaaatagtgctttcgttgcgcttctttatttaccagtatggtcttgtttatcatttgaacatcaccactcacacgaagagcgttctggtttattgcatctcgtgggtcataatctttgtcattttgctcgtgatgaagactgtatcagttggcaggaggaaattcagtgcagagttccagcttgtgttccggctgatcaaggggctgatattcataacgtttatctctattatcataatcttgatagcaatcccacacatgacagttcaggacatctttgtttgcatccttgcgttcatgccaactggatggggtttgcttctgatagcacaaactatgaggtcagctatttcacatatggggctatggggatcggtcaaggcgcttgcccgaggctatgagatcatcatgggcttgctgttgttcaccccgatcgcattcctcgcttggttcccgtttgtttcggagttccagacaaggatgctgttcaaccaggccttcagtagaggtctgcagatttctcgtatcctaggcggacacaagaaagaccgggctgcacggaacaaggagtgagtagccgagcagcgtgagcctggtagtgctgacctacatacaattcaaccatgccccacgtggcattatacttgtactggttattatgccaggttgtatattgcaaggaaaggaattcatctctgctaacgtgccagattgtatgtgtggcagcaggtactcgatcggtgagcactcctatagcttttttattattatttatgggtaaagtcaaagaaactaa

SEQ ID NO: 220001 - DNA, 1054 bp, Zea Mays
gctcaatgttttattcttttgctcttccactgaacccgatgggagtgatggttaaccctcctaaacctggagatatctcatacccgaagttcactgccgaaagcaagtccatcctcgaatctttgaggaggagagcgcgcatgatgacagacggtttcaacagctgccgaaacgtggtgtgcaatttcacagaaggtaagcatcaagatttctgttggtttgcagcgaatagagtgtggtttatttttgtgactggttgtgttgctgcaggagctatgtactctttcccccaaatacagctgccagcaagagccatcgaggcggcaaagagagccggcaaagcagcagacgttttctactgcctcaagctcctggaggcaacggggatttccactgttccgggatctggttttgggcagaaggaaggggtgttccaccttcggacaactatccttccagccgaggaagacttccctaccatcatgtcgagcttcaagaagttcaacgactcatttcatggagcaatacgagggctactccaggatgtgatgtcaacatgaaaagaagcgaccgcgccaccattttgcttctactgcccatactagtagaaacagtgatcggtgcactatgtgatattttgctgctgcaactgcggccttagtctgctatgtatgtgttgcctgttctgaaagagtaaagaagcgaccgataatgtatatcctgagccgcgcggcggggagaaagcatttcgcttttaagggaaagggaagcatcagcagcgccgccgccgctagagccctagacagacttaatcgctatctgggtcagtccaaaacagtcggaaacaaacccgacagaggatattttactcttgaatttacctggagccactggcactttgctgctgcctgtatccgtggtgaggactccgaacggtccgcgcgctcagattcagttactatctaattggttgcccgcatcgctttattctggatctctacgtgcattgactttgattaagtgtgtgtttggttgcccgcacgtggaaggcgtg

SEQ ID NO: 220002 - DNA, 3269 bp, Zea Mays
gcttaaaatctagctaggctcggatgaaaaacaacacacacctctagtagcgagaggcaagggacgtaagaagtcgtctaattcttggatcgaattagacgacttcttcgtccctctcttcattagcacgctaacttgtaatctgcaggatctaagcaaagacttgattcagttatggacggattggtaggcctcttgaaagttcgtgtggtccggggtatcaaccttgcctaccgcgacgcaagaggcagcgatccgtatgtcgtcctacggcttggcaagaagacaagcgtgaagaagagatccgtgaaccccatatggcaagaggagctaactctgaccgtcacagatcccagccaaccactgaagctggtgagaggtgttcgacaaggacaccttcagcagagacgaccccatgggagacgcggaggtggacgtggcgccactgatggaggcggtgagcatgaacccgcgggaggagagtctgaggaacggcgccatcatcaggtccgagcggccgagcgccaggaactgcctcgccgacgagagccacgtgtgctggaggaacggcaagttcgcgcaggacatgatcctccggctcaggaacgtcgagagcggggagatacagctgcagctgcagtgggtgaacttccctcctggtcctggtcctgctgctgcaacaaccaggtgacctgatcgatggtagctgctgttcctgtcgccattgcctcctgctggcaggaacaggaactctctgaagcacggggtcagggtagttcatgttgcttcgattcgatcgtaggggagataatgccggatggcgctgctcatgctttgtaaagtttgggaggacatgcatcataattgaagtcaagtgataggatcctgttttttaagtacacgatacatccctttttttatttgtcgctctcatcagtggacgactgttgatggggtagttgagtgctgtgaatcgtggtgcagcgatcgcagttgcaaaagttgcagggtcaggctgccgcggcaacgggtcgtcgtctcctcacctcgccggggctttacttatccaccgcagggccaccgagcgaggcgataacccaaccagtatcagccagctcgcagtccctccgccaccaattttttttttctcattctcgtttccaaattatccgccgctgaaacaatctgcacccccacgcacaagcacgaagcagtcagcagtagagtacaaatcctcgcctgcatcctggttttcgtccccattctctccccgccactccagcggaacggcggcgggggagtgagtgacggcaacgaggcaagatggcgaggaggaggccgatggactacgaggagctgaacgagaaagtcaagaaggcgcagtacgcggtgcgcggggagctgtacctccgcgcctcccagctccagaaggagggcaagaagatcatcttcaccaacgtcggcaacccgcacgccctcggccagaagccgctcaccttcccgcgccaggtggtggcgctgtgccaggctccgttcctcctcgatgaccccaatgtcggcctcatgttcccgcccgatgccatcgtgcgggccaagcgctatctcgccatggcgccgggaggtctaggtgcgtacagtgatgcccgtggtatccccggaatcaggaaggaagttgctgacttcatccacaagcgtgatggatatccgagtgacccagaactcatttacctgacagacggcgccagcaaaggtgtgatgcaaatgctgaatgccatcattagaaacgagagggatgggatcttggttcctgttcctcagtacccactttattctgctatcatttccctctttggtgggtctctggtcccatactacttggaagaagaggctaactggaaccttgactttgcaaacatccgacaagcagtggccgaggcacgttcgaagggaatcactgttcgagcgacggtgattataaatccaggaaatcccactggccagtgccttagtgaagcaaatataagggaacttgtgcgatattgctaccatgaaaacttagttctgcttgcagacgaagtgtatcagcagaacgtttatcaagatgagcgcccatttataagcgcaagaaaggttatgttcgacatgggtccgccaataagcagggaggttcagcttgtttctttccacactgtgtccaaagggtactggggagagtgtggacaacgtggtggatacttcgaaatgacaaatcttcctccaaagacagtagatgagatctacaaggttgcatcaatagtactgagtccgaatgttcccgggcaaatctttatgggagtgatggttaaccctcctaaacctggagatatctcatacccgaagttcactgccgaaagcaagtccatcctcgaatctttgaggaggagagcgcgcatgatgacagacggtttcaacagctgccgaaacgtggtgtgcaatttcacagaaggagctatgtactctttcccccaaatacagctgccagcaagagccatcgaggcggcaaagagagccggcaaagcagcagacgttttctactgcctcaagctcctggaggcaacggggatttccactgttccgggatctggttttgggcagaaggaaggggtgttccaccttcggacaactatccttccagccgaggaagacttccctaccatcatgtcgagcttcaagaagttcaacgactcatttcatggagcaatacgagggctactccaggatgtgatgtcaacatgaaaagaagcgaccgcgccaccattttgcttctactgcccatactagtagaaacagtgatcggtgcactatgtgatattttgctgctgcaactgcggccttagtctgctatgtatgtgttgcctgttctgaaagagtaaagaagcgaccgataatgtatatcctgagccgcgcggcggggagaaagcatttcgcttttaagggaaagggaagcatcagcagcgccgccgccgctagagccctagacagacttaatcgctatctgggtcagtccaaaacagtcggaaacaaacccgacagaggatattttactcttgaatttacctggagccactggcactttgctgctgcctgtatccgtggtgaggactccgaacggtccgcgcgctcagattcagttactatctaattggttgcccgcatcgctttattctggatctctacgtgcattgactttgattaagtgtgtgtttggttgcccgcacgtggaaggcgtg

SEQ ID NO: 220003 - DNA, 3237 bp, Zea Mays
gcttaaaatctagctaggctcggatgaaaaacaacacacacctctagtagcgagaggcaagggacgtaagaagtcgtctaattcttggatcgaattagacgacttcttcgtccctctcttcattagcacgctaacttgtaatctgcaggatctaagcaaagacttgattcagttatggacggattggtaggcctcttgaaagttcgtgtggtccggggtatcaaccttgcctaccgcgacgcaagaggcagcgatccacaagcgtgaagaagagatccgtgaaccccatatggcaagaggagctaactctgaccgtcacagatcccagccaaccactgaagctggaggtgttcgacaaggacaccttcagcagagacgaccccatgggagacgcggaggtggacgtggcgccactgatggaggcggtgagcatgaacccgcgggaggagagtctgaggaacggcgccatcatcaggtccgagcggccgagcgccaggaactgcctcgccgacgagagccacgtgtgctggaggaacggcaagttcgcgcaggacatgatcctccggctcaggaacgtcgagagcggggagatacagctgcagctgcagtgggtgaacttccctcctggtcctggtcctgctgctgcaacaaccaggtgacctgatcgatggtagctgctgttcctgtcgccattgcctcctgctggcaggaacaggaactctctgaagcacggggtcagggtagttcatgttgcttcgattcgatcgtaggggagataatgccggatggcgctgctcatgctttgtaaagtttgggaggacatgcatcataattgaagtcaagtgataggatcctgttttttaagtacacgatacatccctttttttatttgtcgctctcatcagtggacgactgttgatggggtagttgagtgctgtgaatcgtggtgcagcgatcgcagttgcaaaagttgcagggtcaggctgccgcggcaacgggtcgtcgtctcctcacctcgccggggctttacttatccaccgcagggccaccgagcgaggcgataacccaaccagtatcagccagctcgcagtccctccgccaccaattttttttttctcattctcgtttccaaattatccgccgctgaaacaatctgcacccccacgcacaagcacgaagcagtcagcagtagagtacaaatcctcgcctgcatcctggttttcgtccccattctctccccgccactccagcggaacggcggcgggggagtgagtgacggcaacgaggcaagatggcgaggaggaggccgatggactacgaggagctgaacgagaaagtcaagaaggcgcagtacgcggtgcgcggggagctgtacctccgcgcctcccagctccagaaggagggcaagaagatcatcttcaccaacgtcggcaacccgcacgccctcggccagaagccgctcaccttcccgcgccaggtggtggcgctgtgccaggctccgttcctcctcgatgaccccaatgtcggcctcatgttcccgcccgatgccatcgtgcgggccaagcgctatctcgccatggcgccgggaggtctaggtgcgtacagtgatgcccgtggtatccccggaatcaggaaggaagttgctgacttcatccacaagcgtgatggatatccgagtgacccagaactcatttacctgacagacggcgccagcaaaggtgtgatgcaaatgctgaatgccatcattagaaacgagagggatgggatcttggttcctgttcctcagtacccactttattctgctatcatttccctctttggtgggtctctggtcccatactacttggaagaagaggctaactggaaccttgactttgcaaacatccgacaagcagtggccgaggcacgttcgaagggaatcactgttcgagcgacggtgattataaatccaggaaatcccactggccagtgccttagtgaagcaaatataagggaacttgtgcgatattgctaccatgaaaacttagttctgcttgcagacgaagtgtatcagcagaacgtttatcaagatgagcgcccatttataagcgcaagaaaggttatgttcgacatgggtccgccaataagcagggaggttcagcttgtttctttccacactgtgtccaaagggtactggggagagtgtggacaacgtggtggatacttcgaaatgacaaatcttcctccaaagacagtagatgagatctacaaggttgcatcaatagtactgagtccgaatgttcccgggcaaatctttatgggagtgatggttaaccctcctaaacctggagatatctcatacccgaagttcactgccgaaagcaagtccatcctcgaatctttgaggaggagagcgcgcatgatgacagacggtttcaacagctgccgaaacgtggtgtgcaatttcacagaaggagctatgtactctttcccccaaatacagctgccagcaagagccatcgaggcggcaaagagagccggcaaagcagcagacgttttctactgcctcaagctcctggaggcaacggggatttccactgttccgggatctggttttgggcagaaggaaggggtgttccaccttcggacaactatccttccagccgaggaagacttccctaccatcatgtcgagcttcaagaagttcaacgactcatttcatggagcaatacgagggctactccaggatgtgatgtcaacatgaaaagaagcgaccgcgccaccattttgcttctactgcccatactagtagaaacagtgatcggtgcactatgtgatattttgctgctgcaactgcggccttagtctgctatgtatgtgttgcctgttctgaaagagtaaagaagcgaccgataatgtatatcctgagccgcgcggcggggagaaagcatttcgcttttaagggaaagggaagcatcagcagcgccgccgccgctagagccctagacagacttaatcgctatctgggtcagtccaaaacagtcggaaacaaacccgacagaggatattttactcttgaatttacctggagccactggcactttgctgctgcctgtatccgtggtgaggactccgaacggtccgcgcgctcagattcagttactatctaattggttgcccgcatcgctttattctggatctctacgtgcattgactttgattaagtgtgtgtttggttgcccgcacgtggaaggcgtg

SEQ ID NO: 220004 - DNA, 3250 bp, Zea Mays
gcttaaaatctagctaggctcggatgaaaaacaacacacacctctagtagcgagaggcaagggacgtaagaagtcgtctaattcttggatcgaattagacgacttcttcgtccctctcttcattagcacgctaacttgtaatctgcaggatctaagcaaagacttgattcagttatggacggattggtaggcctcttgaaagttcgtgtggtccggggtatcaaccttgcctaccgcgacgcaagaggcagcgatccaaactgaagacaagcgtgaagaagagatccgtgaaccccatatggcaagaggagctaactctgaccgtcacagatcccagccaaccactgaagctggtgagaggtgttcgacaaggacaccttcagcagagacgaccccatgggagacgcggaggtggacgtggcgccactgatggaggcggtgagcatgaacccgcgggaggagagtctgaggaacggcgccatcatcaggtccgagcggccgagcgccaggaactgcctcgccgacgagagccacgtgtgctggaggaacggcaagttcgcgcaggacatgatcctccggctcaggaacgtcgagagcggggagatacagctgcagctgcagtgggtgaacttccctcctggtcctggtcctgctgctgcaacaaccaggtgacctgatcgatggtagctgctgttcctgtcgccattgcctcctgctggcaggaacaggaactctctgaagcacggggtcagggtagttcatgttgcttcgattcgatcgtaggggagataatgccggatggcgctgctcatgctttgtaaagtttgggaggacatgcatcataattgaagtcaagtgataggatcctgttttttaagtacacgatacatccctttttttatttgtcgctctcatcagtggacgactgttgatggggtagttgagtgctgtgaatcgtggtgcagcgatcgcagttgcaaaagttgcagggtcaggctgccgcggcaacgggtcgtcgtctcctcacctcgccggggctttacttatccaccgcagggccaccgagcgaggcgataacccaaccagtatcagccagctcgcagtccctccgccaccaattttttttttctcattctcgtttccaaattatccgccgctgaaacaatctgcacccccacgcacaagcacgaagcagtcagcagtagagtacaaatcctcgcctgcatcctggttttcgtccccattctctccccgccactccagcggaacggcggcgggggagtgagtgacggcaacgaggcaagatggcgaggaggaggccgatggactacgaggagctgaacgagaaagtcaagaaggcgcagtacgcggtgcgcggggagctgtacctccgcgcctcccagctccagaaggagggcaagaagatcatcttcaccaacgtcggcaacccgcacgccctcggccagaagccgctcaccttcccgcgccaggtggtggcgctgtgccaggctccgttcctcctcgatgaccccaatgtcggcctcatgttcccgcccgatgccatcgtgcgggccaagcgctatctcgccatggcgccgggaggtctaggtgcgtacagtgatgcccgtggtatccccggaatcaggaaggaagttgctgacttcatccacaagcgtgatggatatccgagtgacccagaactcatttacctgacagacggcgccagcaaaggtgtgatgcaaatgctgaatgccatcattagaaacgagagggatgggatcttggttcctgttcctcagtacccactttattctgctatcatttccctctttggtgggtctctggtcccatactacttggaagaagaggctaactggaaccttgactttgcaaacatccgacaagcagtggccgaggcacgttcgaagggaatcactgttcgagcgacggtgattataaatccaggaaatcccactggccagtgccttagtgaagcaaatataagggaacttgtgcgatattgctaccatgaaaacttagttctgcttgcagacgaagtgtatcagcagaacgtttatcaagatgagcgcccatttataagcgcaagaaaggttatgttcgacatgggtccgccaataagcagggaggttcagcttgtttctttccacactgtgtccaaagggtactggggagagtgtggacaacgtggtggatacttcgaaatgacaaatcttcctccaaagacagtagatgagatctacaaggttgcatcaatagtactgagtccgaatgttcccgggcaaatctttatgggagtgatggttaaccctcctaaacctggagatatctcatacccgaagttcactgccgaaagcaagtccatcctcgaatctttgaggaggagagcgcgcatgatgacagacggtttcaacagctgccgaaacgtggtgtgcaatttcacagaaggagctatgtactctttcccccaaatacagctgccagcaagagccatcgaggcggcaaagagagccggcaaagcagcagacgttttctactgcctcaagctcctggaggcaacggggatttccactgttccgggatctggttttgggcagaaggaaggggtgttccaccttcggacaactatccttccagccgaggaagacttccctaccatcatgtcgagcttcaagaagttcaacgactcatttcatggagcaatacgagggctactccaggatgtgatgtcaacatgaaaagaagcgaccgcgccaccattttgcttctactgcccatactagtagaaacagtgatcggtgcactatgtgatattttgctgctgcaactgcggccttagtctgctatgtatgtgttgcctgttctgaaagagtaaagaagcgaccgataatgtatatcctgagccgcgcggcggggagaaagcatttcgcttttaagggaaagggaagcatcagcagcgccgccgccgctagagccctagacagacttaatcgctatctgggtcagtccaaaacagtcggaaacaaacccgacagaggatattttactcttgaatttacctggagccactggcactttgctgctgcctgtatccgtggtgaggactccgaacggtccgcgcgctcagattcagttactatctaattggttgcccgcatcgctttattctggatctctacgtgcattgactttgattaagtgtgtgtttggttgcccgcacgtggaaggcgtg

SEQ ID NO: 220005 - DNA, 1657 bp, Zea Mays
atggtccagggttgggaaacctgtggcagcttgttactggctttggagttgtcacatatagaagtaattttaagctagagggaagatagcagtaatcggaggatgtcgtgagtacactggagctccttattttgccgctatctctgccttgaaagttggtgcagatctttcacatgttttctgcacgaaagatgctgctacagtaattaagagctatagccctgaactaattgtacatccaatattagaagaatcttacagtgtaagggttgatgaacgagcatctgtttcttctaagattcttacggaagttgcaaagtggatggagcgctttgattgcattgttgttggtcctggccttggaagggacccctttcttctggaatgtgtgagtaatatcatgaggcacgcacgacaggctaatattccaactgttgtggatggggaaaccctcttgccattttaacaccaaatgtctatgagtacaagcgtcttgttcagaaggttcttaactgtgacgtagatgaggaaagtgcttctgagcagctaatcgcactttgccaaaaaattggtgatgtaacaataatgcagaaaggaaaagctgatgtcatcagtgacggtaaaacagttacacaagtgagtacttttggttccccaagacggtgtggtggtcaaggtgacatcctttctggaagtgtggcagtatttgcatcatgggcacgacactttgtcttgacaaacgaagaacctacagagaaaagagttaatcctatgacccttgggtgcatagctgcctcccttctactccggaaagctgcgtcacatgcttttgagaagaacaagagatcgactgtcacctctgatatcattgagttcttgggcaaaagcttggaagatatctgccctgccgagcactagctcctgccagtaattgtagtcatgcacgcggaagcctaataatgtttatatgtctgttgaacagggtgttaccatgcctaattctaatgttgcccagtgatgttgagaactgtgcagtagaagcgtaagattgaaactggggaacgacgactagaattctgaacacatgtttctagtcgcctaggactatccgtcttcttctcgacaacactatcactatatataaacttgaccttaggattagtactgctattggtgctagtagtttatttgaattgaagtaatttgcgtaggttctgagcgagaattgccttaagcttgcccagctacacacaccccaagaaacttgctaacgccagtgagccgatcttgcttacccacggcagcaagaggaaaacttgcttgcacgagcttccaggtgaatagcaagccatccaacacgccttcgctcgcttcatttccttgccggcgaggaggcaagtattctgaacggaaccaaagacacttaggccagggcccttattggaagtgtagtatttttgaaacaatactatggtatttgacaatactatagtattgtaacttaaaagttgtttggattgtacagacaaagtatagttttaaataccatggtttatccaaaaccgtggtatttttggaaactccactcatgacctcagttttctctctttcctctataaatactttgtttttccaatggaatcaaatatatctcggt

SEQ ID NO: 220006 - DNA, 2050 bp, Zea Mays
ggaacaactgaacggccggcagtggcagaggatgcggctgcgtccgacctccttgcttttcgagaatccactgccttcgattcctagtttcccacggcagggcagcctcatcggatcccatgagccggcccacgggcgcgtggcgactagggatggcaacgtgtacaataccagcagcaccgcgtgcgcatgtgggccgcctccccggcattcggcaggcagctcgtcctgctctactgcttccttccttctcctcctccactctcctctgtcaccggcttccccccatcctgcccctcgtgctccagctcctccgggtccgggccaaccacgcgatggcggcgtccgccgggacggtgtacgaggcggacgcggaggccgtcgtgcgccggatcacgccggcactcgaccgcgccagacacaagggccaggcagggaagatagcagtaatcggaggatgtcgtgagtacactggagctccttattttgccgctatctctgccttgaaagttggtgcagatctttcacatgttttctgcacgaaagatgctgctacagtaattaagagctatagccctgaactaattgtacatccaatattagaagaatcttacagtggttgatgaacgagcatctgtttcttctaagattcttacggaagttgcaaagtggatggagcgctttgattgcattgttgttggtcctggccttggaagggacccctttcttctggaatgtgtgagtaatatcatgaggcacgcacgacaggctaatattccaactgttgtggatggggatggcctatttcttgtaaacaataaccttaatcttgttgaaggaaaccctcttgccattttaacaccaaatgtctatgagtacaagcgtcttgttcagaaggttcttaactgtgacgtagatgaggaaagtgcttctgagcagctaatcgcactttgccaaaaaattggtgatgtaacaataatgcagaaaggaaaagctgatgtcatcagtgacggtaaaacagttacacaagtgagtacttttggttccccaagacggtgtggtggtcaaggtgacatcctttctggaagtgtggcagtatttgcatcatgggcacgacactttgtcttgacaaacgaagaacctacagagaaaagagttaatcctatgacccttgggtgcatagctgcctcccttctactccggaaagctgcgtcacatgcttttgagaagaacaagagatcgactgtcacctctgatatcattgagttcttgggcaaaagcttggaagatatctgccctgccgagcactagctcctgccagtaattgtagtcatgcacgcggaagcctaataatgtttatatgtctgttgaacagggtgttaccatgcctaattctaatgttgcccagtgatgttgagaactgtgcagtagaagcgtaagattgaaactggggaacgacgactagaattctgaacacatgtttctagtcgcctaggactatccgtcttcttctcgacaacactatcactatatataaacttgaccttaggattagtactgctattggtgctagtagtttatttgaattgaagtaatttgcgtaggttctgagcgagaattgccttaagcttgcccagctacacacaccccaagaaacttgctaacgccagtgagccgatcttgcttacccacggcagcaagaggaaaacttgcttgcacgagcttccaggtgaatagcaagccatccaacacgccttcgctcgcttcatttccttgccggcgaggaggcaagtattctgaacggaaccaaagacacttaggccagggcccttattggaagtgtagtatttttgaaacaatactatggtatttgacaatactatagtattgtaacttaaaagttgtttggattgtacagacaaagtatagttttaaataccatggtttatccaaaaccgtggtatttttggaaactccactcatgacctcagttttctctctttcctctataaatactttgtttttccaatggaatcaaatatatctcggt

SEQ ID NO: 220007 - DNA, 2026 bp, Zea Mays
ggaacaactgaacggccggcagtggcagaggatgcggctgcgtccgacctccttgcttttcgagaatccactgccttcgattcctagtttcccacggcagggcagcctcatcggatcccatgagccggcccacgggcgcgtggcgactagggatggcaacgtgtacaataccagcagcaccgcgtgcgcatgtgggccgcctccccggcattcggcaggcagctcgtcctgctctactgcttccttccttctcctcctccactctcctctgtcaccggcttccccccatcctgcccctcgtgctccagctcctccgggtccgggccaaccacgcgatggcggcgtccgccgggacggtgtacgaggcggacgcggaggccgtcgtgcgccggatcacgccggcactcgaccgcgccagacacaagggccaggcagggaagatagcagtaatcggaggatgtcgtgagtacactggagctccttattttgccgctatctctgccttgaaagttggtgcagatctttcacatgttttctgcacgaaagatgctgctacagtaattaagagctatagccctgaactaattgtacatccaatattagaagaatcttacagtgtaagggttgatgaacgagcatctgtttcttctaagattcttacggaagttgcaaagtggatggagcgctttgattgcattgttgttggtcctggccttggaagggacccctttcttctggaatgtgtgagtaatatcatgaggcacgcacgacaggctaatattccaactgttgtggatggggatggcctatttcttgtaaacaataaccttaatcttgttgaaggaaaccctcttgccattttaacaccaaatgtctatgagtacaagcgtcttgttcagaaggttcttaactgtgacgtagatgaggaaagtgcttctgagcagctaatcgcactttgccaaaaaattggtgatgtaacaataatgcagaaaggaaaagctgatgtcatcagtgacggtaaaacagttacacaagtgagtacttttggttccccaagacggtgtggtggtcaaggtgacatcctttctggaagtgtggcagtatttgcatcatgggcacgacactttgtcttgacaaacgaagaacctacagagaaaagctgcctcccttctactccggaaagctgcgtcacatgcttttgagaagaacaagagatcgactgtcacctctgatatcattgagttcttgggcaaaagcttggaagatatctgccctgccgagcactagctcctgccagtaattgtagtcatgcacgcggaagcctaataatgtttatatgtctgttgaacagggtgttaccatgcctaattctaatgttgcccagtgatgttgagaactgtgcagtagaagcgtaagattgaaactggggaacgacgactagaattctgaacacatgtttctagtcgcctaggactatccgtcttcttctcgacaacactatcactatatataaacttgaccttaggattagtactgctattggtgctagtagtttatttgaattgaagtaatttgcgtaggttctgagcgagaattgccttaagcttgcccagctacacacaccccaagaaacttgctaacgccagtgagccgatcttgcttacccacggcagcaagaggaaaacttgcttgcacgagcttccaggtgaatagcaagccatccaacacgccttcgctcgcttcatttccttgccggcgaggaggcaagtattctgaacggaaccaaagacacttaggccagggcccttattggaagtgtagtatttttgaaacaatactatggtatttgacaatactatagtattgtaacttaaaagttgtttggattgtacagacaaagtatagttttaaataccatggtttatccaaaaccgtggtatttttggaaactccactcatgacctcagttttctctctttcctctataaatactttgtttttccaatggaatcaaatatatctcggt

SEQ ID NO: 220008 - DNA, 1976 bp, Zea Mays
ggaacaactgaacggccggcagtggcagaggatgcggctgcgtccgacctccttgcttttcgagaatccactgccttcgattcctagtttcccacggcagggcagcctcatcggatcccatgagccggcccacgggcgcgtggcgactagggatggcaacgtgtacaataccagcagcaccgcgtgcgcatgtgggccgcctccccggcattcggcaggcagctcgtcctgctctactgcttccttccttctcctcctccactctcctctgtcaccggcttccccccatcctgcccctcgtgctccagctcctccgggtccgggccaaccacgcgatggcggcgtccgccgggacggtgtacgaggcggacgcggaggccgtcgtgcgccggatcacgccggcactcgaccgcgccagacacaagggccaggcagggaagatagcagtaatcggaggatgtcggtgcagatctttcacatgttttctgcacgaaagatgctgctacagtaattaagagctatagccctgaactaattgtacatccaatattagaagaatcttacagtgtaagggttgatgaacgagcatctgtttcttctaagattcttacggaagttgcaaagtggatggagcgctttgattgcattgttgttggtcctggccttggaagggacccctttcttctggaatgtgtgagtaatatcatgaggcacgcacgacaggctaatattccaactgttgtggatggggatggcctatttcttgtaaacaataaccttaatcttgttgaaggaaaccctcttgccattttaacaccaaatgtctatgagtacaagcgtcttgttcagaaggttcttaactgtgacgtagatgaggaaagtgcttctgagcagctaatcgcactttgccaaaaaattggtgatgtaacaataatgcagaaaggaaaagctgatgtcatcagtgacggtaaaacagttacacaagtgagtacttttggttccccaagacggtgtggtggtcaaggtgacatcctttctggaagtgtggcagtatttgcatcatgggcacgacactttgtcttgacaaacgaagaacctacagagaaaagctgcctcccttctactccggaaagctgcgtcacatgcttttgagaagaacaagagatcgactgtcacctctgatatcattgagttcttgggcaaaagcttggaagatatctgccctgccgagcactagctcctgccagtaattgtagtcatgcacgcggaagcctaataatgtttatatgtctgttgaacagggtgttaccatgcctaattctaatgttgcccagtgatgttgagaactgtgcagtagaagcgtaagattgaaactggggaacgacgactagaattctgaacacatgtttctagtcgcctaggactatccgtcttcttctcgacaacactatcactatatataaacttgaccttaggattagtactgctattggtgctagtagtttatttgaattgaagtaatttgcgtaggttctgagcgagaattgccttaagcttgcccagctacacacaccccaagaaacttgctaacgccagtgagccgatcttgcttacccacggcagcaagaggaaaacttgcttgcacgagcttccaggtgaatagcaagccatccaacacgccttcgctcgcttcatttccttgccggcgaggaggcaagtattctgaacggaaccaaagacacttaggccagggcccttattggaagtgtagtatttttgaaacaatactatggtatttgacaatactatagtattgtaacttaaaagttgtttggattgtacagacaaagtatagttttaaataccatggtttatccaaaaccgtggtatttttggaaactccactcatgacctcagttttctctctttcctctataaatactttgtttttccaatggaatcaaatatatctcggt

SEQ ID NO: 220009 - DNA, 2019 bp, Zea Mays
ggaacaactgaacggccggcagtggcagaggatgcggctgcgtccgacctccttgcttttcgagaatccactgccttcgattcctagtttcccacggcagggcagcctcatcggatcccatgagccggcccacgggcgcgtggcgactagggatggcaacgtgtacaataccagcagcaccgcgtgcgcatgtgggccgcctccccggcattcggcaggcagctcgtcctgctctactgcttccttccttctcctcctccactctcctctgtcaccggcttccccccatcctgcccctcgtgctccagctcctccgggtccgggccaaccacgcgatggcggcgtccgccgggacggtgtacgaggcggacgcggaggccgtcgtgcgccggatcacgccggcactcgaccgcgccagacacaagggccaggcagggaagatagcagtaatcggaggatgtcgtgagtacactggagctccttattttgccgctatctctgccttgaaagttatctttcacatgttttctgcacgaaagatgctgctacagtaattaagagctatagccctgaactaattgtacatccaatattagaagaatcttacagtgtaagggttgatgaacgagcatctgtttcttctaagattcttacggaagttgcaaagtggatggagcgctttgattgcattgttgttggtcctggccttggaagggacccctttcttctggaatgtgtgagtaatatcatgaggcacgcacgacaggctaatattccaactgttgtggatggggatggcctatttcttgtaaacaataaccttaatcttgttgaaggaaaccctcttgccattttaacaccaaatgtctatgagtacaagcgtcttgttcagaaggttcttaactgtgacgtagatgaggaaagtgcttctgagcagctaatcgcactttgccaaaaaattggtgatgtaacaataatgcagaaaggaaaagctgatgtcatcagtgacggtaaaacagttacacaagtgagtacttttggttccccaagacggtgtggtggtcaaggtgacatcctttctggaagtgtggcagtatttgcatcatgggcacgacactttgtcttgacaaacgaagaacctacagagaaaagctgcctcccttctactccggaaagctgcgtcacatgcttttgagaagaacaagagatcgactgtcacctctgatatcattgagttcttgggcaaaagcttggaagatatctgccctgccgagcactagctcctgccagtaattgtagtcatgcacgcggaagcctaataatgtttatatgtctgttgaacagggtgttaccatgcctaattctaatgttgcccagtgatgttgagaactgtgcagtagaagcgtaagattgaaactggggaacgacgactagaattctgaacacatgtttctagtcgcctaggactatccgtcttcttctcgacaacactatcactatatataaacttgaccttaggattagtactgctattggtgctagtagtttatttgaattgaagtaatttgcgtaggttctgagcgagaattgccttaagcttgcccagctacacacaccccaagaaacttgctaacgccagtgagccgatcttgcttacccacggcagcaagaggaaaacttgcttgcacgagcttccaggtgaatagcaagccatccaacacgccttcgctcgcttcatttccttgccggcgaggaggcaagtattctgaacggaaccaaagacacttaggccagggcccttattggaagtgtagtatttttgaaacaatactatggtatttgacaatactatagtattgtaacttaaaagttgtttggattgtacagacaaagtatagttttaaataccatggtttatccaaaaccgtggtatttttggaaactccactcatgacctcagttttctctctttcctctataaatactttgtttttccaatggaatcaaatatatctcggt

SEQ ID NO: 220010 - DNA, 3229 bp, Zea Mays
ttgttggagctagtctaagtcggataatacacaggtttatactgtacggctgtacccataccgccatacggtcatgccccaaattcttatgcttttcgaaaattacaatcacccacccccaataaaagcgcccacaccctcctgcacctcccttcctcaacctccgccatcaccgacgctgactcccacaccggccgccgcgcgagccccggcaccatctccgcacgagcagaaatgggggatgcgtgtttctcaacacagctaattgatggagatggggtcttcaacgtctctggattggagaacttcatgaaggatgccagattgggtgaatgcgggctctcctatgctgttgtatcaataatgggcccgcaaagtagtgggaaaagtacacttttgaatcatctttttggcaccaattttagggagatggacgccttcagaggaaggtcacagactaccaaaggtatatggttagcgaaggcccagaatattgaaccgtgcacccttgtaatggatttggaaggaactgatggaagggagaggggagaggatgacacagcatttgagaagcaaagtgcattgtttgctttggccgtttcagacattgtgttgattaatatgtggtgtcatgacattggtagagaacaggctgcaaacaagcctcttttgaagactgttttccaggtcatgatgaggttgttcagtcctcgtaaaacaacattgttgtttgtcattcgtgacaaatcaaggacacccctagaaaatcttgaaccaattttaagggaagacattcagaagatatgggatgctgttccaaaaccccatgcccataaagaaactccacttagcgaatttttcgatgtacaagttgtggcactgtccagttatgaagaaaaagaagagttgttcaaacagcaggtttctgatttaagagataggtttcagtattctatcgctcctggtggacttgctggggatcgtcgtggtgtcgtcccagcttcaggattctcgtttagttcccagcaattttggaaagtcattaaggagaacaaagaccttgatctgcctgctcataaagttatggttgctactgtacgttgtgaggaaattggtaatgagaaagtcggcagttttacatctgatgaggaatggcaacaattagaggaggctgttcaacatgactttgttcctggatttgggaagaagatcagcagccttcttgatagatgtttatcagagtatgacatggaggctatttattttgatgaaggtgtcagaagctctaaacggcaacagcttgagtctaaactcctacagcttgtcaatcctgcctatcaatctcttctaggtcacttgcgtactagaactttagaagcatttaatgagtcctttgacaaggctctagaaaaggagggatttgctgcagccgctcgcaattgtactcaaactttcttggagaagtttgataaaggatctgaagatgctgctattcaacaagtgaattgggacacctcaaaagtgaaggataagcttagacgtgacattgaggctcatgtagcttcagttcgagctgctaaattatctgaactttgtgccaaatatgaggcacaacttaccaaagctctggcggaaccagttgaatctcttctagattcagccagtgaagatacgtggccagctattagaaagcttcttcaacgcgagacaaaaactgccgtttcaggtcttcaatctgctgtgtcagcttttgaacttgatgaagcaactgagaaagaactgcttgtgaagctggagaagcatggaaggagtgttgttgagtcaaaggcaaaagaagaagctggaagggttttgattcgcatgaaggacaggttttcaatgctgttcagccgagatgctgactctatgcccagggtgtggacaggaaaggaggacataaaagctataactaaaaccgctcgctcagcttccatgaagttgctttctacaatggctgcaattcggttggaggaggatggtgataacattgagaacactctttccgttgctcttgttgacacctcaaaacctgggactactgataggagtatccaattgaccgatccacttgcctccagttcatgggaaagggttggcgaggagaagactttaattacccctgtgcagtgcaaaaatttgtggaggcaattcaaggctgaaactgaatatacagtgactcaagccttagctgctcaggaagcaaataagaggaacaacaactggctaccacctccatgggcacttgctgcaatggctattcttggattcaacgagttcatgacattactgaggaacccgctttacctgtttgccatatttgtgatttatctcgttggaaaagccatttgggtgcaatcagaaatcggcagggaattccaacacggatttcttcctgccatcctttcactgtcgacgaagtttgtgcccactgtaatgaacatcctgaagagattagccgacgagggtcaagcacctgcagccgccccagagaggcagagagagatggagctccaaccaaaacccaccaggaacggttcttcatacaccaacgcgacgtcggcggggtcatccagcgtaaccacttcggagatcggacctgagtattcgagcccggtggcgcaatgatttagctgacctttagcctttggctggaagcccactctagcgcagttgagggaaacagggtgcctctcgagaacataggaacttaggaagattttaaggacagtcaggtgccttgcagttttttctaagcctgcccttcccccaaactgatgcaaggtggtgatggggtggcactgcccatcactattatttaaggatttttgggggctgggggggttgtttgtaagagcattgtagaatgatttcgtttaatttttttggtttctgtaacatgaatacatgatatgtgatggttgtatagaagatctggggggcgtagtagtgcccattctacacagcttatactgggcagggggttgcatagttgccagaagcttgtacatgtctttaaaccgccatcggattgcgatggagtagtattactggtgttctggaataacacggaggaacgtgttgtgacttggcaggccgttggtaactggctgttctcattcggtagttttgacgcgtgcctcgaaccgattcatatttgagccccatctggcgcagattggcagcgttttta

SEQ ID NO: 220011 - DNA, 1212 bp, Zea Mays
atggacctactttgcgatcaaggactgaaagggatattgttgatgaagaatctgaaaatagttacgaagaatctgacaatcccatcaatgatgaaggaatactatgaaatggatgaatctggtatagattatgttataacatctgcagcaaaaaagtggagagagttaaaggctgttttaaagaacaaatattttgatgaaacattgagttttgaagagcttattgctaaaagggatgaaagggtgaaagaatctgattgggagtggttgataacttattggatgtctccagaagccgaggccgagcaacaaggacgccctgcgagaagagatgaaatatatgttagaacacacacgcgtaagaacaaagaaggggatattgtgcctctacctggagcagaaatattcattaactcaagggtgcatcgttcagatgaggtagcacatgattacaatggtaataaccattcacaaaatatggttgaagatgacttccaacttactaggcgagttgcaagcactatgggtcgtctaaggaatcgtgaagatgttaatactattgaagagcaaagtcacaggcgagacattgcaacaatgctcaagcccatgtgcatcaaagatttcacagagcacaatttcatggatctactcttggagtctttgaagacgttgtcagatctcgataactgtctcgtattatttgaggtcgatgatcattatcaggtgacaaagactgataacatacaggcgctcaaggaggagagaaccaaggccagagccagtgccaccaccaacggcattgaagaccaggaagccctggaggagagaaccaaggccagagccagtgccaccaccaacggcattgaagaccaggaagccctggaggccggtgcatttgtcagcaaggcacagatcaacaatctcctctgcttcatttttttagttctgttttcgttctgcttcactgcttcacttcgttctgcttccactttttcaagcagtgaagctcatcccactactatttttggattctcccgatcatatgtagttctgttgcttctcgaggttcatcagcggccacccatgactgtgaagcctttcctcattcactcgacagttctcttgcatcaggctgttggcgacaatcatgatataaggggcctgattgattgcccgcatcaatggcaatgcaagcctgaccaggctctctag

SEQ ID NO: 220012 - DNA, 675 bp, Zea Mays
acgcggcctccaactccacgcactccgatctactccaagtacgcccaccggcccgcccaccgggccccatcctcctaacccgaccgctactcacctgaaccctgtgtcgtcgcaagcgcgcgaggagatcgcggcggagcacactctacactgtgtgtacgcggaggcggtggccatggcagaggagaaccatgttgctgccggcgccggccagaagctctactggtcccgacaaaccagagccactgcggctcaacgcctgcgtttcgcggcacgttgctacctgcacgctctaacacataccctccacgcaaccgttgtggccgcacaaccccggtcgtaggcatgggcactccacgctcaccatgccccatggtttgcttgtgtaattgcgtgaaggagctacacaccttgggttgttatcattccgacagagagggatgaaaacaaccacacactgtgggtctcctaaaggttacatttgggttgacggtgaattcagttgtatgagccagagaaccaaacattatgggaggagaaccgatttctgaaaatggtatctaaaagaaagactcaggtgagttgatttattcatggttgttttgatctcctaattagaagccagttttattaaaacaagttttatttggaattttaggagaaaatattgtggtt

SEQ ID NO: 220013 - DNA, 1244 bp, Zea Mays
accacccacccgttttatccacgcacggcgtcgaacaccccgcggtcgctcacgtgaggcgccaccccgcgcacccagtcagcgcccgcctccaccacccacccacacgacaaaaatccgccatggccttcgcgctcaaggccgccgccgcggggtcggcgtcgttctccgccgcggggccgaggcggcgcgccgcggcgactggtagggtctcgttccggagcgccgcgcccgtggtcgccgtcagggccgcggcggcggcggccgccgctgtggcggaggacaagcgcagcatctccggcaccttcgccgagctcaggcagcaggggaagactgccttgattcccttcatcactgctggagaccctgacttggccaccacagcaaaagcactcaggatccttgatgcgtgtggttcagacgtgatcgaactgggtgtgccttactccgatccattggctgacggccctgttattcaggcctccgcgacgcgcgctctggcaaagggcaccacatttgaggatgtcatctccatggtaaagggggtgatacctgatctgtcctgccctgtagcgcttttcacatattacaacccgatcctgaagcgtggtgtccccaacttcatgagtattgttaaagaagctggggtacacggtcttgtggtaccagatgttcctttggaagagacagatgtcttgaggagtgaggctgccaaaaacaacctagagctggtgctattgacaacaccgactacaccaaatgaaagaatggagaaaattgcacaggcttcagaaggatttatttatcttgtaagcactgttggagttactggtacacgtgcaaatgtaagcggcaaggtgcaatctcttcttcaggatatcaagaaggtgacagaaaaacccgtggctgttggctttggtgtgtcgactccagagcatgtccggcaggatggggcgcagatggtgtgattatcggtagcgcagtgatgaagacgttggaggaagctgcttctccagaagaaggattgaagaagctagaagagttcgccaagaacctgaaggccgcattgccgtgaaccaaccattttcgttagcaaagaaattaagattttttttttcctttcaatcttggctttcagggttgttggttgttgtgtagtgaaaataattgtgtccctatgttgaatgctcaaatgaataaatcaagatcccatatattatattagcagagcagaaggcagtgtt

SEQ ID NO: 220014 - DNA, 1576 bp, Zea Mays
gccgtcgcgcccgccggccattcattcatagtctctcggtctctcttcctgctactttcttctcctgacggtacttactcgcggccgagatgatgaccccggtcagaacttcttctgcctcgcgttttggggtcgtggggttcttgcttctgcggctctgcctggcttctgcctcgcttcgcttgttcgcctacttggatcgggtgccctgcccatgcgctctgcattttctcgtcacatcgattccgctcgaaacgaagctggtggttcgttttacttcaatccaatgtcgcattccccctcctcctcctcctatccgattggtgtggtgctaacatgtcctttctcttgcgctttgcgaaagcactctcataaggaaaaaaaaaccaaccttgcagtgcagaattctctccgttagtctcaaatctcgctactagagcgctatcaaactctactttctttccaaaagatttcagataaatctttataaatgggggtactttactactctgattctgctgtacaagtagaaggcactaaacatgacctaacagtcaagctggtcgcgttgttttccggcttcaaggaatatgtggcgttaatcatggtgtaatccaaaaaaatccacgtgcaaaatgactgacagcctcttcacgccaccagtcttgctcacgagcctagtccatgctacagtcgagagctggtagaacggatatgcctcgtaattatcggcgtcaccatcgctgttgtcgctgtcccactgctgctagtgctagctactcctacgtacagcaggaagacagggcggggacagccgcgggccccacctagcaacaaagccgggccccacgccctgccagtggtgcatgagaatccaggcccaggcccaggcgggcccctctcgccgtggaggcgtggaggcgttagcgtccgtaattctcgcaggctgtccctgtcgacgggagatgtgtcacgtgtcgaacccctccgccgacgctccagtcgacctgtgtgtgcaatgttggtgtaggtggacggtggtggcggcggcggtacaggccgtggagcgagatcgtcggtgataggactcggtccaaaatgcaatgttgacgtaaaaattggacctaaaactacacgagtcagttttaattgttgcgccaactgctgctgcgtcgtgtacctccacgcggagcagtcggaggcgaagaacggcgcggaccacggaggagagcacttagccatgaacggcggcgcgtcgctagacggcacggaccacggaagcgagcactcagcgacgagcggtggctcagtacacggcggctggcggagacgcggcgctagatgccggcggagacgcgtaaaagtagacggcggctctcagacgagacgagtgaaccccaagccgcgactcgacgagctatggaaagtgtgggctgtagttgggccggaccagcaggcccgaatcgcgttaaaactgctggcggatgcgccgacgcgtccgattgtgagctcacggcacatatggcgtgactgttttgtaactgcatttgcacgtgaaattacacaacctacctag

SEQ ID NO: 220015 - DNA, 1334 bp, Zea Mays
atgttcctaatctgtcgggtccatgaaggcaatttgaaggtcaaagaaatacaccactttactcaagatgatctaatgacagaagatgttttcattctggactgtcacacgagcatatttgtttgggttggtcagcaggtggatgttaaaggcaggttacaagctctggatgctggggagttttcaccgttatggaggggaatgagcctccctttttcactagattcttcacctgggactccgcaaaatcactgatgcatggcaattcataccagaggaagctcgccattgtaaaaggtggaggtgctccagcattggataaaccgaaacgacgaacaaccgtctattcaggaaggagtactacacaagataaatcccaacgctccagaagcatgtccttcagccctgaacgtgtgcgtgttaggggaagatctccagcattcactgcattggctgctaattttgaaagttcaagcaacagaaatctttccactcctccacctgtagttaagaaactttacccgaaatctgttacacctgatccgtcgaatactgcttctaagtcacctgcaattgctgctctggctggttctttggatcacccttctcaaactcctgctctagaattcatgaaaggtggctccgagtcagagaagccaaaacaggagggagatggtaaagaaggtgttgatactgtggccacaagagttgaatctctgactataaatgaagatgtaaaagaaaacgagccagaagatgacgagggccttccgatttacctgtatgaacgtctgaagaccacagctgctgatcctgttactgaaattgatgtcacgaggcgagagacctacttatcttcaactgagttcaaagagaagtttgggataaattgctcttcaacttttttagcctgatcatcaacacttccaatgtaatcaccatctgcaatgccacatcaattttcacattgtcctggatcggtctcctttttcctagtttggatttgttttgctagctaagtagctctcttattcttccagttcataggtgtgctattccctttttcctttttttgtcaagtgctcttcattgattcaaggtcacacaggtttgattctgaggcttgatttttttgtgtatcaactctgcctgctgtgttctttttttgtttttgagatgagttgcggtttgagggagcgataagtatgtacagcagagtgccggcactgtaacatcacaataccgttatctttgatcaatataattattttttgtgtgtaacttaatattgtttttccagaggatttaagggaaatagtagatatgcattagat

SEQ ID NO: 220016 - DNA, 1051 bp, Zea Mays
cgaaaaccctcccttgccttgcccagttgcccccaaaccccagccaccagctataccaatggcggccaccgcgatggaccatgacggcggcgacgacgtggtcacaccaggggagcttctcggaaactcattaaccctcgcggccggacgtggcgcctacgccgacggtcgctctgtgcgcgcgtcggtcaccgggcgccgccgcatcgtgccgcccgcacctggctccgacgaccaggctgcagagatccacggtggaggtggtggggcacaaggcccatggagctgtgccgcagccgggaagcgtcgtcatcgcccgagtaacaaaggttatggctagaatggcctctgcagatatcatgtgtgttgactcaaaggctatcagagaaaagttcactggcatgataaggcagcaagatgttcgtgcaactgaaattgacaaggtggatatgtaccaatcatatcgtcctggggacattgttaaagctatggttctttctcttggtgatgcaagggcatattacctttccactgcgaaaaatgaacttggagtcgtttcagcacaaagcatagctggtggtacattggttccaatcagttggactgagatgcaatgtgatttgaccggtcaaattgagcaaaggaaagttgcaaaggtggaatagatgtgctgtggccctcctgataaatggtggtggcggtatacaaattgtggaccagtgacaccaggtccttgggcggactacccaattctgcgacgcccaacttcattacagctgcattgagcatgggtttttaaaaccctggctgaatttaactagacatgaatcgtagccatgggtcctgtaacccaaccttgggatctgaatcatagccatgggttctgtaacccagtaaccttgcccttgtgatttgttactctgtgagctaatgacattgcagttttccacctcgtgatttctacaagttttgttgcgcattgttgagaacttgagatctgttgctgtctttctggcatgatgtcaaatggctgtaccggacttgtttcaaa

SEQ ID NO: 220017 - DNA, 1124 bp, Zea Mays
ttgctctcaggtccattgacgactagtatcatcattagaaagcccacgtagtcgagcgaggaggaaaggcggcgaaaaccctcccttgccttgcccagttgcccccaaaccccagccaccagctataccaatggcggccaccgcgatggaccatgacggcggcgacgacgtggtcacaccaggggagcttctcggaaactcattaaccctcgcggccggacgtggcgcctacgccgacggtcgctctgtgcgcgcgtcggtcaccgggcgccgccgcatcgtgccgcccgcacctggctccgacgaccagagatccacggtggaggtggtggggcacaaggcccatggagctgtgccgcagccgggaagcgtcgtcatcgcccgagtaacaaaggttatggctagaatggcctctgcagatatcatgtgtgttgactcaaaggctatcagagaaaagttcactggcatgataaggcagcaagatgttcgtgcaactgaaattgacaaggtggatatgtaccaatcatatcgtcctggggacattgttaaagctatggttctttctcttggtgatgcaagggcatattacctttccactgcgaaaaatgaacttggagtcgtttcagcacaaagcatagctggtggtacattggttccaatcagttggactgagatgcaatgtgatttgaccggtcaaattgagcaaaggaaagttgcaaaggtggaatagatgtgctgtggccctcctgataaatggtaaacatgtggtggcggtatacaaattgtggaccagtgacaccaggtccttgggcggactacccaattctgcgacgcccaacttcattacagctgcattgagcatgggtttttaaaaccctggctgaatttaactagacatgaatcgtagccatgggtcctgtaacccaaccttgggatctgaatcatagccatgggttctgtaacccagtaaccttgcccttgtgatttgttactctgtgagctaatgacattgcagttttccacctcgtgatttctacaagttttgttgcgcattgttgagaacttgagatctgttgctgtctttctggcatgatgtcaaatggctgtaccggacttgtttcaaa

SEQ ID NO: 220018 - DNA, 1144 bp, Zea Mays
ggcagaggacagtttagttggtgctggtgctggtggaggaagaagcagcgcagcaggtggcagggatgggtcgcggcggcgggatggggaacccagtcaacgtgggcatcgcggtgcaggcggactgggagaaccgcgagttcatctccaacatctccctcaacgtccgacgcctcttcgacttcctcctcagattcggtcagctcctcttccattccatttccccgcggcctgccctctctcgatctggatctccaacttttggatctggtccgccgccttcgtgcttcataccataccacgcggagcttaattgtccttgctacccgcatattaccttgccctgcccgagcttatgtttagtcattgtgggatggcagacaattgctcaaactacccatgagaccggatgctttaactagtcattgtgggataatcaatattccggcgacgtttgaattgatgtcagacaacacatcctaacagccatccatctacatagcctgcctacctactcgttcggcctgttgctacttaccagcctcatgctcgttgtcaattaggctcgggttttgcatggaatggctgtaacttgcggtcactaagtaccttttaaaaaatagttgatagttgaatcccacacagcaccaacatgggattcagacctcacaaccacttgttgatagttggatcttttgatggtatgtgaatccctttcgagttgctgtgggagaagcaattgttgtacatgaggatgcagcaagagctatgggaaggaaacgcttatgaacaatagatacctggtcgtcctaatttcatgaagctacgacgaagagcaagctggcaagtttgaacgagaagctggacatcctagagcggaagctggaggtgcttgaagtccaagtgggcagcgcgacgaccaacccttccgtcttcaactaggaatcgcgggtttatatgtataaataaatagataaatgtaggtatgaatgttgcttgtaccaacgaattctggtcgctatcaatcatgtaatgtaatggattttgttattattattgtggtatgtgtaaagatgtgcagaattgaaaagataataatagtagaatggagattgggtgggggaagaaaagaaaaaaaggcaag

SEQ ID NO: 220019 - DNA, 2332 bp, Zea Mays
cgcgcgcacactgaaatagctgtgcctctggctgcttcgtcttcctccccttccttgtcctctgcctctgctgcactctgctccacccccttttttctttcccccatccatggtgcagcttttgccggcgctggtggcgctcgcccttctcctcgtcagaccggtggcggatgcggcgatggctaaatacacgttcacagtggggagcatgcagatcagtcagctgtgcagcagcaccagcattattgcggtgaacgggcagctgccgggcccgtcgatagaagtgaacgaaggcgacgatgtcgtcgtcaaggtcgtcaacaactcgccgtacaacgtgaccatccactggcatggtgtgctccagctcatgaccccgtgggcggacggcccgagcatggtgacgcagtgccccatccagcccagcagctcctacacgtaccggttcagcgtgccggggcaggagggcacgctgtggtggcacgcgcactcctccttcctccgcgccacggtgtacggcgccttcatcatccgcccgaggcgcggcaacgcctaccctttcccggcgccggacaaggaggtccccatcgtgctcggctgtcgtcatgagcaggcgagtggtggaaccgcaatgtagtcgacgtcgagagcgacgccatcttggccggtcagcttcccgcccagtccgacgcgttcacagttaacggcaaaaccggcctgctgtaccagtgcgcgaacgagacgttcacggcggtggtggagcccagcacgagggtgctcctccgggtcgtcaacgccggcctcaactcgcacctcttcttcaagctggccggccacaacttcaccgtcgtcgccgtggacgcgggctacacctccaacctcaacacggacacgctcgtgctcgcgccgggccagaccgtggacgcgctcgtcaccaccgccgccgcgcccgggagctactacatggcggtgctggcgcacgacaccatgagcccgctcgcgttcgcggcgtcggacacgaccaccgccaccgcgatcctccagtacaacggcacgtcgtccaccaacccgcccgcgatgcccgccatgccgtccagctccgactccgggacggccaacgccttctacttcgggctgaggggcctgggcgcgcccgcggtgccggcgccggtggacgtgagcatgaccatcgagctgggcctcggccagctgccctgcgacccgtcgcagaccaggtgcaacgggaccgcggccgccgccgcgatgaacggcgtctcgttccgcctcccgtcccccgagacgtctctcctcggggcgcacgtcgacggcgtcgcgggggtcttcacggcagatttcccggacggtccgccgccgagcggcacggcgatgtcggtggggaccaagctcaagaagctcagctacaactcggtggtggagatcgtgctgcagaacccggcggccgtcccgacggagaaccacccgatccacctccacggcttcaacttcttcgtgctggcgcaggggatgggtaccttcgccccgggaagcgtggcctacaacctggtggacccggtggcccgcaacaccatcgccgtgcctggcggtggctgggctgtcatacgcttcgtcgccaacaatccaggcatgtggttctttcactgccacctggacccgcacgtgcctatgggcctgggcatggtgttccaggtggacagcgggacgacgcccggctccacgctccctacgccgccgggggattgggtgggagtatgcgacgcgcagcactacgcggccgcggcggcggtagcagcagcgccggtgccagttccggccccagccccagtcccagcaccaatcctagcgccagcaccagcagaatcgccgttgccacctccgcgcgcggtggaccacaagccgtcgcccaaccttcctcagcgcagggagcacacgggtacctctaattccgctgctggacggagagctaaggggcacctcgcttgtttcttgtgttctgtcctccttttctttcttcttcgtcaacacaaggcctagctcatgggaagctttggcgtgatacccgcgcagaatctgcagttttgttcgttcgtgtaagtaatatgaaattgttttttctttaaatcttttatacacgtgtatatggatttatattctgatgtaattgtgtgaccttttccttctccacgtgggaagttgtgcatagcaaagttcatgtttagggtttattggctctctgtattcatgatagacattgatacaaagtaatatcatacactacggtttgatttgaaagcatagcgtatacttgaattaa

SEQ ID NO: 220020 - DNA, 2002 bp, Zea Mays
cgccgctgcccccagccccctgcgccagcatgcagccggccctgcaggatctcaggccagccccgtccggccactacagcggttggctgccaccgcggctaggccctagccgtccatcatcagctcgacacccagaaagattcattgatggatttaagttttcatgttccgacttcgaatactcaattcattggagatgagcatcgtacttcagcacagatgttatggcaggctatctcggttgaaattgatggtggtggctcctcagagatggcagttgtcacatttgacggaattgcaattcttacaccgaggggtcggtacagtgtggagcttcatcagtcattcttgcgactccaaggacaagctaatgatttcaaaatccagtatagtagtattctccgcctatttgttttaccaaagtttgagacagaggcagttgttgaaagggaactgacattaagtggggagattttggctgagaagtacaaggataggcttgagagctcttataggggtctaatacatgaggtattctccaaggtccttcgtggcctgtctagtgctaaagtgacacggccaagtacattccgcagttgcctagatggatatgcagtcaaatcatcacttaaagctgaagatggtttgctttatccactcgaaaagggcttcttctttctgccaaagcccccaacactaattcctcatgaagagattgagtatgttgagttcgagcgtcatggtgctggaggtgcaagtatatcatctcattactttgaccttttggtcaagctgacaaatgatcaagaacttctcttcagaaacatccaaaggaatgaataccataacctcttcaacttcatcagcggtaagcatttgaaaattctgaatcttggagatggacaaggtagaactagtggtgttactgctgttcttcagagcactgatgatgattctgttgatccacatctggagcggataaaaaatcaggccggtaatgaggaaagtgatgaagaggatgaagattttgtggcagacaaggatgatagtggatctccaaccgatgattctgatgcagaaggctctgatgctagtatgagtggaggagaaaaggagaaaccttccaagaaggaagctagtagctcaaagccgcctgtgaagaagaagcagaagagtgggccagatgaaggttctcaaaaaaagaagccaaagaagaagaaagatcccaatgcccctaagagagctatagctccattcatgtacttctcaaaggctgagcgagctaatatcaagagcagcaatcctgaactggcgaccacagagattgcaaagaagctcggagaaaggtggcaaaagatgacagcggaggagaggcagccatatgtggagcagtctcaggtcgacaagcaacgctatgcagaagagtctgcagcctaccgtggtgcagccgctcagcagggctctggtgctggatcggaatgaaggtttaatcgtctcgacagttaacttgcaaggctggatgattgagtcgtcagaataaagctggaatacccaaaaacctaagctgaatgtcatcgtttgacctgttgggttgttccggaattcaaccaggattcattctagttcatcaatgcttatattaattaggcaagcaatctggtctggaatcgatcgaggccgttccctggaaccgaacatacccctaagcaaatcctgccaggtaggacaaaatgtagcagcaggtttaaacaaatttcagagaagtacaagtattttttgcataagaagtacacaattacaactgttttgacatgtatcatagaactacaattaattcccttttggcgccatgaaaatacagcacctttgatacttgactaatactatgagaatagctttagttacgtggtatccagtgtcaatagttgtagttatctgatacatgactatagtattagttacatgaaatttacttataatttgaaagatgatcttatgtgtg

SEQ ID NO: 220021 - DNA, 2132 bp, Zea Mays
ccttccctctctcttctgcgccgctcccagcccagcctacagccgccgctgcccccagccccctgcgccagcatgcagccggccctgcaggatctcaggccagccccgtccggccactacagcggttggctgccaccgcggctaggccctagccgtccatcatcagctcgacacccagaaagattcattgatggatttaagttttcatgttccgacttcgaatactcaattcattggagatgagcatcgtacttcagcacagatgttatggcaggctatctcggttgaaattgatggtggtggctcctcagagatggcagttgtcacatttgacggaattgcaattcttacaccgaggggtcggtacagtgtggagcttcatcagtcattcttgcgactccaaggacaagctaatgatttcaaaatccagtatagtagtattctccgcctatttgttttaccaaagtcacacaatccacatacctttgtggttatcacacttgatccaccaattcgcaaaggacaaactttgtatcctcacattgttattcagtttgagacagaggcagttgttgaaagggaactgacattaagtggggagattttggctgagaagtacaaggataggcttgagagctcttataggggtctaatacatgaggtattctccaaggtccttcgtggcctgtctagtgctaaagtgacacggccaagtacattccgcagttgcctagatggatatgcagtcaaatcatcacttaaagctgaagatggtttgctttatccactcgaaaagggcttcttctttctgccaaagcccccaacactaattcctcatgaagagattgagtatgttgagttcgagcgtcatggtgctggaggtgcaagtatatcatctcattactttgaccttttggtcaagctgacaaatgatcaagaacttctcttcagaaacatccaaaggaatgaataccataacctcttcaacttcatcagcggtaagcatttgaaaattctgaatcttggagatggacaaggtagaactagtggtgttactgctgttcttcagagcactgatgatgattctgttgatccacatctggagcggataaaaaatcaggccggtaatgaggaaagtgatgaagaggatgaagattttgtggcagacaaggatgatagtggatctccaaccgatgattctgatgcagaaggctctgatgctagtatgagtggaggagaaaaggagaaaccttccaagaaggaagctagtagctcaaagccgcctgtgaagaagaagcagaagagtgggccagatgaaggttctcaaaaaaagaagccaaagaagaagaaagatcccaatgcccctaagagagctatagctccattcatgtacttctcaaaggctgagcgagctaatatcaagagcagcaatcctgaactggcgaccacagagattgcaaagaagctcggagaaaggtggcaaaagatgacagcggaggagaggcagccatatgtggagcagtctcaggtcgacaagcaacgctatgcagaagagtctgcagcctaccgtggtgcagccgctcagcagggctctggtgctggatcggaatgaaggtttaatcgtctcgacagttaacttgcaaggctggatgattgagtcgtcagaataaagctggaatacccaaaaacctaagctgaatgtcatcgtttgacctgttgggttgttccggaattcaaccaggattcattctagttcatcaatgcttatattaattaggcaagcaatctggtctggaatcgatcgaggccgttccctggaaccgaacatacccctaagcaaatcctgccaggtaggacaaaatgtagcagcaggtttaaacaaatttcagagaagtacaagtattttttgcataagaagtacacaattacaactgttttgacatgtatcatagaactacaattaattcccttttggcgccatgaaaatacagcacctttgatacttgactaatactatgagaatagctttagttacgtggtatccagtgtcaatagttgtagttatctgatacatgactatagtattagttacatgaaatttacttataatttgaaagatgatcttatgtgtg

SEQ ID NO: 220022 - DNA, 2134 bp, Zea Mays
cagcccccttccctctctcttctgcgccgctcccagcccagcctacagccgccgctgcccccagccccctgcgccagcatgcagccggccctgcaggatctcaggccagccccgtccggccactacagcggttggctgccaccgcggctaggccctagccgtccatcatcagctcgacacccagattcattgatggatttaagttttcatgttccgacttcgaatactcaattcattggagatgagcatcgtacttcagcacagatgttatggcaggctatctcggttgaaattgatggtggtggctcctcagagatggcagttgtcacatttgacggaattgcaattcttacaccgaggggtcggtacagtgtggagcttcatcagtcattcttgcgactccaaggacaagctaatgatttcaaaatccagtatagtagtattctccgcctatttgttttaccaaagtcacacaatccacatacctttgtggttatcacacttgatccaccaattcgcaaaggacaaactttgtatcctcacattgttattcagtttgagacagaggcagttgttgaaagggaactgacattaagtggggagattttggctgagaagtacaaggataggcttgagagctcttataggggtctaatacatgaggtattctccaaggtccttcgtggcctgtctagtgctaaagtgacacggccaagtacattccgcagttgcctagatggatatgcagtcaaatcatcacttaaagctgaagatggtttgctttatccactcgaaaagggcttcttctttctgccaaagcccccaacactaattcctcatgaagagattgagtatgttgagttcgagcgtcatggtgctggaggtgcaagtatatcatctcattactttgaccttttggtcaagctgacaaatgatcaagaacttctcttcagaaacatccaaaggaatgaataccataacctcttcaacttcatcagcggtaagcatttgaaaattctgaatcttggagatggacaaggtagaactagtggtgttactgctgttcttcagagcactgatgatgattctgttgatccacatctggagcggataaaaaatcaggccggtaatgaggaaagtgatgaagaggatgaagattttgtggcagacaaggatgatagtggatctccaaccgatgattctgatgcagaaggctctgatgctagtatgagtggaggagaaaaggagaaaccttccaagaaggaagctagtagctcaaagccgcctgtgaagaagaagcagaagagtgggccagatgaaggttctcaaaaaaagaagccaaagaagaagaaagatcccaatgcccctaagagagctatagctccattcatgtacttctcaaaggctgagcgagctaatatcaagagcagcaatcctgaactggcgaccacagagattgcaaagaagctcggagaaaggtggcaaaagatgacagcggaggagaggcagccatatgtggagcagtctcaggtcgacaagcaacgctatgcagaagagtctgcagcctaccgtggtgcagccgctcagcagggctctggtgctggatcggaatgaaggtttaatcgtctcgacagttaacttgcaaggctggatgattgagtcgtcagaataaagctggaatacccaaaaacctaagctgaatgtcatcgtttgacctgttgggttgttccggaattcaaccaggattcattctagttcatcaatgcttatattaattaggcaagcaatctggtctggaatcgatcgaggccgttccctggaaccgaacatacccctaagcaaatcctgccaggtaggacaaaatgtagcagcaggtttaaacaaatttcagagaagtacaagtattttttgcataagaagtacacaattacaactgttttgacatgtatcatagaactacaattaattcccttttggcgccatgaaaatacagcacctttgatacttgactaatactatgagaatagctttagttacgtggtatccagtgtcaatagttgtagttatctgatacatgactatagtattagttacatgaaatttacttataatttgaaagatgatcttatgtgtg

SEQ ID NO: 220023 - DNA, 2425 bp, Zea Mays
atggcggacgctcaccacttcaacaacatctccctcggcggccgtggcggcggtcaccctgggcagttcaaactttactcaggaggcttggcgtggaagaagcaaggaggaggaaagatcattgaggttgataaaggtgatatcactaatgtggcttggatgaggattcctaaatcctaccagctcagcgttgggaccaaggagggcctctgttacagattttttggcttccgcgaacaggatgttagtaacttgactaatttcatagagaagagcactggaatcacgccggaagagaagcagctttctgttagtggccaaaactggggcgggatacaaataaacgggaatatgctttgctttaacgttggttcaaaggaagcttttgaagtctctctagcagatgtggcacagactcagatgcaagggaaaacagatgttgtcctagagttccatgtagatgatactactggagctaacgagaaagattcattgatggatttaagttttcatgttccgacttcgaatactcaattcattggagatgagcatcgtacttcagcacaggctatctcggttgaaattgatggtggtggctcctcagagatggcagttgtcacatttgacggaattgcaattcttacaccgaggggtcggtacagtgtggagcttcatcagtcattcttgcgactccaaggacaagctaatgatttcaaaatccagtatagtagtattctccgcctatttgttttaccaaagtcacacaatccacatacctttgtggttatcacacttgatccaccaattcgcaaaggacaaactttgtatcctcacattgttattcagtttgagacagaggcagttgttgaaagggaactgacattaagtggggagattttggctgagaagtacaaggataggcttgagagctcttataggggtctaatacatgaggtattctccaaggtccttcgtggcctgtctagtgctaaagtgacacggccaagtacattccgcagttgcctagatggatatgcagtcaaatcatcacttaaagctgaagatggtttgctttatccactcgaaaagggcttcttctttctgccaaagcccccaacactaattcctcatgaagagattgagtatgttgagttcgagcgtcatggtgctggaggtgcaagtatatcatctcattactttgaccttttggtcaagctgacaaatgatcaagaacttctcttcagaaacatccaaaggaatgaataccataacctcttcaacttcatcagcggtaagcatttgaaaattctgaatcttggagatggacaaggtagaactagtggtgttactgctgttcttcagagcactgatgatgattctgttgatccacatctggagcggataaaaaatcaggccggtaatgaggaaagtgatgaagaggatgaagattttgtggcagacaaggatgatagtggatctccaaccgatgattctgatgcagaaggctctgatgctagtatgagtggaggagaaaaggagaaaccttccaagaaggaagctagtagctcaaagccgcctgtgaagaagaagcagaagagtgggccagatgaaggttctcaaaaaaagaagccaaagaagaagaaagatcccaatgcccctaagagagctatagctccattcatgtacttctcaaaggctgagcgagctaatatcaagagcagcaatcctgaactggcgaccacagagattgcaaagaagctcggagaaaggtggcaaaagatgacagcggaggagaggcagccatatgtggagcagtctcaggtcgacaagcaacgctatgcagaagagtctgcagcctaccgtggtgcagccgctcagcagggctctggtgctggatcggaatgaaggtttaatcgtctcgacagttaacttgcaaggctggatgattgagtcgtcagaataaagctggaatacccaaaaacctaagctgaatgtcatcgtttgacctgttgggttgttccggaattcaaccaggattcattctagttcatcaatgcttatattaattaggcaagcaatctggtctggaatcgatcgaggccgttccctggaaccgaacatacccctaagcaaatcctgccaggtaggacaaaatgtagcagcaggtttaaacaaatttcagagaagtacaagtattttttgcataagaagtacacaattacaactgttttgacatgtatcatagaactacaattaattcccttttggcgccatgaaaatacagcacctttgatacttgactaatactatgagaatagctttagttacgtggtatccagtgtcaatagttgtagttatctgatacatgactatagtattagttacatgaaatttacttataatttgaaagatgatcttatgtgtg

SEQ ID NO: 220024 - DNA, 2400 bp, Zea Mays
atggcggacgctcaccacttcaacaacatctccctcggcggccgtggcggcggtcaccctgggcagttcaaactttactcaggaggcttggcgtggaagaagcaaggaggaggaaagatcattgaggttgataaaggtgatatcactaatgtggcttggatgaggattcctaaatcctaccagctcagcgttgggaccaaggagggcctctgttacagattttttggcttccgcgaacaggatgttagtaacttgactaatttcatagagaagagcactggaatcacgccggaagagaagcagctttctgttagtggccaaaactggggcgggatacaaataaacgggaatatgctttgctttaacgttggttcaaaggaagcttttgaagtctctctagcagatgtggcacagactcagatgcaagggaaaacagatgttgtcctagagttccatgtagatgatactactggagctaacgagaaagattcattgatggatttaagttttcatgttccgacttcgaatactcaattcattggagatgagcatcgtacttcagcacagatgttatggcaggctatctcggttgaaattgatggtggtggctcctcagagatggcagttgtcacatttgacggaattgcaattcttacaccgaggggtcggtacagtgtggagcttcatcagtcattcttgcgactccaaggacaagctaatgatttcaaaatccatcacacaatccacatacctttgtggttatcacacttgatccaccaattcgcaaaggacaaactttgtatcctcacattgttattcagtttgagacagaggcagttgttgaaagggaactgacattaagtggggagattttggctgagaagtacaaggataggcttgagagctcttataggggtctaatacatgaggtattctccaaggtccttcgtggcctgtctagtgctaaagtgacacggccaagtacattccgcagttgcctagatggatatgcagtcaaatcatcacttaaagctgaagatggtttgctttatccactcgaaaagggcttcttctttctgccaaagcccccaacactaattcctcatgaagagattgagtatgttgagttcgagcgtcatggtgctggaggtgcaagtatatcatctcattactttgaccttttggtcaagctgacaaatgatcaagaacttctcttcagaaacatccaaaggaatgaataccataacctcttcaacttcatcagcggtaagcatttgaaaattctgaatcttggagatggacaaggtagaactagtggtgttactgctgttcttcagagcactgatgatgattctgttgatccacatctggagcggataaaaaatcaggccggtaatgaggaaagtgatgaagaggatgaagattttgtggcagacaaggatgatagtggatctccaaccgatgattctgatgcagaaggctctgatgctagtatgagtggaggagaaaaggagaaaccttccaagaaggaagctagtagctcaaagccgcctgtgaagaagaagcagaagagtgggccagatgaaggttctcaaaaaaagaagccaaagaagaagaaagatcccaatgcccctaagagagctatagctccattcatgtacttctcaaaggctgagcgagctaatatcaagagcagcaatcctgaactggcgaccacagagattgcaaagaagctcggagaaaggtggcaaaagatgacagcggaggagaggcagccatatgtggagcagtctcaggtcgacaagcaacgctatgcagaagagtctgcagcctaccgtggtgcagccgctcagcagggctctggtgctggatcggaatgaaggtttaatcgtctcgacagttaacttgcaaggctggatgattgagtcgtcagaataaagctggaatacccaaaaacctaagctgaatgtcatcgtttgacctgttgggttgttccggaattcaaccaggattcattctagttcatcaatgcttatattaattaggcaagcaatctggtctggaatcgatcgaggccgttccctggaaccgaacatacccctaagcaaatcctgccaggtaggacaaaatgtagcagcaggtttaaacaaatttcagagaagtacaagtattttttgcataagaagtacacaattacaactgttttgacatgtatcatagaactacaattaattcccttttggcgccatgaaaatacagcacctttgatacttgactaatactatgagaatagctttagttacgtggtatccagtgtcaatagttgtagttatctgatacatgactatagtattagttacatgaaatttacttataatttgaaagatgatcttatgtgtg

SEQ ID NO: 220025 - DNA, 2778 bp, Zea Mays
cttcccaagcccacgtcgatcatcgtcttgtgccattgtcagtgccaactgccaacccgccaatcgccagaaagcatgcaccgcatgcatgcagatggttaaagcggaaaacggtacagagaaaatcggatcggaggagaaagtatgcagccgcaccgcatgcacatggccaatcgggtttcaaccacatcaaatggagccacacgcgaggtgacgagcacacacacccggcggagcgaggcgaggcgacgcgcaggcgagaccaccgctacacaaggagcgaatcaggactgctcttccgacggcggtcactgtgcgcgtgacagccaccatcgaccgagatggcggacgctcaccacttcaacaacatctccctcggcggccgtggcggcggtcaccctgggcagttcaaactttactcaggaggcttggcgtggaagaagcaaggaggaggaaagatcattgaggttgataaaggtgatatcactaatgtggcttggatgaggattcctaaatcctaccagctcagcgttgggaccaaggagggcctctgttacagattttttggcttccgcgaacaggatgttagtaacttgactaatttcatagagaagagcactggaatcacgccggaagagaagcagctttctgttagtggccaaaactggggcgggatacaaataaacgggaatatgctttgctttaacgttggttcaaaggaagcttttgaagtctctctagcagatgtggcacagactcagatgcaagggaaaacagatgttgtcctagagttccatgtagatgatactactggagctaacgagaaagattcattgatggatttaagttttcatgttccgacttcgaatactcaattcattggagatgagcatcgtacttcagcacagatgttatggcaggctatctcggttgaaattgatggtggtggctcctcagagatggcagttgtcacatttgacggaattgcaattcttacaccgaggggtcggtacagtgtggagcttcatcagtcattcttgcgactccaaggacaagctaatgatttcaaaatccagtatagtagtattctccgcctatttgttttaccaaagtcacacaatccacatacctttgtggttatcacacttgatccaccaattcgcaaaggacaaactttgtatcctcacattgttattcagtttgagacagaggcagttgttgaaagggaactgacattaagtggggagattttggctgagaagtacaaggataggcttgagagctcttataggggtctaatacatgaggtattctccaaggtccttcgtggcctgtctagtgctaaagtgacacggccaagtacattccgcagttgcctagatggatatgcagtcaaatcatcacttaaagctgaagatggtttgctttatccactcgaaaagggcttcttctttctgccaaagcccccaacactaattcctcatgaagagattgagtatgttgagttcgagcgtcatggtgctggaggtgcaagtatatcatctcattactttgaccttttggtcaagctgacaaatgatcaagaacttctcttcagaaacatccaaaggaatgaataccataacctcttcaacttcatcagcggtaagcatttgaaaattctgaatcttggagatggacaaggtagaactagtggtgttactgctgttcttcagagcactgatgatgattctgttgatccacatctggagcggataaaaaatcaggccggtaatgaggaaagtgatgaagaggatgaagattttgtggcagacaaggatgatagtggatctccaaccgatgattctgatgcagaaggctctgatgctagtatgagtggaggagaaaaggagaaaccttccaagaaggaagctagtagctcaaagccgcctgtgaagaagaagcagaagagtgggccagatgaaggttctcaaaaaaagaagccaaagaagaagaaagatcccaatgcccctaagagagctatagctccattcatgtacttctcaaaggctgagcgagctaatatcaagagcagcaatcctgaactggcgaccacagagattgcaaagaagctcggagaaaggtggcaaaagatgacagcggaggagaggcagccatatgtggagcagtctcaggtcgacaagcaacgctatgcagaagagtctgcagcctaccgtggtgcagccgctcagcagggctctggtgctggatcggaatgaaggtttaatcgtctcgacagttaacttgcaaggctggatgattgagtcgtcagaataaagctggaatacccaaaaacctaagctgaatgtcatcgtttgacctgttgggttgttccggaattcaaccaggattcattctagttcatcaatgcttatattaattaggcaagcaatctggtctggaatcgatcgaggccgttccctggaaccgaacatacccctaagcaaatcctgccaggtaggacaaaatgtagcagcaggtttaaacaaatttcagagaagtacaagtattttttgcataagaagtacacaattacaactgttttgacatgtatcatagaactacaattaattcccttttggcgccatgaaaatacagcacctttgatacttgactaatactatgagaatagctttagttacgtggtatccagtgtcaatagttgtagttatctgatacatgactatagtattagttacatgaaatttacttataatttgaaagatgatcttatgtgtg

SEQ ID NO: 220026 - DNA, 4205 bp, Zea Mays
gcacggttctgcctccgcgcctttccatcgccagcgcgttcttcgtgctctgtcaatctcgcagcagcgccactctcttccccacttccccaccgtggtccccccttccccacccaccggagaccgcgccattccccccttccccaccgcgaccaccagaccggcatggcgcatacctgagattgcgctctccccaccggatccggcttggcgcacaccggagaccacgcccttcacccttccccaccgtggccaccggatcccgcacacgcgcgctccggcatggcgcatccacagcacgaacgcccggaatggagcagcgtgcgtccatgtacccaccggagaccaggccattcaccaccgcagtgcccccaccctcatcatcctcgcgtccccccgtcgctacagccgccaagttggtctgcagggaggtccccccctcaccgcgccacgctcgccgcgcccgccgctcggtcctcgccgcgacatgcgcctaccctcacctacacgatgctcactcctccgcacatcgcaaagccgaaggtccacgccccctccgtgctgtgaccccctcccttgtgtgcccatgatgctggaagggaagtcctaccttgtgccgcgctccctgctaagctcctgcgagatagagacacagtgggcgtacttcgcccacgaggtccacggcggcaagcgcctggcgccggaagactgcgaggtcgaagacctggacaaagctgacgtcggcggcaagcgcagcaagccgccgtctccacagccgcacacgccggacatctccgagggtcgcggctccagccgccatgcctccggttgcggagagcagcagggcactgggagcaaccccatgaattcaatcgaccgtgacctgaccctcaatagcctcctccggactattgaatagggcaaggaagatgtgacgaaaaggtaaggggtttcgatcggagatggcagcggcggcgaccgcacatagagccagcttcccgttgcgtctgcagtagatccttgctggaagctgcgccgtcgcacctgtggtcaaggtcgagtctgagccgattttgtggggtcctagatccagacgtcggtcgacaggtcgctggcgtcagtggaccacgtcgcctatcgcggttgtggagcggagctgtgagcagatcccaagtccaatgacgaagagggagtctcggtagggtgcgataaggcgcgatgaggtcagacacggagcacggacgtgtcctcagtcgctgttgtcatgtgtcagtggatgcagtcgtcgctatcgcccacaagaaacctcgcttcgtggaaagattagtatttaacatttggatgaggaagtcaaggacaccgacctcaagcgctctaccaggaagtccgaggaggccgtcctcgccgacctcgcttggctcggcctcgaatgggaggaagacctgttggtggaagggtgtttttcacaaatatgaagatagccttctcagcactgagcttgattatcttcctaacaacacacacgaattgtccaactgtaagatctgcagggacgaggtacctgcaaagtgatggccatcagaaaatcagaacagcttacggctgcaactcgcttttgatgtgtgcaataatgctttaatgcagtagcatttcttttcgtacagaacggtaacatggctccttcagtcctatatgaaactaaaatcaccttttgtaattgtagaccacaaaacatggaaaccataatagatatttaactcagcatggaacgatggaaattggtgcatctttgatagatgaatgcaacagggttcaatgctatgcattatgttcattttcatgggttagtgggttttgacaagaattctgtgtgtactttcgttagttgtttccttattatcctgtttaaatattttttgtttatttctcctggccttcaattttgataattactactaacatactctaacaccctactataaccagcggcagagctctcgcctcttggcaaggtggggccattaccataccttgagtttcttccgtacctactgtaatatgctgtttcatttgctaactatgctataaatcatgctacattgttctgcttgactgtctacgccatacctcaattcccacctgtcctctgctaatgcatgaaatatcctttttagggttaatttgggaacccccatttttcgaagggattttcatttttccaagggaaaatgaactaatttcccttgggaaaatctgaaaatgtggttcccaaactagcccttaaggtctattttgaaaacgggatcccccctgttcctgtgttttttcatatgaaattgaactaattcctgtgaaatttctatgaagatcgccaccaacctatcattcttacctttttctgtcatgtctctaatctgcatgtagcgttctgtaaggagcatctaaatattttggccttgtttatgttccttatgttcttagcaagcaatgtgtaaacgatgaacgaggtcattttactgatgtatttttggacatcactgtccaaatgatgtttattggctgatcatcttttttacttgtgtaggtgctcataaaagaacacctgtgatgcctagaaggaaccctccaccacctccaagagagcaatctaatagtttttttaccgcatggaagctcaaaggcaggagatgcaccgttaggtgcattttgggtgacataacatgcacgaggtgctcaagctgtagttaacaggaaccctttgtttgatggggagtcaattaaggcatcactgtcatcaaagcagaaccaaagctgggtggacaccagcatcagtattcctggcaataggcatgatcattccggtcagatgtcactgacaagtaaagcacaaaataactctttgtccaataatgtttttagaggtctctctgacacggagatacaaaattcttggaaaagtagagcagaacaacctcaacccgagccaaaatgtgagaaagacccatttaacagctttgttgcagattttgacactcacaatctcaacattgccgttggtaaggcatccgaacttgaacttgaagtctccaatctaaaggagcagttgaagaaaatcacattagaaaaggctgagatgacaaccaagcatgaaaagttatctgcaatctgccgatcacagcgtcaggagatccaagagctgaagctcactcttgttgagccaacgcctccctcaaacaaagtcagctcaaggacacaagattctggatctcagcgaaaggaaaagatccaaggcactgtgtgggagcttgaacaagggatgcttgctattgctagcaactcctcatcagccagttctgatgccaaaacatggcaggctttccctgacacaaagactcaggcccgaccaaaggtcgatcatgcaactaatgggagccaaaacataaccaagaacacaacgtcaggtgcttcccccgatgcgtggggttttggtactgataatttcagaacaccagcaacaacattaagagctaccacacagatcaacagggcagctgcccaacggagctcatcccaaagatttaacgctggtgtggccaagagccagtctcggagctgcttccccagggtgaaagtcgtgcacacgtcgctgcagcgggacaacaggtactacgagcgcgaaaacttgctgatggtcatcaagaacaacctgttgtggcaccaccttagcatgggcctgggctatgatgactccaactccaacgatagcggcgtgtcacctagctcggaccgtgcgaacaacatagaggtcgccacagtgtcgccggtgccggcggtcgtcaagaagcaggcgaggttcctggtggcctcacctaggagccccgacgtgaatgagaccatgatggaggagctgcacgagctgtgcgaggcgcgggaggccggcaccgcgttcatcatggagcactcggcatgtggagaccaagcccgggtcgtcactgctcaagaggctgacatgtgaatttgatggacaacatgtatcctcaatgatcgctcgagtgctcagtgagccataatatcgtgaaaattctatgtgcttgtatgtttcgttttctttttataaatcatattgtaatgctatttctataggtggagggtgataaatgtatcaatttatctttatggttaatattgttgtaaagattttgaac

SEQ ID NO: 220027 - DNA, 4858 bp, Zea Mays
gcacggttctgcctccgcgcctttccatcgccagcgcgttcttcgtgctctgtcaatctcgcagcagcgccactctcttccccacttccccaccgtggtccccccttccccacccaccggagaccgcgccattccccccttccccaccgcgaccaccagaccggcatggcgcatacctgagattgcgctctccccaccggatccggcttggcgcacaccggagaccacgcccttcacccttccccaccgtggccaccggatcccgcacacgcgcgctccggcatggcgcatccacagcacgaacgcccggaatggagcagcgtgcgtccatgtacccaccggagaccaggccattcaccaccgcagtgcccccaccctcatcatcctcgcgtccccccgtcgctacagccgccaagttggtctgcagggaggtccccccctcaccgcgccacgctcgccgcgcccgccgctcggtcctcgccgcgacatgcgcctaccctcacctacacgatgctcactcctccgcacatcgcaaagccgaaggtccacgccccctccgtgctgtgaccccctcccttgtgtgcccatgatgctggaagggaagtcctaccttgtgccgcgctccctgctaagctcctgcgagatagagacacagtgggcgtacttcgcccacgaggtccacggcggcaagcgcctggcgccggaagactgcgaggtcgaagacctggacaaagctgacgtcggcggcaagcgcagcaagccgccgtctccacagccgcacacgccggacatctccgagggtcgcggctccagccgccatgcctccggttgcggagagcagcagggcactgggagcaaccccatgaattcaatcgaccgtgacctgaccctcaatagcctcctccggactattgaatagggcaaggaagatgtgacgaaaaggtaaggggtttcgatcggagatggcagcggcggcgaccgcacatagagccagcttcccgttgcgtctgcagtagatccttgctggaagctgcgccgtcgcacctgtggtcaaggtcgagtctgagccgattttgtggggtcctagatccagacgtcggtcgacaggtcgctggcgtcagtggaccacgtcgcctatcgcggttgtggagcggagctgtgagcagatcccaagtccaatgacgaagagggagtctcggtagggtgcgataaggcgcgatgaggtcagacacggagcacggacgtgtcctcagtcgctgttgtcatgtgtcagtggatgcagtcgtcgctatcgcccacaagaaacctcgcttcgtggaaagattagtatttaacatttggatgaggaagtcaaggacaccgacctcaagcgctctaccaggaagtccgaggaggccgtcctcgccgacctcgcttggctcggcctcgaatgggaggaagacctgttggtggaagggtgtttttcacaaatatgaagatagccttctcagcactgagcttgattatcttcctaacaacacacacgaattgtccaactgtaagatctgcagggacgaggtacctgcaaagtgatggccatcagaaaatcagaacagcttacggctgcaactcgcttttgatgtgtgcaataatgctttaatgcagtagcatttcttttcgtacagaacggtaacatggctccttcagtcctatatgaaactaaaatcaccttttgtaattgtagaccacaaaacatggaaaccataatagatatttaactcagcatggaacgatggaaattggtgcatctttgatagatgaatgcaacagggttcaatgctatgcattatgttcattttcatgggttagtgggttttgacaagaattctgtgtgtactttcgttagttgtttccttattatcctgtttaaatattttttgtttatttctcctggccttcaattttgataattactactaacatactctaacaccctactataaccagcggcagagctctcgcctcttggcaaggtggggccattaccataccttgagtttcttccgtacctactgtaatatgctgtttcatttgctaactatgctataaatcatgctacattgttctgcttgactgtctacgccatacctcaattcccacctgtcctctgctaatgcatgaaatatcctttttagggttaatttgggaacccccatttttcgaagggattttcatttttccaagggaaaatgaactaatttcccttgggaaaatctgaaaatgtggttcccaaactagcccttaaggtctattttgaaaacgggatcccccctgttcctgtgttttttcatatgaaattgaactaattcctgtgaaatttctatgaagatcgccaccaacctatcattcttacctttttctgtcatgtctctaatctgcatgtagcgttctgtaaggagcatctaaatattttggccttgtttatgttccttatgttcttagcaagcaatgtgtaaacgatgaacgaggtcattttactgatgtatttttggacatcactgtccaaatgatgtttattggctgatcatcttttttacttgtgtaggtgctcataaaagaacacctgtgatgcctagaaggaaccctccaccacctccaagagagcaatctaatagtttttttaccgcatggaagctcaaaggcaggagatgcaccgttaggtgcattttgggtgacataacatgcacgaggtgctcaagctgtagttaacaggaaccctttgtttgatggggagtcaattaaggcatcactgtcatcaaagcagaaccaaagctgggtggacaccagcatcagtattcctggcaataggcatgatcattccggtcagatgtcactgacaagtaaagcacaaaataactctttgtccaataatgtttttagaggtctctctgacacggagatacaaaattcttggaaaagtagagcagaacaacctcaacccgagccaaaatgtgagaaagacccatttaacagctttgttgcagattttgacactcacaatctcaacattgccgttggtaaggcatccgaacttgaacttgaagtctccaatctaaaggagcagttgaagaaaatcacattagaaaaggctgagatgacaaccaagcatgaaaagttatctgcaatctgccgatcacagcgtcaggagatccaagagctgaagctcactcttgttgagccaacgcctccctcaaacaaagtcagctcaaggacacaagattctggatctcaggtgatttatctacatatgtctaatacagcatattcactctcctgaagtttattagcatcttgcatagtatttatactccatgcagcgaaaggaaaagatccaaggcactgtgtgggagcttgaacaagggatgcttgctattgctagcaactcctcatcagccagttctgatgccaaaacatggcaggctttccctgacacaaagactcaggcccgaccaaaggtcgatcatgcaactaatgggagccaaaacataaccaagaacacaacgtcaggtgcttcccccgatgcgtggggttttggtactgataatttcagaacaccagcaacaacattaagagctaccacacagatcaacagggcagctgcccaacggagctcatcccaaagatttaacgctggtgtggccaaggtagagcagccatctggatgggctggtttttaacttcaatcgacatgcgttaaccatcattctgatcaacatttacaatctgcgctacacaactgctgttgccgatggagttgtgatctttgacatccacagggcatcaaaattggttatttttagtgtgttcatcaattttggttgagccaactttgatattgattcatgagatcacttgaaattatccgttgttaatctctactactccttatgtttgtatcgtaggcgtccacattcgaggatggtgcacagttctgccatcgcgctccctccgcgctccatccgtcctccgctctcgatcctcgaatcccgcggctccatcctcgaatccagcgctccctccgcactccatccgtctccctccatgctccatccgtcctctgcgctcaatcctcgaatccctccgtgctccatccatcttccgccgcctctgtgatgaacacgggaagcgtacaatgacctggtgctggcgatcttggcatcagtgatgggcagtcaatccatcataagcaggaccttttccatcatcaatcagagccagtctcggagctgcttccccagggtgaaagtcgtgcacacgtcgctgcagcgggacaacaggtactacgagcgcgaaaacttgctgatggtcatcaagaacaacctgttgtggcaccaccttagcatgggcctgggctatgatgactccaactccaacgatagcggcgtgtcacctagctcggaccgtgcgaacaacatagaggtcgccacagtgtcgccggtgccggcggtcgtcaagaagcaggcgaggttcctggtggcctcacctaggagccccgacgtgaatgagaccatgatggaggagctgcacgagctgtgcgaggcgcgggaggccggcaccgcgttcatcatggagcactcggcatgtggagaccaagcccgggtcgtcactgctcaagaggctgacatgtgaatttgatggacaacatgtatcctcaatgatcgctcgagtgctcagtgagccataatatcgtgaaaattctatgtgcttgtatgtttcgttttctttttataaatcatattgtaatgctatttctataggtggagggtgataaatgtatcaatttatctttatggttaatattgttgtaaagattttgaac

SEQ ID NO: 220028 - DNA, 2841 bp, Zea Mays
gcacggttctgcctccgcgcctttccatcgccagcgcgttcttcgtgctctgtcaatctcgcagcagcgccactctcttccccacttccccaccgtggtccccccttccccacccaccggagaccgcgccattccccccttccccaccgcgaccaccagaccggcatggcgcatacctgagattgcgctctccccaccggatccggcttggcgcacaccggagaccacgcccttcacccttccccaccgtggccaccggatcccgcacacgcgcgctccggcatggcgcatccacagcacgaacgcccggaatggagcagcgtgcgtccatgtacccaccggagaccaggccattcaccaccgcagtgcccccaccctcatcatcctcgcgtccccccgtcgctacagccgccaagttggtctgcagggaggtccccccctcaccgcgccacgctcgccgcgcccgccgctcggtcctcgccgcgacatgcgcctaccctcacctacacgatgctcactcctccgcacatcgcaaagccgaaggtccacgccccctccgtgctgtgaccccctcccttgtgtgcccatgatgctggaagggaagtcctaccttgtgccgcgctccctgctaagctcctgcgagatagagacacagtgggcgtacttcgcccacgaggtccacggcggcaagcgcctggcgccggaagactgcgaggtcgaagacctggacaaagctgacgtcggcggcaagcgcagcaagccgccgtctccacagccgcacacgccggacatctccgagggtcgcggctccagccgccatgcctccggttgcggagagcagcagggcactgggagcaaccccatgaattcaatcgaccgtgacctgaccctcaatagcctcctccggactattgaatagggcaaggaagatgtgacgaaaaggtaaggggtttcgatcggagatggcagcggcggcgaccgcacatagagccagcttcccgttgcgtctgcagtagatccttgctggaagctgcgccgtcgcacctgtggtcaaggtcgagtctgagccgattttgtggggtcctagatccagacgtcggtcgacaggtcgctggcgtcagtggaccacgtcgcctatcgcggttgtggagcggagctgtgagcagatcccaagtccaatgacgaagagggagtctcggtagggtgcgataaggcgcgatgaggtcagacacggagcacggacgtgtcctcagtcgctgttgtcatgtgtcagtggatgcagtcgtcgctatcgcccacaagaaacctcgcttcgtggaaagattagtatttaacatttggatgaggaagtcaaggacaccgacctcaagcgctctaccaggaagtccgaggaggccgtcctcgccgacctcgcttggctcggcctcgaatgggaggaaggtgctcataaaagaacacctgtgatgcctagaaggaaccctccaccacctccaagagagcaatctaatagtttttttaccgcatggaagctcaaaggcaggagatgcaccgttagaggtctctctgacacggagatacaaaattcttggaaaagtagagcagaacaacctcaacccgagccaaaatgtgagaaagacccatttaacagctttgttgcagattttgacactcacaatctcaacattgccgttggtaaggcatccgaacttgaacttgaagtctccaatctaaaggagcagttgaagaaaatcacattagaaaaggctgagatgacaaccaagcatgaaaagttatctgcaatctgccgatcacagcgtcaggagatccaagagctgaagctcactcttgttgagccaacgcctccctcaaacaaagtcagctcaaggacacaagattctggatctcagcgaaaggaaaagatccaaggcactgtgtgggagcttgaacaagggatgcttgctattgctagcaactcctcatcagccagttctgatgccaaaacatggcaggctttccctgacacaaagactcaggcccgaccaaaggtcgatcatgcaactaatgggagccaaaacataaccaagaacacaacgtcaggtgcttcccccgatgcgtggggttttggtactgataatttcagaacaccagcaacaacattaagagctaccacacagatcaacagggcagctgcccaacggagctcatcccaaagatttaacgctggtgtggccaagagccagtctcggagctgcttccccagggtgaaagtcgtgcacacgtcgctgcagcgggacaacaggtactacgagcgcgaaaacttgctgatggtcatcaagaacaacctgttgtggcaccaccttagcatgggcctgggctatgatgactccaactccaacgatagcggcgtgtcacctagctcggaccgtgcgaacaacatagaggtcgccacagtgtcgccggtgccggcggtcgtcaagaagcaggcgaggttcctggtggcctcacctaggagccccgacgtgaatgagaccatgatggaggagctgcacgagctgtgcgaggcgcgggaggccggcaccgcgttcatcatggagcactcggcatgtggagaccaagcccgggtcgtcactgctcaagaggctgacatgtgaatttgatggacaacatgtatcctcaatgatcgctcgagtgctcagtgagccataatatcgtgaaaattctatgtgcttgtatgtttcgttttctttttataaatcatattgtaatgctatttctataggtggagggtgataaatgtatcaatttatctttatggttaatattgttgtaaagattttgaac

SEQ ID NO: 220029 - DNA, 3629 bp, Zea Mays
gcacggttctgcctccgcgcctttccatcgccagcgcgttcttcgtgctctgtcaatctcgcagcagcgccactctcttccccacttccccaccgtggtccccccttccccacccaccggagaccgcgccattccccccttccccaccgcgaccaccagaccggcatggcgcatacctgagattgcgctctccccaccggatccggcttggcgcacaccggagaccacgcccttcacccttccccaccgtggccaccggatcccgcacacgcgcgctccggcatggcgcatccacagcacgaacgcccggaatggagcagcgtgcgtccatgtacccaccggagaccaggccattcaccaccgcagtgcccccaccctcatcatcctcgcgtccccccgtcgctacagccgccaagttggtctgcagggaggtccccccctcaccgcgccacgctcgccgcgcccgccgctcggtcctcgccgcgacatgcgcctaccctcacctacacgatgctcactcctccgcacatcgcaaagccgaaggtccacgccccctccgtgctgtgaccccctcccttgtgtgcccatgatgctggaagggaagtcctaccttgtgccgcgctccctgctaagctcctgcgagatagagacacagtgggcgtacttcgcccacgaggtccacggcggcaagcgcctggcgccggaagactgcgaggtcgaagacctggacaaagctgacgtcggcggcaagcgcagcaagccgccgtctccacagccgcacacgccggacatctccgagggtcgcggctccagccgccatgcctccggttgcggagagcagcagggcactgggagcaaccccatgaattcaatcgaccgtgacctgaccctcaatagcctcctccggactattgaatagggcaaggaagatgtgacgaaaaggtaaggggtttcgatcggagatggcagcggcggcgaccgcacatagagccagcttcccgttgcgtctgcagtagatccttgctggaagctgcgccgtcgcacctgtggtcaaggtcgagtctgagccgattttgtggggtcctagatccagacgtcggtcgacaggtcgctggcgtcagtggaccacgtcgcctatcgcggttgtggagcggagctgtgagcagatcccaagtccaatgacgaagagggagtctcggtagggtgcgataaggcgcgatgaggtcagacacggagcacggacgtgtcctcagtcgctgttgtcatgtgtcagtggatgcagtcgtcgctatcgcccacaagaaacctcgcttcgtggaaagattagtatttaacatttggatgaggaagtcaaggacaccgacctcaagcgctctaccaggaagtccgaggaggccgtcctcgccgacctcgcttggctcggcctcgaatgggaggaaggtgctcataaaagaacacctgtgatgcctagaaggaaccctccaccacctccaagagagcaatctaatagtttttttaccgcatggaagctcaaaggcaggagatgcaccgttaggtgcattttgggtgacataacatgcacgaggtgctcaagctgtagttaacaggaaccctttgtttgatggggagtcaattaaggcatcactgtcatcaaagcagaaccaaagctgggtggacaccagcatcagtattcctggcaataggcatgatcattccggtcagatgtcactgacaagtaaagcacaaaataactctttgtccaataatgtttttagaggtctctctgacacggagatacaaaattcttggaaaagtagagcagaacaacctcaacccgagccaaaatgtgagaaagacccatttaacagctttgttgcagattttgacactcacaatctcaacattgccgttggtaaggcatccgaacttgaacttgaagtctccaatctaaaggagcagttgaagaaaatcacattagaaaaggctgagatgacaaccaagcatgaaaagttatctgcaatctgccgatcacagcgtcaggagatccaagagctgaagctcactcttgttgagccaacgcctccctcaaacaaagtcagctcaaggacacaagattctggatctcagcgaaaggaaaagatccaaggcactgtgtgggagcttgaacaagggatgcttgctattgctagcaactcctcatcagccagttctgatgccaaaacatggcaggctttccctgacacaaagactcaggcccgaccaaaggtcgatcatgcaactaatgggagccaaaacataaccaagaacacaacgtcaggtgcttcccccgatgcgtggggttttggtactgataatttcagaacaccagcaacaacattaagagctaccacacagatcaacagggcagctgcccaacggagctcatcccaaagatttaacgctggtgtggccaaggtagagcagccatctggatgggctggtttttaacttcaatcgacatgcgttaaccatcattctgatcaacatttacaatctgcgctacacaactgctgttgccgatggagttgtgatctttgacatccacagggcatcaaaattggttatttttagtgtgttcatcaattttggttgagccaactttgatattgattcatgagatcacttgaaattatccgttgttaatctctactactccttatgtttgtatcgtaggcgtccacattcgaggatggtgcacagttctgccatcgcgctccctccgcgctccatccgtcctccgctctcgatcctcgaatcccgcggctccatcctcgaatccagcgctccctccgcactccatccgtctccctccatgctccatccgtcctctgcgctcaatcctcgaatccctccgtgctccatccatcttccgccgcctctgtgatgaacacgggaagcgtacaatgacctggtgctggcgatcttggcatcagtgatgggcagtcaatccatcataagcaggaccttttccatcatcaatcagagccagtctcggagctgcttccccagggtgaaagtcgtgcacacgtcgctgcagcgggacaacaggtactacgagcgcgaaaacttgctgatggtcatcaagaacaacctgttgtggcaccaccttagcatgggcctgggctatgatgactccaactccaacgatagcggcgtgtcacctagctcggaccgtgcgaacaacatagaggtcgccacagtgtcgccggtgccggcggtcgtcaagaagcaggcgaggttcctggtggcctcacctaggagccccgacgtgaatgagaccatgatggaggagctgcacgagctgtgcgaggcgcgggaggccggcaccgcgttcatcatggagcactcggcatgtggagaccaagcccgggtcgtcactgctcaagaggctgacatgtgaatttgatggacaacatgtatcctcaatgatcgctcgagtgctcagtgagccataatatcgtgaaaattctatgtgcttgtatgtttcgttttctttttataaatcatattgtaatgctatttctataggtggagggtgataaatgtatcaatttatctttatggttaatattgttgtaaagattttgaac

SEQ ID NO: 220030 - DNA, 4406 bp, Zea Mays
gcacggttctgcctccgcgcctttccatcgccagcgcgttcttcgtgctctgtcaatctcgcagcagcgccactctcttccccacttccccaccgtggtccccccttccccacccaccggagaccgcgccattccccccttccccaccgcgaccaccagaccggcatggcgcatacctgagattgcgctctccccaccggatccggcttggcgcacaccggagaccacgcccttcacccttccccaccgtggccaccggatcccgcacacgcgcgctccggcatggcgcatccacagcacgaacgcccggaatggagcagcgtgcgtccatgtacccaccggagaccaggccattcaccaccgcagtgcccccaccctcatcatcctcgcgtccccccgtcgctacagccgccaagttggtctgcagggaggtccccccctcaccgcgccacgctcgccgcgcccgccgctcggtcctcgccgcgacatgcgcctaccctcacctacacgatgctcactcctccgcacatcgcaaagccgaaggtccacgccccctccgtgctgtgaccccctcccttgtgtgcccatgatgctggaagggaagtcctaccttgtgccgcgctccctgctaagctcctgcgagatagagacacagtgggcgtacttcgcccacgaggtccacggcggcaagcgcctggcgccggaagactgcgaggtcgaagacctggacaaagctgacgtcggcggcaagcgcagcaagccgccgtctccacagccgcacacgccggacatctccgagggtcgcggctccagccgccatgcctccggttgcggagagcagcagggcactgggagcaaccccatgaattcaatcgaccgtgacctgaccctcaatagcctcctccggactattgaatagggcaaggaagatgtgacgaaaaggtaaggggtttcgatcggagatggcagcggcggcgaccgcacatagagccagcttcccgttgcgtctgcagtagatccttgctggaagctgcgccgtcgcacctgtggtcaaggtcgagtctgagccgattttgtggggtcctagatccagacgtcggtcgacaggtcgctggcgtcagtggaccacgtcgcctatcgcggttgtggagcggagctgtgagcagatcccaagtccaatgacgaagagggagtctcggtagggtgcgataaggcgcgatgaggtcagacacggagcacggacgtgtcctcagtcgctgttgtcatgtgtcagtggatgcagtcgtcgctatcgcccacaagaaacctcgcttcgtggaaagattagtatttaacatttggatgaggaagtcaaggacaccgacctcaagcgctctaccaggaagtccgaggaggccgtcctcgccgacctcgcttggctcggcctcgaatgggaggaaggtgctctctccactctatattatgtctattgctctcatataggactcctgtttctccatgagttcttataggaagcaaaattagagtcagaatcatgttgtttctgcattgactttccagacctgttggtggaagggtgtttttcacaaatatgaagatagccttctcagcactgagcttgattatcttcctaacaacacacacgaattgtccaactgtaagatctgcagggacgaggtacctgcaaagtgatggccatcagaaaatcagaacagcttacggctgcaactcgcttttgatgtgtgcaataatgctttaatgcagtagcatttcttttcgtacagaacggtaacatggctccttcagtcctatatgaaactaaaatcaccttttgtaattgtagaccacaaaacatggaaaccataatagatatttaactcagcatggaacgatggaaattggtgcatctttgatagatgaatgcaacagggttcaatgctatgcattatgttcattttcatgggttagtgggttttgacaagaattctgtgtgtactttcgttagttgtttccttattatcctgtttaaatattttttgtttatttctcctggccttcaattttgataattactactaacatactctaacaccctactataaccagcggcagagctctcgcctcttggcaaggtgctcataaaagaacacctgtgatgcctagaaggaaccctccaccacctccaagagagcaatctaatagtttttttaccgcatggaagctcaaaggcaggagatgcaccgttaggtgcattttgggtgacataacatgcacgaggtgctcaagctgtagttaacaggaaccctttgtttgatggggagtcaattaaggcatcactgtcatcaaagcagaaccaaagctgggtggacaccagcatcagtattcctggcaataggcatgatcattccggtcagatgtcactgacaagtaaagcacaaaataactctttgtccaataatgtttttagaggtctctctgacacggagatacaaaattcttggaaaagtagagcagaacaacctcaacccgagccaaaatgtgagaaagacccatttaacagctttgttgcagattttgacactcacaatctcaacattgccgttggtaaggcatccgaacttgaacttgaagtctccaatctaaaggagcagttgaagaaaatcacattagaaaaggctgagatgacaaccaagcatgaaaagttatctgcaatctgccgatcacagcgtcaggagatccaagagctgaagctcactcttgttgagccaacgcctccctcaaacaaagtcagctcaaggacacaagattctggatctcaggtgatttatctacatatgtctaatacagcatattcactctcctgaagtttattagcatcttgcatagtatttatactccatgcagcgaaaggaaaagatccaaggcactgtgtgggagcttgaacaagggatgcttgctattgctagcaactcctcatcagccagttctgatgccaaaacatggcaggctttccctgacacaaagactcaggcccgaccaaaggtcgatcatgcaactaatgggagccaaaacataaccaagaacacaacgtcaggtgcttcccccgatgcgtggggttttggtactgataatttcagaacaccagcaacaacattaagagctaccacacagatcaacagggcagctgcccaacggagctcatcccaaagatttaacgctggtgtggccaaggtagagcagccatctggatgggctggtttttaacttcaatcgacatgcgttaaccatcattctgatcaacatttacaatctgcgctacacaactgctgttgccgatggagttgtgatctttgacatccacagggcatcaaaattggttatttttagtgtgttcatcaattttggttgagccaactttgatattgattcatgagatcacttgaaattatccgttgttaatctctactactccttatgtttgtatcgtaggcgtccacattcgaggatggtgcacagttctgccatcgcgctccctccgcgctccatccgtcctccgctctcgatcctcgaatcccgcggctccatcctcgaatccagcgctccctccgcactccatccgtctccctccatgctccatccgtcctctgcgctcaatcctcgaatccctccgtgctccatccatcttccgccgcctctgtgatgaacacgggaagcgtacaatgacctggtgctggcgatcttggcatcagtgatgggcagtcaatccatcataagcaggaccttttccatcatcaatcagagccagtctcggagctgcttccccagggtgaaagtcgtgcacacgtcgctgcagcgggacaacaggtactacgagcgcgaaaacttgctgatggtcatcaagaacaacctgttgtggcaccaccttagcatgggcctgggctatgatgactccaactccaacgatagcggcgtgtcacctagctcggaccgtgcgaacaacatagaggtcgccacagtgtcgccggtgccggcggtcgtcaagaagcaggcgaggttcctggtggcctcacctaggagccccgacgtgaatgagaccatgatggaggagctgcacgagctgtgcgaggcgcgggaggccggcaccgcgttcatcatggagcactcggcatgtggagaccaagcccgggtcgtcactgctcaagaggctgacatgtgaatttgatggacaacatgtatcctcaatgatcgctcgagtgctcagtgagccataatatcgtgaaaattctatgtgcttgtatgtttcgttttctttttataaatcatattgtaatgctatttctataggtggagggtgataaatgtatcaatttatctttatggttaatattgttgtaaagattttgaac

SEQ ID NO: 220031 - DNA, 1947 bp, Zea Mays
ctctccctctccgctccccattgccgcattgctctccctcggctcggtccctctccggctctccctcacggcctcgcccactgcgccttcgaggagctccgaatcccgatcgcctcggtccccgcgagctcacatggtgggggcgcgcaccagaggctagggttcccagttcccatcattctcctgagcctgaggctgtggcggcggcaggaatgaacggggaggtggaatgcagcgtgtgccatgcgaaggtgccggtgccgccgccggtgtcgaaagcgtacgacagccaccggagcactgtgtcgtcgcggcaacgtgcgctaaacgtgctcctcgtctccggcgactgcgtccttgccggcctccagcctatattagtgtacatctcaaaagtggatgggaaattcaaatttagcccaatcagcgtgaatttcttgacagagattacaaaaattatgtttaccattgtaatgctattcatccaggctagacgtctaaaggtgggagacaagccactttttacagtttcaatatttatgcaggctgctcgcaataatgttcttctttcagtacctgcttttctctatgctatcaacaactatttgaagttcataatgcagttatattttaatcctgctagcgtgaaaatgctgagtaatctcaaggttctggtaatcgcagtgcttcttaagatgataatgaggaggcgattttccgtaatccagtgggaggcccttgcccttttgttaatcggaatatctgttaatcagctgaaatcattgccagaaggttctagtgtgctaggtcttcctgttgcagctggagcctacctatatacattgttttttgtaacagttcccgcattggcttcagtttacaacgaaaaggctcttaaaagccagtttgataccagtatttaccttcagaacttgtttctgtatggttatggtgcgatatttaactttattgggcttgttgtcactgctatcatccaagggcccagtagttttaacattctagaaggccactcaaaggccacgatgtttcttatctgcaacaatgctgcacagggcatattatcatcatttttcttcaagtatgcagatacaattttgaagaagtactcatcaacaattgcgactatcttcaccggagtagcctctgctgtgctgtttggccacacactgacgataaattttgttcttggaatttcaatagtaatcatatctatgcatcagtatctttctaaccaaattaaggacgaagtgcctagcagcaaagttgaaatggctgaagctcatgatcacagcagaaaagaacctagttatgtcaacgtgcctgattcaggggcaagtgagtctaaacaccgccatggatctgacgagaggcagccacttcttcccgtatgattttgtagaagaggcgcactgtttcctcaacagagcagcatgtaaagagagtatttttagcgggtatttgacctaattgtctctgaagcaacattggtgccatgctgttggcggggtaaagtatatgcatattcggcggcagtgacgagcttcgtgaagtacactaatagagtaatggtctttggatgaatgagtcgatacctttagcctaatgggtggtaaaactagtgtgataagatcagcgaggaataaagtcaccaccattttttcctgtcttgtgagttggtgagttgatattgatacagccatcagccgtggttctactctctctctctctttctcgcggcaccatgtaaatagaaatatcagttcatttctgatggcgcgtgccacggtgccaaccagagattttattcttgtatgtgcgtgttgcatgagagatactacggcgtgtttactgatcactgagctttgcatgtcttctgaattacagcaaaacgcctaattggtactccattagtgttttgcatgtctt

SEQ ID NO: 220032 - DNA, 940 bp, Zea Mays
ccacttgtcgcgcgggatggtagcgtccagaggcacgtcgccgtcgccatcgccgcggtagagaaggccaggctgagcaggaagatctcgcacgccgcgtgacgtacaagtacaaccatgtgtgtgagaccaaactccccgcccgcgccgcaccgcttcctagttcctttcctgaaacggtcgcctggacatcaactatgctgatggatcaacgaacgtgatacgggtctcctgtcctctcctctctctctctctctctctctctctctctctctctctccaccggctatatcatcgtactgccttcgtctcttccgtcagtagctgcagatttctgtctggtacaggttgtcgtatacgttgcgtgttgctgcttgctggggagaggggagcgctgttgcagatggcaagcttcaaccaagagagcagagcaggcacacagagggaggaggcacctctacagggcaagtacggaggcatttctccgaagaaggcgctcatcaacaaggaccacgagcgcgcctacttcgactccgcagattgggtgctcggcaagcaaggcgtgagcagcaacagcccgacgacggtgcccgcagccgagcccctcaagcccaagctgcagcggacggcgtaccaccagcttccccctcggcggcccgcgtacacgtcgtcggagtagctcggcgagcggggagtcgctgcagtgcagcaccgtaggaagccggaatccacggaggtggcgccaattgggttgtacatgttgagaaacactaatgaaggattacgtggtaaataccgaatatatttctaaaggatatcacgtctatatatatatatatatacatatatatatatatagaacatatacaaatgtatcgtctcgtgtagaatatattagctactcatatggaatatagatgagaaagaggctagagggccc

SEQ ID NO: 220033 - DNA, 2608 bp, Zea Mays
gacaatttgcacaatgtgcagttgttcgaactttcactggacacagatcaagctgtgcatctcttgatttccatccttttggagaattcttagccactgggtcttcagatacaaacatgaaaatatgggatactcgaaagaagagatgcatccacacatacaagggtcatacccaacgaattaatgtgcttaaatttactcctgatggccgatggattgtttctggtctgggatttgacggctggaaaactcatgcatgatttttgtcttcatgaaggtccagtcaactgcttagatgttcacccctatgagtttttattggctacaggttcagttgataagactgttaaattttgggaccttgaaacttttgagttgatcggttcttctggacccgagaacaaccgagaatactttgagctggctagtgcaatccgttctatgaagttcaacagtgatggtaaaacaattttttgtggattgcatgaaagcttaaaggctctttcctgggaacccaccatatgtcatgatgtgattgatgtaggctggtccacattagcagatctaactgttgacgaagggaaacttcttggctgctcatataaccaaaattgtgtcggtgtgtgggttgtggatttgatgagaaatgagccttatgttgatagtagtgctggatcacacttaaatggaagtataaataggccaattcaatcagatgatagcatgtcatcagtgtttgggaggctatcgatttccagaagcccagccaatgaaattggatcggatactctgcttggatgctcaatgtctggttcaaaagaaagtcctgtctcaacttctgcatcaatgaggggattgtcaaagccacctggaaaaggggacctccggctctcaagatctatttctacacctcttctttctcctagagttagattgaacccaaatttcattgacagacagaagaatcaggcagctactgctgtaccattaccagaaccaatagtccgctttaaagcgaatctctcttcagatgctggaatgttgtctcgcaagtcacatgcatcagcagctcccatgtatagatcaaggtccaatagttctcggtatggtattatggaatcatcttccatacctgttctggccttgaggcatagctctagaaaggatgctggtcccgttcacagtgaagctgccacaggtgagttagcagatattgagcctcaaaatatagaaaaggaaggtttagttgccaatcatggcaaagaagatggcaagttggtacctgtaattgcttcaaggagctcaaagatagtcgaagaagttggctatagaagaatcaccaatgatgtaggatgtaagagagtaaccctagaaagtggtttgagagttaattcagatatggactatagaagcagagctccagaaagccacgaggtgcagcagcttatacatctgtcagaacctgctggtttacatgggaaatttataagagaatcttcagggtatctggttttgataaatggaaccctgctgctgcaaggaatccagaatttgccagcatccacagaaatgaagtgattggaataagacagttgatggagtcaagtggaaagtatgttgttgacgatcgaccttcctcttctaattacgataacatccagtatgtgacaacactatacagctcgaggctgcatccttcactttctggaaaacttagtgcatctgcaagttatgaagatgatatttctggtctagtggaaaaccatcaagaattcattcatgtaatgaaatctcgactaacaaaactagaggtggtttaccgttgctggcaaagaaatgatataaaaggatctattgatgctacatggagaatgttggattttgctgtcactaatgatattgttaatgctctaatggagaataggaactgtatcacattagatgtttgcgcttctctcttacgtcttaccaccagtcttcttgaaagcacatatgacaggcatatgagcattgccttgaggatgattctcagtttcgtgaagagctttggtcccacaatttcttcagccttgttggctataccacctgttggggtagaccttgaagcagagcagaggatggagtggtgcaatctatgtttccaagaactgaagaatgtgagcgtcagcctcaagtttctgacaaggcggcaaggcgaggttgggagattagctcaggagctcagcctttttcttcaggatctctttcaattgtcaagcgtgtaaacagtgaccataccacgacgtgcaaaatattcacgcactcaatttcctttggtcataacagatatagcgacatatagtaggatttacctctagaaagaaagaaatatacagaaactatagggtgaagcttacagggtattttctccgagctagtttgggagcatcatttttttcatagaattcctatttttctaaggtctcgtttgtttcctttcattttaaggaattagaatcttactaatataatatgctattttttttagaatatgacatttcactacttttcaaagttatcatataagcttatcttaaattcatggggtgagagatgaaaattgatttta

SEQ ID NO: 220034 - DNA, 2482 bp, Zea Mays
gacaatttgcacaatgtgcagttgttcgaactttcactggacacagatcaagctgtgcatctcttgatttccatccttttggagaattcttagccactgggtcttcagatacaaacatgaaaatatgggatactcgaaagaagagatgcatccacacatacaagggtcatacccaacgaattaatgtgcttaaatttactcctgatggccgatggattgtttctggtctgggatttgacggctggaaaactcatgcatgatttttgtcttcatgaaggtccagtcaactgcttagatgttcacccctatgagtttttattggctacaggttcagttgataagactgttaaattttgggaccttgaaacttttgagttgatcggttcttctggacccgagaacaaccgagaatactttgagctggctagtgcaatccgttctatgaagttcaacagtgatggtaaaacaattttttgtggattgcatgaaagcttaaaggctctttcctgggaacccaccatatgtcatgatgtgattgatgtaggctggtccacattagcagatctaactgttgacgaagggaaacttcttggctgctcatataaccaaaattgtgtcggtgtgtgggttgtggatttgatgagaaatgagccttatgttgatagtagtgctggatcacacttaaatggaagtataaataggccaattcaatcagatgatagcatgtcatcagtgtttgggaggctatcgatttccagaagcccagccaatgaaattggatcggatactctgcttggatgctcaatgtctggttcaaaagaaagtcctgtctcaacttctgcatcaatgaggggattgtcaaagccacctggaaaaggggacctccggctctcaagatctatttctacacctcttctttctcctagagttagattgaacccaaatttcattgacagacagaagaatcaggcagctactgctgtaccattaccagaaccaatagtccgctttaaagcgaatctctcttcagatgctggaatgttgtctcgcaagtcacatgcatcagcagctcccatgtatagatcaaggtccaatagttctcggtatggtattatggaatcatcttccatacctgttctggccttgaggcatagctctagaaaggatgctggtcccgttcacagtgaagctgccacaggtgagttagcagatattgagcctcaaaatatagaaaaggaaggtttagttgccaatcatggcaaagaagatggcaagttggtacctgtaattgcttcaaggagctcaaagatagtcgaagaagttggctatagaagaatcaccaatgatgtaggatgtaagagagtaaccctagaaagtggtttgagagttaattcagatatggactatagaagcagagctccagaaagccacgaggtgcagcagcttatacatctgtcagaacctgctggtttacatgggaaatttataagagaatcttcagggtatctggttttgataaatggaaccctgctgctgcaaggaatccagaatttgccagcatccacagaaatgaagtgattggaataagacagttgatggagtcaagtggaaagtatgttgttgacgatcgaccttcctcttctaattacgataacatccagtatgtgacaacactatacagctcggtggtttaccgttgctggcaaagaaatgatataaaaggatctattgatgctacatggagaatgttggattttgctgtcactaatgatattgttaatgctctaatggagaataggaactgtatcacattagatgtttgcgcttctctcttacgtcttaccaccagtcttcttgaaagcacatatgacaggcatatgagcattgccttgaggatgattctcagtttcgtgaagagctttggtcccacaatttcttcagccttgttggctataccacctgttggggtagaccttgaagcagagcagaggatggagtggtgcaatctatgtttccaagaactgaagaatgtgagcgtcagcctcaagtttctgacaaggcggcaaggcgaggttgggagattagctcaggagctcagcctttttcttcaggatctctttcaattgtcaagcgtgtaaacagtgaccataccacgacgtgcaaaatattcacgcactcaatttcctttggtcataacagatatagcgacatatagtaggatttacctctagaaagaaagaaatatacagaaactatagggtgaagcttacagggtattttctccgagctagtttgggagcatcatttttttcatagaattcctatttttctaaggtctcgtttgtttcctttcattttaaggaattagaatcttactaatataatatgctattttttttagaatatgacatttcactacttttcaaagttatcatataagcttatcttaaattcatggggtgagagatgaaaattgatttta

SEQ ID NO: 220035 - DNA, 2646 bp, Zea Mays
gacaatttgcacaatgtgcagttgttcgaactttcactggacacagatcaagctgtgcatctcttgatttccatccttttggagaattcttagccactgggtcttcagatacaaacatgaaaatatgggatactcgaaagaagagatgcatccacacatacaagggtcatacccaacgaattaatgtgcttaaatttactcctgatggccgatggattgtttctggtctgggatttgacggctggaaaactcatgcatgatttttgtcttcatgaaggtccagtcaactgcttagatgttcacccctatgagtttttattggctacaggttcagttgataagactgttaaattttgggaccttgaaacttttgagttgatcggttcttctggacccgagaacaaccgagaatactttgagctggctagtgcaatccgttctatgaagttcaacagtgatggtaaaacaattttttgtggattgcatgaaagcttaaaggctctttcctgggaacccaccatatgtcatgatgtgattgatgtaggctggtccacattagcagatctaactgttgacgaagggaaacttcttggctgctcatataaccaaaattgtgtcggtgtgtgggttgtggatttgatgagaaatgagccttatgttgatagtagtgctggatcacacttaaatggaagtataaataggccaattcaatcagatgatagcatgtcatcagtgtttgggaggctatcgatttccagaagcccagccaatgaaattggatcggatactctgcttggatgctcaatgtctggttcaaaagaaagtcctgtctcaacttctgcatcaatgaggggattgtcaaagccacctggaaaaggggacctccggctctcaagatctatttctacacctcttctttctcctagagttagattgaacccaaatttcattgacagacagaagaatcaggcagctactgctgtaccattaccagaaccaatagtccgctttaaagcgaatctctcttcagatgctggaatgttgtctcgcaagtcacatgcatcagcagctcccatgtatagatcaaggtccaatagttctcggtatggtattatggaatcatcttccatacctgttctggccttgaggcatagctctagaaaggatgctggtcccgttcacagtgaagctgccacaggtgagttagcagatattgagcctcaaaatatagaaaaggaaggtttagttgccaatcatggcaaagaagatggcaagttggtacctgtaattgcttcaaggagctcaaagatagtcgaagaagttggctatagaagaatcaccaatgatgtaggatgtaagagagtaaccctagaaagtggtttgagagttaattcagatatggactatagaagcagagctccagaaagccacgaggtgcagcagcttatacatctgtcagaacctgctggtttacatgggaaatttataagagaatcttcaggtgctggggacaataactgttctggttcaatatgcactgagagtgctgagtttaatgaagttgatatctggtacagggtatctggttttgataaatggaaccctgctgctgcaaggaatccagaatttgccagcatccacagaaatgaagtgattggaataagacagttgatggagtcaagtggaaagtatgttgttgacgatcgaccttcctcttctaattacgataacatccagtatgtgacaacactatacagctcgaggctgcatccttcactttctggaaaacttagtgcatctgcaagttatgaagatgatatttctggtctagtggaaaaccatcaagaattcattcatgtaatgaaatctcgactaacaaaactagaggtggtttaccgttgctggcaaagaaatgatataaaaggatctattgatgctacatggagaatgttggattttgctgaactgtatcacattagatgtttgcgcttctctcttacgtcttaccaccagtcttcttgaaagcacatatgacaggcatatgagcattgccttgaggatgattctcagtttcgtgaagagctttggtcccacaatttcttcagccttgttggctataccacctgttggggtagaccttgaagcagagcagaggatggagtggtgcaatctatgtttccaagaactgaagaatgtgagcgtcagcctcaagtttctgacaaggcggcaaggcgaggttgggagattagctcaggagctcagcctttttcttcaggatctctttcaattgtcaagcgtgtaaacagtgaccataccacgacgtgcaaaatattcacgcactcaatttcctttggtcataacagatatagcgacatatagtaggatttacctctagaaagaaagaaatatacagaaactatagggtgaagcttacagggtattttctccgagctagtttgggagcatcatttttttcatagaattcctatttttctaaggtctcgtttgtttcctttcattttaaggaattagaatcttactaatataatatgctattttttttagaatatgacatttcactacttttcaaagttatcatataagcttatcttaaattcatggggtgagagatgaaaattgatttta

SEQ ID NO: 220036 - DNA, 2271 bp, Zea Mays
aagactgttaaattttgggaccttgaaacttttgagttgatcggttcttctggacccgagagaacaaccgagaatactttgagctggctagtgcaatccgttctatgaagttcaacagtgatggtaaaacaattttttgtggattgcatgaaagcttaaaggctctttcctgggaacccaccatatgtcatgatgtgattgatgtaggctggtccacattagcagatctaactgttgacgaagggaaacttcttggctgctcatataaccaaaattgtgtcggtgtgtgggttgtggatttgatgagaaatgagccttatgttgatagtagtgctggatcacacttaaatggaagtataaataggccaattcaatcagatgatagcatgtcatcagtgtttgggaggctatcgatttccagaagcccagccaatgaaattggatcggatactctgcttggatgctcaatgtctggttcaaaagaaagtcctgtctcaacttctgcatcaatgaggggattgtcaaagccacctggaaaaggggacctccggctctcaagatctatttctacacctcttctttctcctagagttagattgaacccaaatttcattgacagacagaagaatcaggcagctactgctgtaccattaccagaaccaatagtccgctttaaagcgaatctctcttcagatgctggaatgttgtctcgcaagtcacatgcatcagcagctcccatgtatagatcaaggtccaatagttctcggtatggtattatggaatcatcttccatacctgttctggccttgaggcatagctctagaaaggatgctggtcccgttcacagtgaagctgccacaggtgagttagcagatattgagcctcaaaatatagaaaaggaaggtttagttgccaatcatggcaaagaagatggcaagttggtacctgtaattgcttcaaggagctcaaagatagtcgaagaagttggctatagaagaatcaccaatgatgtaggatgtaagagagtaaccctagaaagtggtttgagagttaattcagatatggactatagaagcagagctccagaaagccacgaggtgcagcagcttatacatctgtcagaacctgctggtttacatgggaaatttataagagaatcttcagggtatctggttttgataaatggaaccctgctgctgcaaggaatccagaatttgccagcatccacagaaatgaagtgattggaataagacagttgatggagtcaagtggaaagtatgttgttgacgatcgaccttcctcttctaattacgataacatccagtatgtgacaacactatacagctcgaggctgcatccttcactttctggaaaacttagtgcatctgcaagttatgaagatgatatttctggtctagtggaaaaccatcaagaattcattcatgtaatgaaatctcgactaacaaaactagaggtggtttaccgttgctggcaaagaaatgatataaaaggatctattgatgctacatggagaatgttggattttgctgtcactaatgatattgttaatgctctaatggagaataggaactgtatcacattagatgtttgcgcttctctcttacgtcttaccaccagtcttcttgaaagcacatatgacaggcatatgagcattgccttgaggatgattctcagtttcgtgaagagctttggtcccacaatttcttcagccttgttggctataccacctgttggggtagaccttgaagcagagcagaggatggagtggtgcaatctatgtttccaagaactgaagaatgtgagcgtcagcctcaagtttctgacaaggcggcaaggcgaggttgggagattagctcaggagctcagcctttttcttcaggatctctttcaattgtcaagcgtgtaaacagtgaccataccacgacgtgcaaaatattcacgcactcaatttcctttggtcataacagatatagcgacatatagtaggatttacctctagaaagaaagaaatatacagaaactatagggtgaagcttacagggtattttctccgagctagtttgggagcatcatttttttcatagaattcctatttttctaaggtctcgtttgtttcctttcattttaaggaattagaatcttactaatataatatgctattttttttagaatatgacatttcactacttttcaaagttatcatataagcttatcttaaattcatggggtgagagatgaaaattgatttta

SEQ ID NO: 220037 - DNA, 3157 bp, Zea Mays
gttaaattttgggaccttgaaacttttgagttgatcggttcttctggacccgagagaacaaccgagaatactttgagctggctagtgcaatccgttctatgaagttcaacagtgatggtaaaacaattttttgtggattgcatgaaagcttaaaggctctttcctgggaacccaccatatgtcatgatgtgattgatgtaggctggtccacattagcagatctaactgttgacgaagggaaacttcttggctgctcatataaccaaaattgtgtcggtgtgtgggttgtggatttgatgagaaatgagccttatgttgatagtagtgctggatcacacttaaatggaagtataaataggccaattcaatcagatgatagcatgtcatcagtgtttgggaggctatcgatttccagaagcccagccaatgaaattggatcggatactctgcttggatgctcaatgtctggttcaaaagaaagtcctgtctcaacttctgcatcaatgaggggattgtcaaagccacctggaaaaggggacctccggctctcaagatctatttctacacctcttctttctcctagagttagattgaacccaaatttcattgacagacagaagaatcaggcagctactgctgtaccattaccagaaccaatagtccgctttaaagcgaatctctcttcagatgctggaatgttgtctcgcaagtcacatgcatcagcagctcccatgtatagatcaaggtccaatagttctcggtatggtattatggaatcatcttccatacctgttctggccttgaggcatagctctagaaaggatgctggtcccgttcacagtgaagctgccacaggtgagttagcagatattgagcctcaaaatatagaaaaggaaggtttagttgccaatcatggcaaagaagatggcaagttggtacctgtaattgcttcaaggagctcaaagatagtcgaagaagttggctatagaagaatcaccaatgatgtaggatgtaagagagtaaccctagaaagtggtttgagagttaattcagatatggactatagaagcagagctccagaaagccacgaggtgcagcagcttatacatctgtcagaacctgctggtttacatgggaaatttataagagaatcttcaggtgctggggacaataactgttctggttcaatatgcactgagagtgctgagtttaatgaagttgatatctggtacagggtatctggttttgataaatggaaccctgctgctgcaaggaatccagaatttgccagcatccacagaaatgaagtgattggaataagacagttgatggagtcaagtggaaagtatgttgttgacgatcgaccttcctcttctaattacgataacatccagtatgtgacaacactatacagctcgaggctgcatccttcactttctggaaaacttagtgcatctgcaagttatgaagatgatatttctggtctagtggaaaaccatcaagaattcattcatgtaatgaaatctcgactaacaaaactagaggtggtttaccgttgctggcaaagaaatgatataaaaggatctattgatgctacatggagaatgttggattttgctgaactgtatcacattagatgtttgcgcttctctcttacgtcttaccaccagtcttcttgaaagcacatatgacaggtcatttctcatatttcctattaatttatcaatattgaaattgtgagatcatttaaatttgaccttgctattgaacatggctgattattttgattaaaagctgacttaatgcccttttggagagttggaactcgcaatgggaattgaatctgattataatgcccctttcttgaaaaagagatggaattctgaatacgcagatatgaaatattgttcatggtccagactatggtcaaattgtagcactagccggcctttgtattcaaggctatgacacgtacagatttgagtatgcagactataggctagcacaagctggtcattctattcaaggaatcaaggctaagccacataaaaaaaagaatcttatgacacagcaaattactgcatcactaaaaccgcatttgcacgactgcactttttcttaattcacttgagtcatgggctccatgtttccacttctatggatcgcaatcaaacagtttagtgaccatgtatcgatgtcttgctttacctattcccaaaaaggaagtcccaatggtataccctcggcttccttcgctgatggtagcactagtagcctcatcaatcagaagattttctactgtgcaatatttaactgcccttccactgttttaagttacttttcacattttgtatatggtgctacactgctgctactacgaaaaatgactggcggtgtacattgcaacagtaactgttttgtcaaaagtgtgtgttgacactttccaacgcaggcatatgagcattgccttgaggatgattctcagtttcgtgaagagctttggtcccacaatttcttcagccttgttggctataccacctgttggggtagaccttgaagcagagcagaggtgtttttttcttttcatctcactgaaattgtaatggattctccttcctgcctcatgcatacaacggacttgcttcacgagcgcgtatcttgctaggatggagtggtgcaatctatgtttccaagaactgaagaatgtgagcgtcagcctcaagtttctgacaaggcggcaaggcgaggttgggagattagctcaggagctcagcctttttcttcaggatctctttcaattgtcaagcgtgtaaacagtgaccataccacgacgtgcaaaatattcacgcactcaatttcctttggtcataacagatatagcgacatatagtaggatttacctctagaaagaaagaaatatacagaaactatagggtgaagcttacagggtattttctccgagctagtttgggagcatcatttttttcatagaattcctatttttctaaggtctcgtttgtttcctttcattttaaggaattagaatcttactaatataatatgctattttttttagaatatgacatttcactacttttcaaagttatcatataagcttatcttaaattcatggggtgagagatgaaaattgatttta

SEQ ID NO: 220038 - DNA, 2303 bp, Zea Mays
gttaaattttgggaccttgaaacttttgagttgatcggttcttctggacccgagagaacaaccgagaatactttgagctggctagtgcaatccgttctatgaagttcaacagtgatggtaaaacaattttttgtggattgcatgaaagcttaaaggctctttcctgggaacccaccatatgtcatgatgtgattgatgtaggctggtccacattagcagatctaactgttgacgaagggaaacttcttggctgctcatataaccaaaattgtgtcggtgtgtgggttgtggatttgatgagaaatgagccttatgttgatagtagtgctggatcacacttaaatggaagtataaataggccaattcaatcagatgatagcatgtcatcagtgtttgggaggctatcgatttccagaagcccagccaatgaaattggatcggatactctgcttggatgctcaatgtctggttcaaaagaaagtcctgtctcaacttctgcatcaatgaggggattgtcaaagccacctggaaaaggggacctccggctctcaagatctatttctacacctcttctttctcctagagttagattgaacccaaatttcattgacagacagaagaatcaggcagctactgctgtaccattaccagaaccaatagtccgctttaaagcgaatctctcttcagatgctggaatgttgtctcgcaagtcacatgcatcagcagctcccatgtatagatcaaggtccaatagttctcggtatggtattatggaatcatcttccatacctgttctggccttgaggcatagctctagaaaggatgctggtcccgttcacagtgaagctgccacaggtgagttagcagatattgagcctcaaaatatagaaaaggaaggtttagttgccaatcatggcaaagaagatggcaagttggtacctgtaattgcttcaaggagctcaaagatagtcgaagaagttggctatagaagaatcaccaatgatgtaggatgtaagagagtaaccctagaaagtggtttgagagttaattcagatatggactatagaagcagagctccagaaagccacgaggtgcagcagcttatacatctgtcagaacctgctggtttacatgggaaatttataagagaatcttcaggtgctggggacaataactgttctggttcaatatgcactgagagtgctgagtttaatgaagttgatatctggtacagggtatctggttttgataaatggaaccctgctgctgcaaggaatccagaatttgccagcatccacagaaatgaagtgattggaataagacagttgatggagtcaagtggaaagtatgttgttgacgatcgaccttcctcttctaattacgataacatccagtatgtgacaacactatacagctcgaggctgcatccttcactttctggaaaacttagtgcatctgcaagttatgaagatgatatttctggtctagtggaaaaccatcaagaattcattcatgtaatgaaatctcgactaacaaaactagaggtggtttaccgttgctggcaaagaaatgatataaaaggatctattgatgctacatggagaatgttggattttgctgaactgtatcacattagatgtttgcgcttctctcttacgtcttaccaccagtcttcttgaaagcacatatgacaggcatatgagcattgccttgaggatgattctcagtttcgtgaagagctttggtcccacaatttcttcagccttgttggctataccacctgttggggtagaccttgaagcagagcagaggatggagtggtgcaatctatgtttccaagaactgaagaatgtgagcgtcagcctcaagtttctgacaaggcggcaaggcgaggttgggagattagctcaggagctcagcctttttcttcaggatctctttcaattgtcaagcgtgtaaacagtgaccataccacgacgtgcaaaatattcacgcactcaatttcctttggtcataacagatatagcgacatatagtaggatttacctctagaaagaaagaaatatacagaaactatagggtgaagcttacagggtattttctccgagctagtttgggagcatcatttttttcatagaattcctatttttctaaggtctcgtttgtttcctttcattttaaggaattagaatcttactaatataatatgctattttttttagaatatgacatttcactacttttcaaagttatcatataagcttatcttaaattcatggggtgagagatgaaaattgatttta

SEQ ID NO: 220039 - DNA, 2385 bp, Zea Mays
gttaaattttgggaccttgaaacttttgagttgatcggttcttctggacccgaggttttcttttcctaggatataattaaccttttcttgcttaatgcagaacaaccgagaatactttgagctggctagtgcaatccgttctatgaagttcaacagtgatggtaaaacaattttttgtggattgcatgaaagcttaaaggctctttcctgggaacccaccatatgtcatgatgtgattgatgtaggctggtccacattagcagatctaactgttgacgaagggaaacttcttggctgctcatataaccaaaattgtgtcggtgtgtgggttgtggatttgatgagaaatgagccttatgttgatagtagtgctggatcacacttaaatggaagtataaataggccaattcaatcagatgatagcatgtcatcagtgtttgggaggctatcgatttccagaagcccagccaatgaaattggatcggatactctgcttggatgctcaatgtctggttcaaaagaaagtcctgtctcaacttctgcatcaatgaggggattgtcaaagccacctggaaaaggggacctccggctctcaagatctatttctacacctcttctttctcctagagttagattgaacccaaatttcattgacagacagaagaatcaggcagctactgctgtaccattaccagaaccaatagtccgctttaaagcgaatctctcttcagatgctggaatgttgtctcgcaagtcacatgcatcagcagctcccatgtatagatcaaggtccaatagttctcggtatggtattatggaatcatcttccatacctgttctggccttgaggcatagctctagaaaggatgctggtcccgttcacagtgaagctgccacaggtgagttagcagatattgagcctcaaaatatagaaaaggaaggtttagttgccaatcatggcaaagaagatggcaagttggtacctgtaattgcttcaaggagctcaaagatagtcgaagaagttggctatagaagaatcaccaatgatgtaggatgtaagagagtaaccctagaaagtggtttgagagttaattcagatatggactatagaagcagagctccagaaagccacgaggtgcagcagcttatacatctgtcagaacctgctggtttacatgggaaatttataagagaatcttcaggtgctggggacaataactgttctggttcaatatgcactgagagtgctgagtttaatgaagttgatatctggtacagggtatctggttttgataaatggaaccctgctgctgcaaggaatccagaatttgccagcatccacagaaatgaagtgattggaataagacagttgatggagtcaagtggaaagtatgttgttgacgatcgaccttcctcttctaattacgataacatccagtatgtgacaacactatacagctcgaggctgcatccttcactttctggaaaacttagtgcatctgcaagttatgaagatgatatttctggtctagtggaaaaccatcaagaattcattcatgtaatgaaatctcgactaacaaaactagaggtggtttaccgttgctggcaaagaaatgatataaaaggatctattgatgctacatggagaatgttggattttgctgtcactaatgatattgttaatgctctaatggagaataggaactgtatcacattagatgtttgcgcttctctcttacgtcttaccaccagtcttcttgaaagcacatatgacaggcatatgagcattgccttgaggatgattctcagtttcgtgaagagctttggtcccacaatttcttcagccttgttggctataccacctgttggggtagaccttgaagcagagcagaggatggagtggtgcaatctatgtttccaagaactgaagaatgtgagcgtcagcctcaagtttctgacaaggcggcaaggcgaggttgggagattagctcaggagctcagcctttttcttcaggatctctttcaattgtcaagcgtgtaaacagtgaccataccacgacgtgcaaaatattcacgcactcaatttcctttggtcataacagatatagcgacatatagtaggatttacctctagaaagaaagaaatatacagaaactatagggtgaagcttacagggtattttctccgagctagtttgggagcatcatttttttcatagaattcctatttttctaaggtctcgtttgtttcctttcattttaaggaattagaatcttactaatataatatgctattttttttagaatatgacatttcactacttttcaaagttatcatataagcttatcttaaattcatggggtgagagatgaaaattgatttta

SEQ ID NO: 220040 - DNA, 2302 bp, Zea Mays
accttgaaacttttgagttgatcggttcttctggacccgaggctagtgcaatccgttctatgaagttcaacagtgatggtaaaacaattttttgtggattgcatgaaagcttaaaggctctttcctgggaacccaccatatgtcatgatgtgattgatgtaggctggtccacattagcagatctaactgttgacgaagggaaacttcttggctgctcatataaccaaaattgtgtcggtgtgtgggttgtggatttgatgagaaatgagccttatgttgatagtagtgctggatcacacttaaatggaagtataaataggccaattcaatcagatgatagcatgtcatcagtgtttgggaggctatcgatttccagaagcccagccaatgaaattggatcggatactctgcttggatgctcaatgtctggttcaaaagaaagtcctgtctcaacttctgcatcaatgaggggattgtcaaagccacctggaaaaggggacctccggctctcaagatctatttctacacctcttctttctcctagagttagattgaacccaaatttcattgacagacagaagaatcaggcagctactgctgtaccattaccagaaccaatagtccgctttaaagcgaatctctcttcagatgctggaatgttgtctcgcaagtcacatgcatcagcagctcccatgtatagatcaaggtccaatagttctcggtatggtattatggaatcatcttccatacctgttctggccttgaggcatagctctagaaaggatgctggtcccgttcacagtgaagctgccacaggtgagttagcagatattgagcctcaaaatatagaaaaggaaggtttagttgccaatcatggcaaagaagatggcaagttggtacctgtaattgcttcaaggagctcaaagatagtcgaagaagttggctatagaagaatcaccaatgatgtaggatgtaagagagtaaccctagaaagtggtttgagagttaattcagatatggactatagaagcagagctccagaaagccacgaggtgcagcagcttatacatctgtcagaacctgctggtttacatgggaaatttataagagaatcttcaggtgctggggacaataactgttctggttcaatatgcactgagagtgctgagtttaatgaagttgatatctggtacagggtatctggttttgataaatggaaccctgctgctgcaaggaatccagaatttgccagcatccacagaaatgaagtgattggaataagacagttgatggagtcaagtggaaagtatgttgttgacgatcgaccttcctcttctaattacgataacatccagtatgtgacaacactatacagctcgaggctgcatccttcactttctggaaaacttagtgcatctgcaagttatgaagatgatatttctggtctagtggaaaaccatcaagaattcattcatgtaatgaaatctcgactaacaaaactagaggtggtttaccgttgctggcaaagaaatgatataaaaggatctattgatgctacatggagaatgttggattttgctgtcactaatgatattgttaatgctctaatggagaataggaactgtatcacattagatgtttgcgcttctctcttacgtcttaccaccagtcttcttgaaagcacatatgacaggcatatgagcattgccttgaggatgattctcagtttcgtgaagagctttggtcccacaatttcttcagccttgttggctataccacctgttggggtagaccttgaagcagagcagaggatggagtggtgcaatctatgtttccaagaactgaagaatgtgagcgtcagcctcaagtttctgacaaggcggcaaggcgaggttgggagattagctcaggagctcagcctttttcttcaggatctctttcaattgtcaagcgtgtaaacagtgaccataccacgacgtgcaaaatattcacgcactcaatttcctttggtcataacagatatagcgacatatagtaggatttacctctagaaagaaagaaatatacagaaactatagggtgaagcttacagggtattttctccgagctagtttgggagcatcatttttttcatagaattcctatttttctaaggtctcgtttgtttcctttcattttaaggaattagaatcttactaatataatatgctattttttttagaatatgacatttcactacttttcaaagttatcatataagcttatcttaaattcatggggtgagagatgaaaattgatttta

SEQ ID NO: 220041 - DNA, 707 bp, Zea Mays
tcctttgagttctcgaaatgcttctataggaagtccgggtgagattcgagggttttggggcggatgaggatgagtgggtgaatgtcaagaagttcatccgccagcgttccattcctctggagtcctcacagtgcaaaagcgttgttgaaggtgaccttgttctctgcttcagggagggaaacgaggaggcattgcatttcgatgcacatgttcttgaggttcagcggaagcagcatgatattagggggtgcagatgtgtattccttgttgaatacgatcatgaccaaagccaggagagggttagcctgagaagattgtcccggcggccaaagtacttttgaaggctgctcctgttagcctgatgggcatatctattctggaactggaactaaccggagcgtgaaacttaggtgaagttagtttgtggcgtccttggtcatgtgtgtattagcaaccggcggcagcaagcatgggcttgcatctcaacccctttggcacaggactggctgactgaattttataaactcgttatcgtgcagaagagggaagagtacgcggcttgagcacttagggtgtcacttaggatgtgtttggttcgtgaagtcaccttatgcttcatgaggtgtatcatgaattcatcctataattttttgtggcatcaacctattcctcgtttatatattaattattagtttatgagttagtaa

SEQ ID NO: 220042 - DNA, 2184 bp, Zea Mays
cacccccgcacccgcactcgggctctcgaaaagcagggaaaaagaattctccatttccccactcgccctcgctccctccctctcccgctcccgctcgccagtgggagtgtgcggggctagcagctagggtttccgcgagcacaccgccggccagccgcgggcgatctcgggttcgcgggggcgcccgccccgactcgggttcgcgggggcgcggacatgaagtcgtcgctgcggaagctgcggggcttcgcgctgcagcgccacgagcagcgggtggaccgggaccgcggccgcggccactccaccacggcggcggaggagctcctcgctgctgcccaggatatgacagatatgaggagctgttacgataacttgctttctgttgctgcagcaattgcaaatagtgcatacgagttctctgaagcacttcaagacatgggggcttgtttgcttaaaagaattacaccaaataaagatggaatcaatgataaagttttgctgttgcttgggaaatcacaatttgaacttcggaaacttgtagatagttatcgtgtgcatgttcttaatacgatcaccactccatcactgtcgcttcttaatgagcttcaaaccgtggaggaaatgaagcgccaatgtgatgaaaaaagagaattgtacgaattcatgctaaatgctcagaaagaaaagggaagatctaagaatgctaaaggtgataatgtagcatcagaacaattgaaacaagctcaggaagattatcaagaggaagcgactcttttcctattccggttgaagtcattgaagcaaggacagttccgaagtcttttcacacaagctgctcggcatcatgctgcacaggatttttttaacagcagcaaagaagattattcttctgttccacatgaaagacagagaattgaaagtcagtcagcaccgctttttcctgggaaaaaggtcaatacagaagagagaataaaagatttgcggcgttctgcgacaaggaagttaaatacttatgttttgcctaccccaaatgatgttcgagctacttctcagatagcatcaggaaatcctatttctggacctctcgagagcaaaggtgccttccattcatctccactccacccttctgcagacataagagatttgagagacaataaactacctagtcctgcaagattgtctaatgtacagtctgtgctgaaagagagcaataccaatacagcagaaacaaggaaagtactcccagtgggtgatctcgctttacctggctattatgacctgaagactctcgacaacaacaaagtgaaaagagggtcattttctggcccaatagcttctagaccacggccaacagagaacaatgatgttatttctgcagcacccaggcatagctctgcacatcagccagtgcacatgagagtatcccccggcaactcgccgccacccatttcctcaccgaagatcaaggagcttcatgagcttcctcgaccgcctgttaatacatcaaaaaacacaacatttcccagtttggttgcccactcggccccattggtagcaaatcctgcatctctgacacccaaagttcaagaccattttaggggggagaacaggttcagacggtaaggagatagaagatcagcaagacaagggagctgccagaatgagcctttcttctcttccttcagctcaaacattgttggaagatcgtcagccattgtcagcagctgctggatcggttagcaaaacataggagtattcactgcgaaggtggattactatcattatcaagcggcttgctgagcccttcctggaagaatgctgtacatattagcatgtgagccctggccagtatcgcggaagtagtaggttgtttctcgtgccctttggctaaggtgtagtctgcagatagtgggtttgcggaaataaattcccccaattttctcaccgcttggttgattgacgcgagatttgctgttgcgcgagcttgtttgcttgccttgaagcgaggtcggagtgccatctgttttctgcagcttctgtaattatcacctggtttcgtttcctgtggttatgtaattaccatccgcttcacccccgatcaaaaccacctgtggtaaggggaaaaaaaaggcaagaagcgctgtgttgtcgtattggcactctacatttaaagccccgggtttg

SEQ ID NO: 220043 - DNA, 2411 bp, Zea Mays
cacccccgcacccgcactcgggctctcgaaaagcagggaaaaagaattctccatttccccactcgccctcgctccctccctctcccgctcccgctcgccagtgggagtgtgcggggctagcagctagggtttccgcgagcacaccgccggccagccgcgggcgatctcgggttcgcgggggcgcccgccccgactcgggttcgcgggggcgcggacatgaagtcgtcgctgcggaagctgcggggcttcgcgctgcagcgccacgagcagcgggtggaccgggaccgcggccgcggccactccaccacggcggcggaggagctcctcgctgctgcccagatatgaggagctgttacgataacttgctttctgttgctgcagcaattgcaaatagtgcatacgagttctctgaagcacttcaagacatgggggcttgtttgcttaaaagaattacaccaaataaagatggaatcaatgataaagttttgctgttgcttgggaaatcacaatttgaacttcggaaacttgtagatagttatcgtgtgcatgttcttaatacgatcaccactccatcactgtcgcttcttaatgagcttcaaaccgtggaggaaatgaagcgccaatgtgatgaaaaaagagaattgtacgaattcatgctaaatgctcagaaagaaaagggaagatctaagaatgctaaaggtgataatgtagcatcagaacaattgaaacaagctcaggaagattatcaagaggaagcgactcttttcctattccggttgaagtcattgaagcaaggacagttccgaagtcttttcacacaagctgctcggcatcatgctgcacagctaaatttgttcagaaagggggtcaagtcccttgaggctgtagagccacatgttaggctcgctgctgagcagcaacacattgatcatcagtttagcgcacttgaggaagaggattatgttgttgaggatgagaatgatgacgagtacaacgacagtcatgatggagagttgtcttttgattatggagaaaataaggaaactgagaaatctggtatcgcttctaggaatcatacagaggatttttttaacagcagcaaagaagattattcttctgttccacatgaaagacagagaattgaaagtcagtcagcaccgctttttcctgggaaaaaggtcaatacagaagagagaataaaagatttgcggcgttctgcgacaaggaagttaaatacttatgttttgcctaccccaaatgatgttcgagctacttctcagatagcatcaggaaatcctatttctggacctctcgagagcaaaggtgccttccattcatctccactccacccttctgcagacataagagatttgagagacaataaactacctagtcctgcaagattgtctaatgtacagtctgtgctgaaagagagcaataccaatacagcagaaacaaggaaagtactcccagtgggtgatctcgctttacctggctattatgacctgaagactctcgacaacaacaaagtgaaaagagggtcattttctggcccaatagcttctagaccacggccaacagagaacaatgatgttatttctgcagcacccaggcatagctctgcacatcagccagtgcacatgagagtatcccccggcaactcgccgccacccatttcctcaccgaagatcaaggagcttcatgagcttcctcgaccgcctgttaatacatcaaaaaacacaacatttcccagtttggttgcccactcggccccattggtagcaaatcctgcatctctgacacccaaagttcaagaccattttaggggggagaacaggttcagacggtaaggagatagaagatcagcaagacaagggagctgccagaatgagcctttcttctcttccttcagctcaaacattgttggaagatcgtcagccattgtcagcagctgctggatcggttagcaaaacataggagtattcactgcgaaggtggattactatcattatcaagcggcttgctgagcccttcctggaagaatgctgtacatattagcatgtgagccctggccagtatcgcggaagtagtaggttgtttctcgtgccctttggctaaggtgtagtctgcagatagtgggtttgcggaaataaattcccccaattttctcaccgcttggttgattgacgcgagatttgctgttgcgcgagcttgtttgcttgccttgaagcgaggtcggagtgccatctgttttctgcagcttctgtaattatcacctggtttcgtttcctgtggttatgtaattaccatccgcttcacccccgatcaaaaccacctgtggtaaggggaaaaaaaaggcaagaagcgctgtgttgtcgtattggcactctacatttaaagccccgggtttg

SEQ ID NO: 220044 - DNA, 2421 bp, Zea Mays
cacccccgcacccgcactcgggctctcgaaaagcagggaaaaagaattctccatttccccactcgccctcgctccctccctctcccgctcccgctcgccagtgggagtgtgcggggctagcagctagggtttccgcgagcacaccgccggccagccgcgggcgatctcgggttcgcgggggcgcccgccccgactcgggttcgcgggggcgcggacatgaagtcgtcgctgcggaagctgcggggcttcgcgctgcagcgccacgagcagcgggtggaccgggaccgcggccgcggccactccaccacggcggcggaggagctcctcgctgctgcccaggatatgacagatatgaggagctgttacgataacttgctttctgttgctgcagcaattgcaaatagtgcatacgagttctctgaagcacttcaagacatgggggcttgtttgcttaaaagaattacaccaaataaagatggaatcaatgataaagttttgctgttgcttgggaaatcacaatttgaacttcggaaacttgtagatagttatcgtgtgcatgttcttaatacgatcaccactccatcactgtcgcttcttaatgagcttcaaaccgtggaggaaatgaagcgccaatgtgatgaaaaaagagaattgtacgaattcatgctaaatgctcagaaagaaaagggaagatctaagaatgctaaaggtgataatgtagcatcagaacaattgaaacaagctcaggaagattatcaagaggaagcgactcttttcctattccggttgaagtcattgaagcaaggacagttccgaagtcttttcacacaagctgctcggcatcatgctgcacagctaaatttgttcagaaagggggtcaagtcccttgaggctgtagagccacatgttaggctcgctgctgagcagcaacacattgatcatcagtttagcgcacttgaggaagaggattatgttgttgaggatgagaatgatgacgagtacaacgacagtcatgatggagagttgtcttttgattatggagaaaataaggaaactgagaaatctggtatcgcttctaggaatcatacagaggatttttttaacagcagcaaagaagattattcttctgttccacatgaaagacagagaattgaaagtcagtcagcaccgctttttcctgggaaaaaggtcaatacagaagagagaataaaagatttgcggcgttctgcgacaaggaagttaaatacttatgttttgcctaccccaaatgatgttcgagctacttctcagatagcatcaggaaatcctatttctggacctctcgagagcaaaggtgccttccattcatctccactccacccttctgcagacataagagatttgagagacaataaactacctagtcctgcaagattgtctaatgtacagtctgtgctgaaagagagcaataccaatacagcagaaacaaggaaagtactcccagtgggtgatctcgctttacctggctattatgacctgaagactctcgacaacaacaaagtgaaaagagggtcattttctggcccaatagcttctagaccacggccaacagagaacaatgatgttatttctgcagcacccaggcatagctctgcacatcagccagtgcacatgagagtatcccccggcaactcgccgccacccatttcctcaccgaagatcaaggagcttcatgagcttcctcgaccgcctgttaatacatcaaaaaacacaacatttcccagtttggttgcccactcggccccattggtagcaaatcctgcatctctgacacccaaagttcaagaccattttaggggggagaacaggttcagacggtaaggagatagaagatcagcaagacaagggagctgccagaatgagcctttcttctcttccttcagctcaaacattgttggaagatcgtcagccattgtcagcagctgctggatcggttagcaaaacataggagtattcactgcgaaggtggattactatcattatcaagcggcttgctgagcccttcctggaagaatgctgtacatattagcatgtgagccctggccagtatcgcggaagtagtaggttgtttctcgtgccctttggctaaggtgtagtctgcagatagtgggtttgcggaaataaattcccccaattttctcaccgcttggttgattgacgcgagatttgctgttgcgcgagcttgtttgcttgccttgaagcgaggtcggagtgccatctgttttctgcagcttctgtaattatcacctggtttcgtttcctgtggttatgtaattaccatccgcttcacccccgatcaaaaccacctgtggtaaggggaaaaaaaaggcaagaagcgctgtgttgtcgtattggcactctacatttaaagccccgggtttg

SEQ ID NO: 220045 - DNA, 2359 bp, Zea Mays
cacccccgcacccgcactcgggctctcgaaaagcagggaaaaagaattctccatttccccactcgccctcgctccctccctctcccgctcccgctcgccagtgggagtgtgcggggctagcagctagggtttccgcgagcacaccgccggccagccgcgggcgatctcgggttcgcgggggcgcccgccccgactcgggttcgcgggggcgcggacatgaagtcgtcgctgcggaagctgcggggcttcgcgctgcagcgccacgagcagcgggtggaccgggaccgcggccgcggccactccaccacggcggcggaggagctcctcgctgctgcccaggatatgacagatatgaggagctgttacgataacttgctttctgttgctgcagcaattgcaaatagtgcatacgagttctctgaagcacttcaagacatgggggcttgtttgcttaaaagaattacaccaaataaagatggaatcaatgcgtgtgcatgttcttaatacgatcaccactccatcactgtcgcttcttaatgagcttcaaaccgtggaggaaatgaagcgccaatgtgatgaaaaaagagaattgtacgaattcatgctaaatgctcagaaagaaaagggaagatctaagaatgctaaaggtgataatgtagcatcagaacaattgaaacaagctcaggaagattatcaagaggaagcgactcttttcctattccggttgaagtcattgaagcaaggacagttccgaagtcttttcacacaagctgctcggcatcatgctgcacagctaaatttgttcagaaagggggtcaagtcccttgaggctgtagagccacatgttaggctcgctgctgagcagcaacacattgatcatcagtttagcgcacttgaggaagaggattatgttgttgaggatgagaatgatgacgagtacaacgacagtcatgatggagagttgtcttttgattatggagaaaataaggaaactgagaaatctggtatcgcttctaggaatcatacagaggatttttttaacagcagcaaagaagattattcttctgttccacatgaaagacagagaattgaaagtcagtcagcaccgctttttcctgggaaaaaggtcaatacagaagagagaataaaagatttgcggcgttctgcgacaaggaagttaaatacttatgttttgcctaccccaaatgatgttcgagctacttctcagatagcatcaggaaatcctatttctggacctctcgagagcaaaggtgccttccattcatctccactccacccttctgcagacataagagatttgagagacaataaactacctagtcctgcaagattgtctaatgtacagtctgtgctgaaagagagcaataccaatacagcagaaacaaggaaagtactcccagtgggtgatctcgctttacctggctattatgacctgaagactctcgacaacaacaaagtgaaaagagggtcattttctggcccaatagcttctagaccacggccaacagagaacaatgatgttatttctgcagcacccaggcatagctctgcacatcagccagtgcacatgagagtatcccccggcaactcgccgccacccatttcctcaccgaagatcaaggagcttcatgagcttcctcgaccgcctgttaatacatcaaaaaacacaacatttcccagtttggttgcccactcggccccattggtagcaaatcctgcatctctgacacccaaagttcaagaccattttaggggggagaacaggttcagacggtaaggagatagaagatcagcaagacaagggagctgccagaatgagcctttcttctcttccttcagctcaaacattgttggaagatcgtcagccattgtcagcagctgctggatcggttagcaaaacataggagtattcactgcgaaggtggattactatcattatcaagcggcttgctgagcccttcctggaagaatgctgtacatattagcatgtgagccctggccagtatcgcggaagtagtaggttgtttctcgtgccctttggctaaggtgtagtctgcagatagtgggtttgcggaaataaattcccccaattttctcaccgcttggttgattgacgcgagatttgctgttgcgcgagcttgtttgcttgccttgaagcgaggtcggagtgccatctgttttctgcagcttctgtaattatcacctggtttcgtttcctgtggttatgtaattaccatccgcttcacccccgatcaaaaccacctgtggtaaggggaaaaaaaaggcaagaagcgctgtgttgtcgtattggcactctacatttaaagccccgggtttg
